United States Patent Application Publication US 2017/0114356 A1 - sequence listing, part 120

SEQ ID NO: 220046 - DNA, 3534 bp, Zea Mays
ccactgtctcctctccgtgacgcacgcccgagatcctctccgcgacacacgcctccctctcctctgccccaccctcctccccacgccatcggcgccgccatcatcggatccggcccaagatgcctccgccccacgcgcccgagtcgtcgaggcacactccttcccgcctccgtcgtccacgcatatctccgcctcacctcggcgcccgagtcgtcgcacgcgttcgcggtggtgtccatcccggcaccggcctcacgcaccgtctacagctcccaactctgctcctctcagttctccctccgcatttcgccttctctcccttcctctccaagcagcgtcctcctcgcctagatccgtacaagcggcaaataacctctccggcggcgagacagatggagtcgacctccggcgaggatgctccgaagcacaacccgattccgtccgcgctcgtctccaacctacagtccgtgctcaccgcccgccgcttgtccgcagccgaggtcagcaccgccgccacagctagcgaggttgaggccttggcttaggaagcagaggcgttcgctgcccccacgggagatgggacgctggcgaggcccatcgtgctactgacctatgccggggggatccggtcggcgggtctcgcggcgctcgtcgacgccctcgttgccgccgaccgctgcgacgtccacgtgtgtgcccccgaatcgtacgtgctgcgacttagaaaaccaaaccacagcgggaccagtgctcggatagggtccgacgacgatgcaagcaaggagtggcgcgcggccgacggggcgcagatcggctcctgcacgtgcagcgcagccgcgtgacagtgaagcagggaggccgcgataggtggcgcagggagggtgcgacggaggcaaagtgcaagcacctggggacttcaggtaagtagaaaaccaacactgaatttgtcggttctctgttttgtgattgaccgattggtttgttgatctcagaaaattgtttcaccgttaagcaccaatttttgggtaggtcagtgttttgggatgattctcctatgcatcaatagtaaccttgtgcttggcaaagttatttgccctgataatgttgtaggtttagtgaaaagaaatatactgacatatccacctatccatcgatgcccaatggagattgacctctatcaagatttagttatgtgtctcagtagggcaatatttctgtgagttgtatactgtggattcctcatctgcatcatgaattgatcgcactatttatgccctatttttcaaaccatggtttctgtaattctttgcaccatggtatttttctcaaatgattttatctttcacaacccggactgaactcactgaagcagaaagaaagagtacaagtctactactgcagaaagcaaggagaatgccaatagaagcagatttcatgtatggatcgggtaatgacctttttgtgttctcctcaactcattatttagctacatatcttattaaatcttaatctttggtcattagctaccagcttgcactattattgtgaaaatccattaactttagtcattgaaatggttagactatcaccacgtaggtgatattagtggcattaagtgattaatctgtggcaaatcctattatcaactattttcttggctaatcattacaatatataatgaagaatactatggcttgaagggatatttatacaattggctatgtatacggtctgcccaggcgcccaacaatgaatgatgtggtgaaggaacttgagatcatcagatagaatgaaggggcacaattgttaaactcagcgtctttatcagttgaacaatttggaaacaaaaagagaagagatccttatgcatttgtctatggatgatggaagcaacaacaacacttttgactacaacagtgggagttcaattaagttgttcacccaagtagataattgtctccactctttcaacaagttattggagttattatatatgtctgctccatatgaatgccttttcattttagtatcacatctgaaattaccaaccttttatactggcagtgtgataagcattgaataaaagtttttttatatgttgaatattcaacaatatatgtataattttatatatacataaatataatattctcatacgcgtggttgctccgttggtatattgttgaaaggttgttttttacggtacatgtgctgaaatggccatgctttgatctgcctataggttgaaccatataagctttctctcagactcgattatgctgcttacatgatccatttagctgtctttggatttttggggtaactctccaatatctcacatgaggttctttgtgatagctgttacttaatctgtggtgatctatgtaaatgtggcaacacttgcagttcctcgagcccttgtgcatggatatatcgtttagttgtgtctaataatttgtaattagtggcaacatctttttgttattttggttttatctgatttttattgttataagatctcgattgcaaactggcagttagtacacctttaggttttcctttgtcgtatcaagctaataatgtgtgaagcagggttcccattctgatctttagttttttgtgattttaatagcaataacctttttcgcaaaaaagtaacaaactttatgcagtatgcggttcgtatagttcccagtatccttttggacttagatttagttcgatatatggttatgtttattgacagaatgcttttagctttgcagataaaatcttgagcaaaatgggagaaggtttgggttttctgcaatctgtcgtctcctcttctgctgggtatctccattattattctaatgaagagggctacgagttggattttcgtaggtacatttgagcgtgttttggaatgctgggatcgtgaaacacgtgaatatgttgccataaaagttgtacacagtatccacaagtactgtgatgctgcaatgattgagatagatgtgctcaatcgccttgtagaaaatgaaaaatatagatttctgctacacttggggaatcaaagaaaagtgaaagtgccatgtcaaagttgatgaccagaagcttgctattggaaccctctctattgaaaaatacccctagatagaaattgatttggttttcaataaagagtgtgagctgtcacacacatcgaaaactacacgtgtatttttctttggttacaaggttgagcaaccaatcgaggaagatgaataatggatcttgattctgaagatgaagagaaggagctaaacattccagtaatcaaggaaaatggcaaaggtgatgggaaggaggaccagagaagtgaagagaaggcagttgctgcagcttcaaaatcaagtcttgggcttgaaaaaaagcaaggatgagtatgagtctgatgattctaatgagggagaaggtgaaaccggagaatgagcagatgcggctgttcatggacaacagcatcaagaaacctgcaacatgcaacctgattttaagaaatttgccacctgcaac

SEQ ID NO: 220047 - DNA, 2136 bp, Zea Mays
agaaagctggcctcctccgcctttctttccttcctccctcggggctccgcgcgcgcagcagccaggaacagctccgctgcctgctcccttggggaaaaaaaacttcaagaacagcggcggtcggctcttctccaatcctgcttcaaggctgcaccgaccggctctatttgagctatatctctgcaggaaagctcagttcagatccattcacttcactcatgggctcatcctcgggccatcagagaagcaaaacgcgcagcaggaacaggaagcccttgggaattcagctcttggagcgggtccgtggcagccccatctccttcagatcatgccaggctctcgtgctagtgctcacgttcctatcctacgccagctaccacgccaccaggaaaaccacgagcgtcgtcaagagcgtcctcgacccaaagacgaagacgaacctaggcacgtcgtcggcgcattactggccccccagccacctcttctatctccataatctcaaagatgcggacaacagcagcgccggcggctctctctccagcggcggcggcggcggctgggttccgttcaacgaggcggaagacggcacggcgttgctgggcgagatcgacctggcgttcctcggcgcgtacgcggccggcatgttcttcgcgggccacctgggcgacagggtggacctgagggtcctcctcaccgtagggatggtggggaccgggctcttcaccgccgccttcggagcgggctactggctcgacgtgcacagcttctactacttcctggccgtgcagatggtggccggcctgttccagtcgtccgggtggccgtcggtggtggcggtggtcggcaactggttcgggaagagcaagagggggctcatcatgggggtgtggaacgcccacacctccgtggggaacatttccggctcgctggtcgccgctgccatgttgaggaggatctctgtttgaaggacgctccattgcttgaacgacgacgcgcagatgtagaggaaaaggcggttgggtttattgaggcgtggaggatccctggtgttgcccctttcgccctctgccttttcttctgcaagcttgtggcgtatacgttcctgtactggcttcccttctatatcagccacacagctatcggtggagaatacttgtcggactccgcagccggggtactgtcgacgctgttcgacgtgggcggcgtcgtgggcggcatcctcgccggccacatctccgaccacctggacgcccgggcgctgacggccgcgagcttcaccttctcggcgataccggcgctcttcttctaccgcgtctacgggaacgtctcgctggcctggaacatcgccctcatgttcgtcacggggatgctggtgaacggcccctacgcgctgatcacgacggccgtgtccgcggacctcggcacgcacagctcgctcaacggcaactcccgcgcgctggccaccgtcacggcgatcatcgacggcacggggtccatcggcgccgccgtcggcccgctcctcacgggctacatctccgccaggagctggagcgccgtgttcacgatgctgatggcgtccgcgctcgtcgcggggctgctgctgtccaggctcgtggcggcggaggtggtcgccaagatggagtcccggaggacgcccgcccctgctgcgagcgacctgctgcccgtgtcctcctcctccatggacgaaccgtagatcgcttctagctgcgccccggctgtggtctcctggtgacatggaatggtggcgggagagtagatcacctgtgattttaggcctggtgggactgtggcagcaggtgcgcagtgcgcttctgtcccggaactgtgggatcttgctcctgccgtgccgtgcttcaccgcttctggttcgtcatggtatatatgtatatggaatgtcttctggttgccgacgaagatgaatgcggttggctactcacgctgcaatactccggctgcggacgggcgtttcctggctccgacagcgcccggaggagagggactggctagatgtgccccataatagttgcaacctgctcgcaggaactccgtaggaggccactcttttaactgtgtcgcacacgtttacgaattctaaagtgggcttgatgacggcct

SEQ ID NO: 220048 - DNA, 1603 bp, Zea Mays
aaaaaaccccaaaacctagctcctactcggcctgtcggcttaccagtgttccttgctgattaattggtaactcgccttgataagtcggtctacgatgttgattagtcggtcctaaccgatggaacgactgggaggcccacgcccacaccatcccctcgcactgctgctcctactaggctactactacgccgcagccgcacaggcagacgcgtcgattcaaccacactgctgccagtctgccacaactatttactgccgccccctcatcaccgccacgggcccggcgagcaagcgccagccaggggagggaagccgaggcctaggacaggaggccatgtcaggggaccgctcgtccacggcagagcgccggcgggggatccggcgcctcctcctgcatccgcgcggcgaggcctcctcgcctccgcctccgccgccagcgccggcgccggaggaggggagaaggaaggggttcgcctcggcggcgctgcgcggcctgggctgcacgtcggcggcggcgtccaaggcgtacgcgcccggagcggccgcggcggcggccttgcggtcgtcggcggactggcacgggcggcggcggaggaggggcaaggacaggaggaaggagcgtggcggcggcggagcgggagcgggcggaggcctcgtcaccggtgggatcggcgccgatgtgtggtgcgcacccgggatacccttcgccgcggaggcgtcctcggtggactgcgtggtggcgcggcaccagacggtggggaggggcggccgcggcgccgagggggagaggtcccacagagagaggccgtgcatgtcccggagggcgaccgtgcaggagcagatatcctcgcccttcatggactcgccgccgccgcacctcgacgcccccttcttcggggccgatctgatcccctccggccgcctccgtcggatgcgcgggtaccgctactcccccggaggcctcgaggaagagataatgatgtttcagacaagagttttactgggaggaatgaacatgtacgatcgctaccaggattggcgccttgatgtagataacatgacatacgaggagttggtcgagcttggagacagaattggatacgtcaacacagggctacgtgaggacgagattgctcgcagccttaggaaggccaagcacccatccttcggttccttgcgattcgcagcagaagtggaaaggaaatgcactatttgccaagaagaatttcagtcaaatgaagagatgggaaggctagtctgtggccatagctaccatgtgttgtgcatcaagcagtggctctctcagaagaacacttgcccggtttgcaaaactgccgtcagcaagaattgaaatgcaaactccaggcacgctgtctgcatgcctaaggtgaaatcaatgtgaaattggcaaattatgttgtcgtgtacagcccgtcatatataatattagggggtgtttgggagtgaagttttttcacagttttggaagaatactgcagtattcttaaatactgcagtattatatacagaatggtgtttggcaagctggctaaaatctatgttttcaaaactgtagtattacaaatactatagttgttttaag

SEQ ID NO: 220049 - DNA, 1432 bp, Zea Mays
aaaaaaccccaaaacctagctcctactcggcctgtcggcttaccagtgttccttgctgattaattggtaactcgccttgataagtcggtctacgatgttgattagtcggtcctaaccgatggaacgactgggaggcccacgcccacaccatcccctcgcactgctgctcctactaggctactactacgccgcagccgcacaggcagacgcgtcgattcaaccacactgctgccagtctgccacaactatttactgccgccccctcatcaccgccacgggcccggcgagcaagcgccagccaggggagggaagccgaggcctaggacaggaggccatgtcaggggaccgctcgtccacggcagagcgccggcgggggatccggcgcctcctcctgcatccgcgcggcgaggcctcctcgcctccgcctccgccgccagcgccggcgccggaggaggggagaaggaaggggttcgcctcggcggcgctgcgcggcctgggctgcacgtcggcggcggcgtccaaggcgtacgcgcccggagcggccgcggcggcggccttgcggtcgtcggcggactggcacgggcggcggcggaggaggggcaaggacaggaggaaggagcgtggcggcggcggagcgggagcgggcggaggcctcgtcaccggtgggatcggcgccgatgtgtggtgcgcacccgggatacccttcgccgcggaggcgtcctcggtggactgcgtggtggcgcggcaccagacggtggggaggggcggccgcggcgccgagggggagaggtcccacagagagataatgatgtttcagacaagagttttactgggaggaatgaacatgtacgatcgctaccaggattggcgccttgatgtagataacatgacatacgaggagttggtcgagcttggagacagaattggatacgtcaacacagggctacgtgaggacgagattgctcgcagccttaggaaggccaagcacccatccttcggttccttgcgattcgcagcagaagtggaaaggaaatgcactatttgccaagaagaatttcagtcaaatgaagagatgggaaggctagtctgtggccatagctaccatgtgttgtgcatcaagcagtggctctctcagaagaacacttgcccggtttgcaaaactgccgtcagcaagaattgaaatgcaaactccaggcacgctgtctgcatgcctaaggtgaaatcaatgtgaaattggcaaattatgttgtcgtgtacagcccgtcatatataatattagggggtgtttgggagtgaagttttttcacagttttggaagaatactgcagtattcttaaatactgcagtattatatacagaatggtgtttggcaagctggctaaaatctatgttttcaaaactgtagtattacaaatactatagttgttttaag

SEQ ID NO: 220050 - DNA, 2078 bp, Zea Mays
tgggggagaaacgtatgcggtatgcctcaacggcaattaggagaaaaatgagaggtccttccgacaaattgctggttttagtcgatctgagccgtctgattaccgatccaacagctagtatcttgcacatgtcaagggtttacttgtcacttgcatgcacgtgacgaacgccatggcgcttgcggttcgtctcatcggccgccgccggttcctcccgccgccgctcgccgccgccgttgctcacctctctgccgcttcccagagcccgtgccaccaccaccacccacttccgacccccgcgctcccgttgccccctcgtgagctccatcctttcgctctccactggcgaagcttctcctggtactcccgctccggctccgggtctgatagcagtcccggcaccgctgccgcggacgctcgcggagaggacgtgtacatcgagaaggaaagcgtgcacttggatggcgtgacaatcgttgatgacgggggaggggtcgtcagtgaggcgggtgctgcggcggatgccgtgggagatgccgccggcgccacggccgacggcgtcgggggagtgccggaattggctgttagcacagttttggacctcatggacgggatccatagcctcaccggactgccgtggtggatgacaatctcctttttctactgtggccatgagattgtggatacttcccgtcctcatagtgcagttacagaagactgctgaaattggtgaagtgttccgaaaagtgtccacttcattaccccctcctcagcctggaagcaatttccgtgaacagtacactctgttccagaagaaaaagaaggagcttggttgcccctcatttatctggaattttgcctattttttggtacagttcccttgctttattctttggatgacgagtataaggagcatgtgcttgaataatcaccctggatttgataatggtgggattctgtggttccataacttgactgagtttccacatggtactttagctcccatctttcctatcttagttgctggtctgcattacctaaatgttcagatttcttttcaggggtcccagatcaaggatcacccaggaatttttggcttgctggctaagtactatagaatatacctcaatgtcctgactatccctttgtttcttgtcgcacatgtggttcctcagggatgcctggtctactggactacaaatggtttattttctgtagctcagcaattatccttgagaaatgatgctgtccgcaagctgttgggattgccagatactagagctcaggttggttacagagcacaaaagtcacctcttgagtggtcacagcttgaagatgctaacttgcaaacgaaatcgatgccatctgacaagggaacagccagtgagagtacaactcctaattttgcaatgggaagtatggatggaaatatatctgcgtccagctcacctgaggagctacttgaacaagcattacagtatctgggcacaggctgccgagatcaagccattccactgatcagcagtagagagaaacccagatctgtacacagcgttgattgggatgggacaaaccctgttctcaaatagattgtttcccgaagccgcggtttgttttgaacatgctataccaaagattcaagaagatgaccctcttcttgtgcttgcgtattttggggcaggtctttcgaacaagcgtcagggggataatgagacggcaataaaactcctggagagattagcagagctcaaggaaccagaaaagcccatcaacaaaagccgctacttccaagggatgcttgctttggcaagtatattatatagagaaggccggaattcggaggctgccaaatatctgcggatggctattgcttatgatccttctgtagaaaggcttctcaaggaatgcgaggaaggaatggacgatcagccaaagccagaggagaagtgatgtgctggacctgaaaaagccacagtaacagagatagcacaccgcttttgtttttgaacactaaaaccgcccccagctttttaccctttacccatatgatcgtgcaaaacagagtgaagttgaataga

SEQ ID NO: 220051 - DNA, 2094 bp, Zea Mays
ggggagaaacgtatgcggtatgcctcaacggcaattaggagaaaaatgagaggtccttccgacaaattgctggttttagtcgatctgagccgtctgattaccgatccaacagctagtatcttgcacatgtcaagggtttacttgtcacttgcatgcacgtgacgaacgccatggcgcttgcggttcgtctcatcggccgccgccggttcctcccgccgccgctcgccgccgccgttgctcacctctctgccgcttcccagagcccgtgccaccaccaccacccacttccgacccccgcgctcccgttgccccctcgtgagctccatcctttcgctctccactggcgaagcttctcctggtactcccgctccggctccgggtctgatagcagtcccggcaccgctgccgcggacgctcgcggagaggacgtgtacatcgagaaggaaagcgtgcacttggatggcgtgacaatcgttgatgacgggggaggggtcgtcagtgaggcgggtgctgcggcggatgccgtgggagatgccgccggcgccacggccgacggcgtcgggggagtgccggaattggctgttagcacagttttggacctcatggacgggatccatagcctcaccggactgccgtggtggatgacaatctcctttttctactgtggccatgagattgtggatacttcccgtcctcatagtgcagttacagaagactgctgaaattggtgaagtgttccgaaaagtgtccacttcattaccccctcctcagcctggaagcaatttccgtgaacagtacactctgttccagaagaaaaagaaggagcttggttgcccctcatttatctggaattttgcctattttttggtacagttcccttgctttattctttggatgacgagtataaggagcatgtgcttgaataatcaccctggatttgataatggtgggattctgtggttccataacttgactgagtttccacatggtactttagctcccatctttcctatcttagttgctggtctgcattacctaaatgttcagatttcttttcaggggtcccagatcaaggatcacccaggaatttttggcttgctggctaagtactatagaatatacctcaatgtcctgactatccctttgtttcttgtcgcacatgtggttcctcagggatgcctggtctactggactacaaatggtttattttctgtagctcagcaattatccttgagaaatgatgctgtccgcaagctgttgggattgccagatactagagctcaggttggttacagagcacaaaagtcacctcttgaggtacctgagatgatgcagtggtcacagcttgaagatgctaacttgcaaacgaaatcgatgccatctgacaagggaacagccagtgagagtacaactcctaattttgcaatgggaagtatggatggaaatatatctgcgtccagctcacctgaggagctacttgaacaagcattacagtatctgggcacaggctgccgagatcaagccattccactgatcagcagtagagagaaacccagatctgtacacagcgttgattgggatgggacaaaccctgttctcaaatagattgtttcccgaagccgcggtttgttttgaacatgctataccaaagattcaagaagatgaccctcttcttgtgcttgcgtattttggggcaggtctttcgaacaagcgtcagggggataatgagacggcaataaaactcctggagagattagcagagctcaaggaaccagaaaagcccatcaacaaaagccgctacttccaagggatgcttgctttggcaagtatattatatagagaaggccggaattcggaggctgccaaatatctgcggatggctattgcttatgatccttctgtagaaaggcttctcaaggaatgcgaggaaggaatggacgatcagccaaagccagaggagaagtgatgtgctggacctgaaaaagccacagtaacagagatagcacaccgcttttgtttttgaacactaaaaccgcccccagctttttaccctttacccatatgatcgtgcaaaacagagtgaagttgaataga

SEQ ID NO: 220052 - DNA, 1922 bp, Zea Mays
cttgcacatgtcaagggtttacttgtcacttgcatgcacgtgacgaacgccatggcgcttgcggttcgtctcatcggccgccgccggttcctcccgccgccgctcgccgccgccgttgctcacctctctgccgcttcccagagcccgtgccaccaccaccacccacttccgacccccgcgctcccgttgccccctcgtgagctccatcctttcgctctccactggcgaagcttctcctggtactcccgctccggctccgggtctgatagcagtcccggcaccgctgccgcggacgctcgcggagaggacgtgtacatcgagaaggaaagcgtgcacttggatggcgtgacaatcgttgatgacgggggaggggtcgtcagtgaggcgggtgctgcggcggatgccgtgggagatgccgccggcgccacggccgacggcgtcgggggagtgccggaattggctgttagcacagttttggacctcatggacgggatccatagcctcaccggactgccgtggtggatgacaatctcctttttctactgtggccatgagattgtggatacttcccgtcctcatagtgcagttacagaagactgctgaaattggtgaagtgttccgaaaagtgtccacttcattaccccctcctcagcctggaagcaatttccgtgaacagtacactctgttccagaagaaaaagaaggagcttggttgcccctcatttatctggaattttgcctattttttggtacagttcccttgctttattctttggatgacgagtataaggagcatgtgcttgaataatcaccctggatttgataatggtgggattctgtggttccataacttgactgagtttccacatggtactttagctcccatctttcctatcttagttgctggtctgcattacctaaatgttcagatttcttttcaggggtcccagatcaaggatcacccaggaatttttggcttgctggctaagtactatagaatatacctcaatgtcctgactatccctttgtttcttgtcgcacatgtggttcctcagatcagattccatgcatttaatttgaacaagcttgatgcggcaaaatactagagctcaggttggttacagagcacaaaagtcacctcttgaggtacctgagatgatgcagtggtcacagcttgaagatgctaacttgcaaacgaaatcgatgccatctgacaagggaacagccagtgagagtacaactcctaattttgcaatgggaagtatggatggaaatatatctgcgtccagctcacctgaggagctacttgaacaagcattacagtatctgggcacaggctgccgagatcaagccattccactgatcagcagtagagagaaacccagatctgtacacagcgttgattgggatgggacaaaccctgttctcaaatagattgtttcccgaagccgcggtttgttttgaacatgctataccaaagattcaagaagatgaccctcttcttgtgcttgcgtattttggggcaggtctttcgaacaagcgtcagggggataatgagacggcaataaaactcctggagagattagcagagctcaaggaaccagaaaagcccatcaacaaaagccgctacttccaagggatgcttgctttggcaagtatattatatagagaaggccggaattcggaggctgccaaatatctgcggatggctattgcttatgatccttctgtagaaaggcttctcaaggaatgcgaggaaggaatggacgatcagccaaagccagaggagaagtgatgtgctggacctgaaaaagccacagtaacagagatagcacaccgcttttgtttttgaacactaaaaccgcccccagctttttaccctttacccatatgatcgtgcaaaacagagtgaagttgaataga

SEQ ID NO: 220053 - DNA, 1967 bp, Zea Mays
ggtttacttgtcacttgcatgcacgtgacgaacgccatggcgcttgcggttcgtctcatcggccgccgccggttcctcccgccgccgctcgccgccgccgttgctcacctctctgccgcttcccagagcccgtgccaccaccaccacccacttccgacccccgcgctcccgttgccccctcgtgagctccatcctttcgctctccactggcgaagcttctcctggtactcccgctccggctccgggtctgatagcagtcccggcaccgctgccgcggacgctcgcggagaggacgtgtacatcgagaaggaaagcgtgcacttggatggcgtgacaatcgttgatgacgggggaggggtcgtcagtgaggcgggtgctgcggcggatgccgtgggagatgccgccggcgccacggccgacggcgtcgggggagtgccggaattggctgttagcacagttttggacctcatggacgggatccatagcctcaccggactgccgtggtggatgacaatctcctttttctactgtggccatgagattgtggatacttcccgtcctcatagtgcagttacagaagactgctgaaattggtgaagtgttccgaaaagtgtccacttcattaccccctcctcagcctggaagcaatttccgtgaacagtacactctgttccagaagaaaaagaaggagcttggttgcccctcatttatctggaattttgcctattttttggtacagttcccttgctttattctttggatgacgagtataaggagcatgtgcttgaataatcaccctggatttgataatggtgggattctgtggttccataacttgactgagtttccacatggtactttagctcccatctttcctatcttagttgctggtctgcattacctaaatgttcagagatttcttttcaggggtcccagatcaaggatcacccaggaatttttggcttgctggctaagtactatagaatatacctcaatgtcctgactatccctttgtttcttgtcgcacatgtggttcctcagggatgcctggtctactggactacaaatggtttattttctgtagctcagcaattatccttgagaaatgatgctgtccgcaagctgttgggattgccagatactagagctcaggttggttacagagcacaaaagtcacctcttgaggtacctgagatgatgcagtggtcacagcttgaagatgctaacttgcaaacgaaatcgatgccatctgacaagggaacagccagtgagagtacaactcctaattttgcaatgggaagtatggatggaaatatatctgcgtccagctcacctgaggagctacttgaacaagcattacagtatctgggcacaggctgccgagatcaagccattccactgatcaggacagcagtagagagaaacccagatctgtacacagcgttgattgggatgggacaaaccctgttctcaaatagattgtttcccgaagccgcggtttgttttgaacatgctataccaaagattcaagaagatgaccctcttcttgtgcttgcgtattttggggcaggtctttcgaacaagcgtcagggggataatgagacggcaataaaactcctggagagattagcagagctcaaggaaccagaaaagcccatcaacaaaagccgctacttccaagggatgcttgctttggcaagtatattatatagagaaggccggaattcggaggctgccaaatatctgcggatggctattgcttatgatccttctgtagaaaggcttctcaaggaatgcgaggaaggaatggacgatcagccaaagccagaggagaagtgatgtgctggacctgaaaaagccacagtaacagagatagcacaccgcttttgtttttgaacactaaaaccgcccccagctttttaccctttacccatatgatcgtgcaaaacagagtgaagttgaataga

SEQ ID NO: 220054 - DNA, 1445 bp, Zea Mays
tgcctcaattcaaacaaaaaagagtgtccacttcattaccccctcctcagcctggaagcaatttccgtgaacagtacactctgttccagaagaaaaagaaggagcttggttgcccctcatttatctggaattttgcctattttttggtacagttcccttgctttattctttggatgacgagtataaggagcatgtgcttgaataatcaccctggatttgataatggtgggattctgtggttccataacttgactgagtttccacatggtactttagctcccatctttcctatcttagttgctggtctgcattacctaaatgttcagtctctagtatcaggcgaacacaaagtgtaacaagttaaaaattcatggctgggcgactttccttctgatttcttttcaggggtcccagatcaaggatcacccaggaatttttggcttgctggctaagtactatagaatatacctcaatgtcctgactatccctttgtttcttgtcgcacatgtggttcctcagggatgcctggtctactggactacaaatggtttattttctgtagctcagcaattatccttgagaaatgatgctgtccgcaagctgttgggattgccagatactagagctcaggttggttacagagcacaaaagtcacctcttgaggtacctgagatgatgcagtggtcacagcttgaagatgctaacttgcaaacgaaatcgatgccatctgacaagggaacagccagtgagagtacaactcctaattttgcaatgggaagtatggatggaaatatatctgcgtccagctcacctgaggagctacttgaacaagcattacagtatctgggcacaggctgccgagatcaagccattccactgatcaggacagcagtagagagaaacccagatctgtacacagcgttgattgggatgggacaaaccctgttctcaaatagattgtttcccgaagccgcggtttgttttgaacatgctataccaaagattcaagaagatgaccctcttcttgtgcttgcgtattttggggcaggtctttcgaacaagcgtcagggggataatgagacggcaataaaactcctggagagattagcagagctcaaggaaccagaaaagcccatcaacaaaagccgctacttccaagggatgcttgctttggcaagtatattatatagagaaggccggaattcggaggctgccaaatatctgcggatggctattgcttatgatccttctgtagaaaggcttctcaaggaatgcgaggaaggaatggacgatcagccaaagccagaggagaagtgatgtgctggacctgaaaaagccacagtaacagagatagcacaccgcttttgtttttgaacactaaaaccgcccccagctttttaccctttacccatatgatcgtgcaaaacagagtgaagttgaataga

SEQ ID NO: 220055 - DNA, 2348 bp, Zea Mays
cttaaatatagagatgaaaactactccatctattccaatttatagtttgcactacaacgagccaatcaaacttagtgtaaaaagaccagacaaaagagatggagtaagagttcagagtaatactgttttgggacataagagattattacatgaaagttggacccagctggtgagcctgtaagtacagtaaaaggggaaaaaataatcaaagccacagcccacagtgaacagagcaaaaggtcaaatgaactggtaaaagaaaacctgccgtagtggactagtggacagtggtcgtagcaagcagatttctacttttctcgcctccggtttcactcgctgcgtgggcagaaaccacggggcggcggtgggcaatccaccacctctctctctccagcaggccgcgcgccgcagttttctccccgggcacatgcccgtgggcacgcgtgcaggccactggccacccccacgcagaaaaaccagcggccgcgcgcaccgacccggccgacgactccggcgaccgcgcgcacacgacaaaaccccggcggcgacgacagacccacaggatcagacgactcagcgagcggaacaccccctggcgccggccgttaaagtcaagtcaagcaccggagccggtgtataaagctccggcgactggtgcccaccacggctagctgccgtcgtcgcagaagtaggagctcgcgtttctccatccgtacgtcctgcagtagtgattgggcagcatcgtcatcgatcgatcgccatgaggctccgcggcgtgctgcgcctcgtcctcgcgctcctcctcgccgccaccgccatcgtgccggtgctgctccttagcgagaacggcggcggcggcgtcgcacctgcgccgccgttcaactcctcgcgtgtcaaggccgtctcgtggcatccaaggatcttcgtgtacaaggggttcctctccgacgccgagtgtgaccacctcgtgactctggcgaagaaaaagatccagcggtccatggtggcggacaacgagtccggcaagagcgtcaagagcgaggtgcgcaccagctccggcatgttcctcgacaagcgccaggacccggtggtgagtcggatcgaggagaggatcgcggcatggacgtttcttcctcaagagaacgccgagaacatgcaggtgctgcgctacgagccggggcagaagtacgagccgcacttcgactacttccacgacagggtcaaccaggcccgcggcggccaccgctacgccaccgtgctcatgtacctgtccaccgtccgcgagggaggcgagaccgtgttccccaacgccaagggttgggagtcccagcccaaggacgccactttctccgagtgtgcacacaaaggattggcagtgaaaccggtgaaaggcgacgccgtgctcttcttcagcctgcacgccgacggcacgccggacccgctcagcctccacgggagctgcccggtgatccggggcgagaagtggtcggcgcccaagtggatccacgtcaggtcgtacgaggacgaaccccaggcagtactcgtgctccccgaggaaaccgacggcgcgcgggtgcgccgataggagcgagcgctgcgcgaagtgggccgcggcgggtgagtgcgcctggaacccggcgtacatgctcggcgccggcgatgagggggcgcctgggcagtgccgcaggagctgcggagtctgcgattcgtaggcgcgtccttgccttttctttctttcttcctttctttgtttgttttgggatgcagtattcagataactagtggctgtttttctgtacttgatgatgatgtgtacatagctagtgaaagctttcttcagatgatgatgacgatgatatgagtcggcaaccaatagatataaacgctgcagctgtttgcttctcttgctgagatatggtgccggttgaactggacagcaattggaggttggagagtggagagaatactattggagtactgccttgattattgctacttgcttcattgcttgccgccagcagtgagctagggacagggagtagtggccgagatcctacaggagcagcaacggcatctcctgcttcatccccatcgccgccaacgtgttgaacttgaaccgttgaagccagccgccgccatcaggttgaaaatgagagtctgagctagggtttgcagttttgcacaagaaaaggcagagagagatacgtacgccacctgctgaaattgagcacgataatgggctgggtcggacgcgcgcaagaaaatggcccaggtttgctttagctgccgctagaagatggcccatttaacggatttcgccggctaatagcggctaatagcggtcacca

SEQ ID NO: 220056 - DNA, 2080 bp, Zea Mays
gttttctccccgggcacatgcccgtgggcacgcgtgcaggccactggccacccccacgcagaaaaaccagcggccgcgcgcaccgacccggccgacgactccggcgaccgcgcgcacacgacaaaaccccggcggcgacgacagacccacaggatcagacgactcagcgagcggaacaccccctggcgccggccgttaaagtcaagtcaagcaccggagccggtgtataaagctccggcgactggtgcccaccacggctagctgccgtcgtcgcagaagtaggagctcgcgtttctccatccgtacgtcctgcagtagtgattgggcagcatcgtcatcgatcgatcgccatgaggctccgcggcgtgctgcgcctcgtcctcgcgctcctcctcgccgccaccgccatcgtgccggtgctgctccttagcgagaacggcggcggcggcgtcgcacctgcgccgccgttcaactcctcgcgtgtcaaggccgtctcgtggcatccaaggatcttcgtgtacaaggggttcctctccgacgccgagtgtgaccacctcgtgactctggcgaagaaaaagatccagcggtccatggtggcggacaacgagtccggcaagagcgtcaagagcgaggtgcgcaccagctccggcatgttcctcgacaagcgccaggacccggtggtgagtcggatcgaggagaggatcgcggcatggacgtttcttcctcaagagaacgccgagaacatgcaggtgctgcgctacgagccggggcagaagtacgagccgcacttcgactacttccacgacagggtcaaccaggcccgcggcggccaccgctacgccaccgtgctcatgtacctgtccaccgtccgcgagggaggcgagaccgtgttccccaacgccaagggttgggagtcccagcccaaggacgccactttctccgagtgtgcacacaaaggattggcaggtaattaatctcccacccaagagaatggtgcaccaggccaggccatgccatgccatgtctgtcttcaagaacggcaggagaaaggcgagaagcttcggacgacgacgctgacagattcgcttattgcttgcttgccgcgcgcgtgcagtgaaaccggtgaaaggcgacgccgtgctcttcttcagcctgcacgccgacggcacgccggacccgctcagcctccacgggagctgcccggtgatccggggcgagaagtggtcggcgcccaagtggatccacgtcaggtcgtacgaggacgaaccccaggcagtactcgtgctccccgaggaaaccgacggcgcgcgggtgcgccgataggagcgagcgctgcgcgaagtgggccgcggcgggtgagtgcgcctggaacccggcgtacatgctcggcgccggcgatgagggggcgcctgggcagtgccgcaggagctgcggagtctgcgattcgtaggcgcgtccttgccttttctttctttcttcctttctttgtttgttttgggatgcagtattcagataactagtggctgtttttctgtacttgatgatgatgtgtacatagctagtgaaagctttcttcagatgatgatgacgatgatatgagtcggcaaccaatagatataaacgctgtttgcttctcttgctgagatatggtgccggttgaactggacagcaattggaggttggagagtggagagaatactattggagtactgccttgattattgctacttgcttcattgcttgccgccagcagtgagctagggacagggagtagtggccgagatcctacaggagcagcaacggcatctcctgcttcatccccatcgccgccaacgtgttgaacttgaaccgttgaagccagccgccgccatcaggttgaaaatgagagtctgagctagggtttgcagttttgcacaagaaaaggcagagagagatacgtacgccacctgctgaaattgagcacgataatgggctgggtcggacgcgcgcaagaaaatggcccaggtttgctttagctgccgctagaagatggcccatttaacggatttcgccggctaatagcggctaatagcggtcacca

SEQ ID NO: 220057 - DNA, 394 bp, Zea Mays
gtttaaacggtggaataaaaacttaagctcacacttgtggtttatgctgaattcaatccagtgaatccgaagctgaccatgaagaactaaaataagctatatgtttcagtaccttctgatatcatcttgaggtcttcataagtcagcaacctagagcagaaaatgtcagctccggaattcaggacttcttaccagcaatcccctgagaatgtcggtcaactcaaggtctgccaatgtgggtcgggcgactccaattttcagatcacaaataaatccgacggtggcgaaaattcaccaacaacttgtccaaactgtcaggtccttaagagtggaaatttactgctttcatctaaaggtccaaaagttgctcaacccactccatgagttaacctgg

SEQ ID NO: 220058 - DNA, 3679 bp, Zea Mays
cctggccacgcctcccagtcccagaggccggagcaccgaaccgaaccgaacgcagttaaccccagccgcacgcctcgtgcaacaagggctcgccgccagggagaaggagaaattccgcgtgacaagcgcgcggctcccggcagcagcggacaagtgctcgcgcctccctccgcccgtcgcctgccctgcttttgatgggtgggcgggcggcggcgcagatgaggagggcgacgacgcgcggcagcggacgagagaaacgggacaggggcagggcagccagccacgcacgaccacggccggcccccctcctttaccctccccgcgccccgctttcgacgcttttgaggctgagccccaatcttttcttccattcttttgggccccgctgcttcgctgcttgtgttgtgttgcgttgtgtgtgagtgaccctaaacaaagcctagttggcatgcccacaaacttagccttgtctttaacgactgattgtcttcggggtagggggtctagacatctaccagtagcattttctgtgtgtgttagtacaagtggtactgtaggcaaatgggaggagtcactttaggagccaaatggcatgatttccctctcctctcctctcctagtggtgggttttgtttgaacggatctgtagtggtggtgatttaggcgtcccaatattctatgccttgttgtttagaaagaacgcaggcatcccacttactaatccctgcattagtgaactgcgctttctttactgaagtagtattaataagagatgaggttgtctcgtgcacacctgacaggctgacacacacccccacagtcgagacagctgaccaccctgcaaattccagtctgtacgtacgtacgtacgtgctcagcagcagtgttcatctttcgagaatgtaagttttgaatcttgtgagttgtgatgccttatgcatggagtgtattaaatgctcacaggaaaaaccagactactatcaaactctgcttatatatcttcataaaaaaaaacgaactcatctgcagtacagaggttaactggagcgctcgtgccaggtagatctagaaacctgcctgcgccattaacaagtacactatccactgccacccaccagcatcaaccaccaagattaggcaacctcacatccagtctctcaaaacggaatagataattcataacccttgatgcttttggcctgtttgtcatcgtttggtgcagtgcacaccactcaccactcactcaccaactgctacttgcatgctgaaaatctcttgcacaaaaaggtctggtaggggaacgtgctactttcgatgttttgtcagtttggtaacacaaggtttgtggctctattatcaggagctggaggcgttaaaggctttgcactgatatatgctcccataaccatactctcactccaacccacatgtctgtctgatgtctcatgtcgctgtatcagggtttggggggtagagaagcctgattagggcacaaattaccaggctggctgaaaaggtttcccctttccctaccctggtttctctggacgcaaaaaaaagaaagaaagaaaaacatagaaaacccggaggactagagcgaacgagggtttcagacctgacctggggcatgcggaaaaggcgtagtggttaacctattcattcatcatccgtcacagcaaggaacgaacggaaccccaggacaggggaaaagttgcgtgtggcgtttttcacaagatgtcacagtcaacggcctttttgcaggctcgccactagcgttggcgctcgcttgtgctgtatatatgcacatacacacgcagacgcagtgctcagtgggggtggatgcagagcagttggatcggggacacacacagagagagagagggctttgctttccgttttcctctccaaatggctcatttagctcttgaccggaagagtggagggtggtggtgcgggtagagatagagatagatggcactcgtcggtgtggacagtgctgggttccttggagcttagcgtgacttcatcagaagacgccgtttgcctgcctggctgcttggtcttgggtcgacgaccggagccccctccctcgtgctcgccttcttcctccctgtccctgtccctgctaccgagtttccgggcgctgaccactgggcaactacagctgatctctctctgccgcggcatggaggtggaggctctggagaagaaggggcacgcagcttttgccaaggcgatgaaatctttcggctcttccgagcggtacaagcgatccacgagatattttgaggatatgtatgctacagacgctttgcgttcttcagacaagacgattgttctacctatgccggaagtggtaaaagctaaggtcaaatgtgatatcactaaggaagctcaacccgggaggggagcacaaagcaccttgagaaaggagattcttcagctcgagaagcacctcaaggatcaacaggctgtgcgtggtgcgctggaaaaggctttagggcctaacgctggccctgtcagcttgtcgccagagaatccaatgccacaggcagctaatgaattgatacgggagattgctacattggagctggaggtcaagaacatggagcagtatctcctgacgctgtaccggaaagcatttgagcagcagcaagcgcctgcgttttccccccctgaccgccgggaagcttcgaagccgtcagtgagctcgcgttctgggcagctccgggaaacgcccatggcaacgaagtcttcttgcaagagtagaggggacgcagcactgcggtccagttacccgccagcgcataagaaactgaacgatccattggcggattgctgcacatctgctcgatttgatagagtggttgattcagacgtcctccgctgccagtctgcgttgtcataccgtggagtttgttcgtccaggatattgccttcggaggacgatagtcttgcaagggctcttcgctcgtgccactcgcagcctttctcattcgtagaggaaggagacaccggtgcatcagggatgataagcttagcagagtatctaggaactaatgtagctgaccacatccctgaaactccaaacaacctgtcagaggagatggtgagatgcatggcggggatatactgcagactcgcagatcctcccttggttcaccacggctcgtcctcttcaccgtcgtcgtcgttctcctcgactagcgcaatctctccgcagtatgtgggggacatgtggagtcccaaatacaggagagaggcgactctggactcccgtctgataaacccgttccatgtcgatggtctgaaggagttcagtggaccttacaacacaatggttgaggttcctatgattagccgggacagtcggaggctgaaagaagccgaggacctgctccagacttacaagttgattttgtatcggttggaagccgttgatctgaggagaatgacagatgaagaaaagatcgcattctgggtcaacatacacaatgctttgctgatgcatgcttatctgaagaatggcgtcccacagaacaatctaaagaaaacatccctacttgttaaggctgcctgcaaaatagccggacgcaacatcaacgccgccgtcatccagagcattgttcttgggtgcaacacacactgccccggacaggcatgctaatttcagcttcgg

SEQ ID NO: 220059 - DNA, 2137 bp, Zea Mays
ggagaaaagtgcctacagaaacatcagttgagtttcagctattgtcattagatggataaaatgtggaaggtactgaatggctctccagtaaggactgatttggtgaccagggaattggatggatccatgggcatggatcccatataattccctggtcacaaaaccagccctaagtgtgcacccaacactgcactttgttgggaaaaaagcccaaagggtttactcaagccaattcaagaagagtaagcatgtaagcctgaagaaatcaatgaagatgataaaactttaaactcgtccagaatgatgagcttgttactgttaacaaagggaagactcgagctcaactaaccacccaggatcaaactgctttgtcttaactcaatactaagagcccttttggcagcttggaacagttccgatgctcacgtgaaactccagaatcgctgccaaacgggtaggtagtacagaaacgtttcactgaaccgattcatctttttctgcctgtactgggagagccagaaatggacgagtagtttcacctgattccgtttcttggctcccctctctactagcaaccataatttcagttaatcattttaagtgcaacgagctaattgctctccccccattaaaaatgttatgcatttttaagcatgttttatttatatgattttttaatgaaaacatttttttaccagaatccagccacagttgcctagtgccctagtcatttctgtagtctgcagtgcatgacacatcagtcatgatgaaaaggacaaaaaatgaagtagttaaaaggaaaggaggataagccataagcatcaaaggtcaagcaagtagtctcaaaggtgccgctgtcaccgagatctcgaacagtgcaagacaaagcaggaaaactgataaaagttggcatgagatgaaacggttgtcttagtatcttttagtaggaattgtactaatgcctgcattgcgctttcccacgataaagccatagatggcaccgacagttggagctatcagctagctctgcagttaaattaggtggtccgcctgcaactgcaagtgccacaccgatagaggatatggttcttttccgagactgcggcaccgacgttctcgcggatcgagccttcgacatgggacgtgcctggagaacgacggcagtagggcactgcgactctgctagtctgccctctgcactgccccctttcacttttcgtgcaacatacctttgcttgctttgagcctatgacatggcacgtgccagagcaacgcatctgtccttgggtcgcttgcagctgcagctcgtcctgtatgtgtttctgcaaccgagcgttccggagctcttggatcctgtgctctgcgtcatatactcgtggtatattgttaaaactgtcggcagatctgatcgacccatttggatctgtacaagtcgcgttctctgcaacccgtggactcgtgcctcggtttgggggaatctatatggggtgtggattggaattccgtggcagatacgaaaagggcaccaactggcaactgggcaccaggtcagtgcatggggatcatggaacggaacggaaaccaagtccggtctccggtgctcccggcggccggtcaaccgtgctcgtgcctgcctctcccccagtccagctcgcacatcgcacccttgcttttgccatctcaagcaaagctacggatctgactaaaggtagcctacgcgagctggttgacacttcagcgatgccctcatctcgcaattctcatacatagtttcatattattgactttatgatatgtgagattgaggatatggaccatatggttttggttggtattaaggctcattgtcagccaccctacgcaaaatacaagcctgattattaatcatccctagtgggcccttacactcaacaactgtggcagtggatacagagtttacatgccccctaattggtgatgggcgcccatccaggagcttgttctctcagccgctatgactgtgacatctctaaggctctatttgtttcacttcattttgaggaattggaatctaactaatgtattagatatttttttaatgtaacatttcataactttctgaagtttatatataagcctatctaaaaatcattgggtg

SEQ ID NO: 220060 - DNA, 7318 bp, Zea Mays
ggcattcccggataagtatctccctcccccccgccgacgcgcgggcccagacgtgcctcgcgtccacctgtcggtgactgcagtgacccgcgtgggccttcacctgtggctcgcgggtgaaataacgcggccgcaccaccaccacccccggcccccgcatcgcgaaaaaatctttttctcgcctctcatcgctcctcgccatttctctctcctcccctccgtctcacccgccgcccgccgcgaaaatctgcgcacggacgcgccggctgcccgcggagagcctcgggtgggagcgcgccccgtcgaggctcttgagctaccaagcatgtcagaatcaaatgtgaagtggattgatgggcttcacttcacatcattgtactggcctccaccccaggatgtggagcagaagcaggcacaaatcttggcctacgtcgagtactttggccagtttacagctgacagtgagcagttccctgaagatgtagctcagctcattcaaagttcctatccatcaaaagaaagtcgcttgatagatgaagtattggcaacttttgttcttcatcatccggagcatggtcatgcagttgtacatccaattctttcacccatcatagatgggacactgtgctatgataggcatggtcctccattcagctccttcatctctttatttagccatacttctgagcaagagtactcagaacagtgggccttggcctgtggagaaattcttagagtcttaactcactacaataggccaattttcaaagttgaacgccaacacagtgaagctgaatgtagcaccacatctgatcaggcaacatctagtgattccacagataagaaatctaacaattctctaggaaatgaatctgaccggaagccattgaggccactaaccccgtggatcactgacatattgctagctgcacctttgggcattcgaagtgactattttcgatggtgtagcggtgtaatgggaaaatatgctgctggtggagagttgaagcctccaactactggttggtaaaatcaatccccaaatattttatcttgatattgtagatttgtagcattataaaaaactcgtccctccgtgcattatattaagaagaagatcttctcacacagtttgagaaaaccttcgaacccctgccccatccatacagcgcggtacgtagcccatgtgaaaatgatagcgaccaaggattaggccttagaccggtgctttggcgtgagactaacgaggtattttttttacccccaacctgaaatccgctcccatggggagttgaactcaggatctgagaggtgctactcacaccacctaaccaactcagctagtaactataaataaccattttcttatatgtagagattgttgggaaatgcacttgttttcattatgaggccctaaggcctgtatatatacatcggtacatgaggataaatatgcactaaacaccttattcaatggggatatataggtacatgaggataaatatgcactaaacaccttattcaatggggatatttaggaatacatatatatacatctaacaccccctctcaaactcaaggtggatcaatgacactaagtttggagagataaaactgatgctaagctctggtttgcgccctgatgaaggtaccagccaactgaagctctgaaggcacatggcgaagaacaatgacatcatcatcctgaatctgcgctcgtgtataagaagcatcaacaccaatatatgcttagtaagctcatgctttaccggatcacgaacaatactaatagcacatgtactatcagacaaatgagaagtcggtatagatacagaaactccaaaatcaacaagcaaccaccgtagccaagtcacctctgtcgtcgcaagagccatagcacacaactcagcctttgtactcgaacgagaaactgctaattgcttcttagtcttccaagcaatgagggaaccactaagaaaaacacaatggtcagaaagagattaaggatatgagaaataactagcccaagtcacatcaaaataggcatggagctgcaaggagctagaacgaggaaagaacagatgacaagagatagtcccacgaagataacatagaacacgaagaagatgattgtagtgaagttgagtgggggtagatacaaacatattcagaatatgcacatgatacgagatgtcatggtgagtaacaccaaggtaaaccagactaccttcaatgtgacgatatcgagtagaatccgaaagaggctcgccattagtggcacaaaggcaaacattgagctccatggggtcttaacagtgcaatgatcagagacacacaagggtgactagcaagtaactgggcacgaagaggctcaaacttttcacgcggatgggtaagcctagacattttacccgctacacgctacccgaacccggacccgaaatacccgaacccacagtacccaaaatctatttcggataaaaaatgctattacccaaaattagtttgggtagtttggctagcagcacctgatacccgaactacctgtaacaacgggtaatatgccctggcgtgcgaggtgtcggagtctgctatctgcgaaccgtggagacgtcagaagtggagtcatgcgacgacccatgagcccatcaagccaaggcgcattcgctttagcttcatctgatccgacgcccgacagtcgacgctgcataacctagcagtagccgccaactgtctccttgtcctcggtggcggtacccgcctgcgactacgccggacgccggttgcttcttcaccagtcaccacggccgtacactccgttgcacagtcgctgcccttactcccttcgtccctcgtccacggtccacctttgcccagttttgatgactggtagttctaaattcttttcctgtaaatcttcaagccgtatgtaatgtgctttggcctttgggcgtatggactctggaatgttgggtgtgtcactgtcagtgtgagcatgtaatgactgttgttcgatgagagcagatagcttctgtcaaatatgctttgggcttctgtcaaatatgcttttgatgagtgatgaccgctagttctattcaccggaaatatttcgggtaaatcgggtataccgaactcgaacccgaaattacgggtagagttttttcttggctgtaatggggtaacaatttctattacccgaatttatcaaagcccgaactacccgacccgaattaaacgggtaacccgaaggtcccgaacgccagtcttatggatgggtcaagaagtcatatgtgcgacgaaactcaagatcagtcttttgatccagacagaactcacatgtgctaggagacatctacagactaagagtatcaagctgacgctaggcgtcagacatctggctatagaattcatcaactgtagaatctccctgacgtaaagaccactcctgacgaatggcagcaagataagtagatgtccagcacacacaacaatcacgaagaagggtccacatctgatgagaactgtcactcaacaaactctgtagaaaagcgagcctccacactagcggtgagaatagaaccagctcaagcatcctcatccatccatatccgatatgcactctactgagcctcatatgatgccagctgatcatcataatctgcaagtagagtgcatcagctgctccctatactgctccattactcgtcttattaagaaaatggctttcatggttgaccttctagagttctaggcacgaaaccaaattggttaaaagagattctcattattcctctcaggcggcgctcgataactctcttccatatcttcatagtatggctcgtcaacttaatttctcggtaattagtacaactttgaatttattcttgtagatcggttccgatatactttaccactcagacatctttattttggacaaacccagccagaagtatctatattttgggatgtaggtagtagtcgataatgtttgttgtgtatggaaaaaaatcaacatatccctgggtgatttagcttacagccgaggatctggaaagcacccacaacttatgccttccacccccagatgggctgttgccaatggagctggagttatattaagtgtctgtgatgaggaggtagctcgttatgagacagcaaatttaacagcagcagctgttcctgcgcttctgctacctccgccaacgacacccttggacgagcatttggtggctggtctgccccctcttgaaccatatgctcgcttgttccatagatattatgcaattgctacaccaagtgctacacagaggttgctttttggtcttctcgaagcacctccatcatgggctccagatgcacttgatgcagcagtacagctagttgagctacttagagcagctgaagattatgcttctggcatgcggcttccaaagaattggatgcatctgcatttcttgcgtgccattggaactgcaatgtcaatgagagctggtattgctgctgatacagctgctgctctgcttttccgaatactttcccaaccaacgctgctttttccaccactgcgacatgctgaaggagttgacgtacatcatgaaccactaggtggctatgtatcatcatataagaaacagttggaagttcctgcatctgaggccactatcgatgccactgcacaaggcattgcttctttgttgtgtgctcatgggcctgatgttgagtggagaatatgtaccatctgggaagctgcctatggtttgctaccactaagttcatcagcagttgatttacctgaaattgttgtagctgccccgcttcagccacctacactgtcatggaacctgtacttaccattattaaaagtattcgagtatctacctcgtggaagtccatctgaagcatgcttgatgaggatatttgtggcaacagttgaagctatacttaggagagcttttccttctgaaacaccagagcaatccagaaagccaagaagtcaatctaagaatcttgctgttgctgaacttcacacaatgatacattcactctttgttgaatcctgtgcctcaatggaccttgcctcccggttgctatttgtggtgttaactgtttgtgtaagtcatcaagctttgccagggggcagcaaaagaccaactggtagcgataaccattccctcgaggaagccactgagcattcaagattaacaaatggaagaagcagatgtaagaagagacaaggccctgttgctacgtttgattcgtatgttctagctgcagtttgtgccttatcttgtgagcttcagctgttcccttgcatttctaagaatggatcacattcaaatttaaaggattccatgaagattatcatacctggaaaaaacaatgggatcaataatgagctacacagtagcatcagctcagcaattattcatactcgtagaattcttgccatcctcgaagcccttttctccttgaagccatcatcagttggtacctcatggagctatagctcaaatgaaatagttgcagcagctatggttgctgctcacgtttctgagttattccgtcggtccaggccatgccttaattcactctctgcactgatgagatgcaagcgggatgctgagatttctaccagggcatcatccctctaccatttgattgacttgcatggtaaaacagtgtcctccattgtgaacaaagctgagcctcttgaagctcacctgacccttacaccagtaaagaaggttaatcaacatcgctgtgaggaaaacaacaccaactcatcggatagtgccaagttggaaaacaagaatggttcaacacataagaaaaacggtttctcaaaaccacacttgaaatgtgcagaagaggttctgaacggcaatgttgcaagtacatctgggaaatccattgcaagcttacaggtggaagcatctgatttggcaaacttccttaccatggatcggaatggggggtaccgagatgtctgcagaaagcacatcagctcaccaaggatggaggaaggttgtggatgcactttgtgatgtcgtttcagcctcaccaaccaaggcctcagctgctatcgttctccaggccgagaaggacttgcagccttggattgctagagacgacgaacaaggccagaagatgtggagagtcaaccaacgtatagtgaagcttatagcggagctcatgaggaaccatgacagccctgaaaccttggtgatactcgctagtgcctctgaccttctacttcgtgctactgatggaatacttgttgacggtgaagcttgtactttgccacagcttgagcttctcgaagtaaccgctcgagcagtccatcttattattgaatggggagatccaggtttatcagttgctgatggcctttctaatctgctaaagtgccgtctttcaaccaccatccgctgcctttctcacccaagcgcgcacgtgcgcgcgctcagcatgtccgttctccgtgacatcctggaccacggatccgtgagccccaacaagatcagccgaggggaacagcagcggaatggcatccagagcccatcgtaccggtgcgtggccgcaggcatcctcaactggcaagcggacgtggagaggtgcatagagtgggaagcccacagccgccgcgccaccgggctgacgctcgccttcctcagtacggcggcgaaggagctcggctgccctctcccgtgctgacgaggccgctcccggatctgatctgacatcggcggccacttgacggccagtgctggcagcttgctgcgggaccggcgagtaggacgctaatctctcgaccaaggacgactcgccggtttgttcacgtgatatgtgatcaaactgatattagatggtgtttccaaagtatatatctactgaggggcttgctcccatgatgcgattttattccaatctgacgtcagatgctttacgagcatatttaactgcttgagctgtacgtagcttgtattacttgtaactttgtgtaatatggttattattgccgaagaagcagaacatagctttttcttttttttctctctcttttttagactgctgctagatccttatccatgcgttgcaacggagcgccatatagattgaagttccccttgcagggctccttgtacggtctataacatgaacataaagatggcatccagtagtcaatcagcaactatcgcaatgagattggtcttctgcacgtgacccagtttagctcccgtgcagggctctctgtaacctactgtgatgtcccatgacatgaacataaatgtggcaggtttatcattcaataaccaaa

SEQ ID NO: 220061 - DNA, 4247 bp, Zea Mays
ggataagtatctccctcccccccgccgacgcgcgggcccagacgtgcctcgcgtccacctgtcggtgactgcagtgacccgcgtgggccttcacctgtggctcgcgggtgaaataacgcggccgcaccaccaccacccccggcccccgcatcgcgaaaaaatctttttctcgcctctcatcgctcctcgccatttctctctcctcccctccgtctcacccgccgcccgccgcgaaaatctgcgcacggacgcgccggctgcccgcggagagcctcgggtgggagcgcgccccgtcgaggctcttgagctaccaagcatgtcagaatcaaatgtgaagtggattgatgggcttcacttcacatcattgtactggcctccaccccaggatgtggagcagaagcaggcacaaatcttggcctacgtcgagtactttggccagtttacagctgacagtgagcagttccctgaagatgtagctcagctcattcaaagttcctatccatcaaaagaaagtcgcttgatagatgaagtattggcaacttttgttcttcatcatccggagcatggtcatgcagttgtacatccaattctttcacccatcatagatgggacactgtgctatgataggcatggtcctccattcagctccttcatctctttatttagccatacttctgagcaagagtactcagaacagtgggccttggcctgtggagaaattcttagagtcttaactcactacaataggccaattttcaaagttgaacgccaacacagtgaagctgaatgtagcaccacatctgatcaggcaacatctagtgattccacagataagaaatctaacaattctctaggaaatgaatctgaccggaagccattgaggccactaaccccgtggatcactgacatattgctagctgcacctttgggcattcgaagtgactattttcgatggtgtagcggtgtaatgggaaaatatgctgctggtggagagttgaagcctccaactactgatgggctgttgccaatggagctggagttatattaagtgtctgtgatgaggaggtagctcgttatgagacagcaaatttaacagcagcagctgttcctgcgcttctgctacctccgccaacgacacccttggacgagcatttggtggctggtctgccccctcttgaaccatatgctcgcttgttccatagatattatgcaattgctacaccaagtgctacacagaggttgctttttggtcttctcgaagcacctccatcatgggctccagatgcacttgatgcagcagtacagctagttgagctacttagagcagctgaagattatgcttctggcatgcggcttccaaagaattggatgcatctgcatttcttgcgtgccattggaactgcaatgtcaatgagagctggtattgctgctgatacagctgctgctctgcttttccgaatactttcccaaccaacgctgctttttccaccactgcgacatgctgaaggagttgacgtacatcatgaaccactaggtggctatgtatcatcatataagaaacagttggaagttcctgcatctgaggccactatcgatgccactgcacaaggcattgcttctttgttgtgtgctcatgggcctgatgttgagtggagaatatgtaccatctgggaagctgcctatggtttgctaccactaagttcatcagcagttgatttacctgaaattgttgtagctgccccgcttcagccacctacactgtcatggaacctgtacttaccattattaaaagtattcgagtatctacctcgtggaagtccatctgaagcatgcttgatgaggatatttgtggcaacagttgaagctatacttaggagagcttttccttctgaaacaccagagcaatccagaaagccaagaagtcaatctaagaatcttgctgttgctgaacttcacacaatgatacattcactctttgttgaatcctgtgcctcaatggaccttgcctcccggttgctatttgtggtgttaactgtttgtgtaagtcatcaagctttgccagggggcagcaaaagaccaactggtagcgataaccattccctcgaggaagccactgagcattcaagattaacaaatggaagaagcagatgtaagaagagacaaggccctgttgctacgtttgattcgtatgttctagctgcagtttgtgccttatcttgtgagcttcagctgttcccttgcatttctaagaatggatcacattcaaatttaaaggattccatgaagattatcatacctggaaaaaacaatgggatcaataatgagctacacagtagcatcagctcagcaattattcatactcgtagaattcttgccatcctcgaagcccttttctccttgaagccatcatcagttggtacctcatggagctatagctcaaatgaaatagttgcagcagctatggttgctgctcacgtttctgagttattccgtcggtccaggccatgccttaattcactctctgcactgatgagatgcaagcgggatgctgagatttctaccagggcatcatccctctaccatttgattgacttgcatggtaaaacagtgtcctccattgtgaacaaagctgagcctcttgaagctcacctgacccttacaccagtaaagaaggttaatcaacatcgctgtgaggaaaacaacaccaactcatcggatagtgccaagttggaaaacaagaatggttcaacacataagaaaaacggtttctcaaaaccacacttgaaatgtgcagaagaggttctgaacggcaatgttgcaagtacatctgggaaatccattgcaagcttacaggtggaagcatctgatttggcaaacttccttaccatggatcggaatggggggtaccgagatgtctgcagaaagcacatcagctcaccaaggatggaggaaggttgtggatgcactttgtgatgtcgtttcagcctcaccaaccaaggcctcagctgctatcgttctccaggccgagaaggacttgcagccttggattgctagagacgacgaacaaggccagaagatgtggagagtcaaccaacgtatagtgaagcttatagcggagctcatgaggaaccatgacagccctgaaaccttggtgatactcgctagtgcctctgaccttctacttcgtgctactgatggaatacttgttgacggtgaagcttgtactttgccacagcttgagcttctcgaagtaaccgctcgagcagtccatcttattattgaatggggagatccaggtttatcagttgctgatggcctttctaatctgctaaagtgccgtctttcaaccaccatccgctgcctttctcacccaagcgcgcacgtgcgcgcgctcagcatgtccgttctccgtgacatcctggaccacggatccgtgagccccaacaagatcagccgaggggaacagcagcggaatggcatccagagcccatcgtaccggtgcgtggccgcaggcatcctcaactggcaagcggacgtggagaggtgcatagagtgggaagcccacagccgccgcgccaccgggctgacgctcgccttcctcagtacggcggcgaaggagctcggctgccctctcccgtgctgacgaggccgctcccggatctgatctgacatcggcggccacttgacggccagtgctggcagcttgctgcgggaccggcgagtaggacgctaatctctcgaccaaggacgactcgccggtttgttcacgtgatatgtgatcaaactgatattagatggtgtttccaaagtatatatctactgaggggcttgctcccatgatgcgattttattccaatctgacgtcagatgctttacgagcatatttaactgcttgagctgtacgtagcttgtattacttgtaactttgtgtaatatggttattattgccgaagaagcagaacatagctttttcttttttttctctctcttttttagactgctgctagatccttatccatgcgttgcaacggagcgccatatagattgaagttccccttgcagggctccttgtacggtctataacatgaacataaagatggcatccagtagtcaatcagcaactatcgcaatgagattggtcttctgcacgtgacccagtttagctcccgtgcagggctctctgtaacctactgtgatgtcccatgacatgaacataaatgtggcaggtttatcattcaataaccaaa

SEQ ID NO: 220062 - DNA, 4144 bp, Zea Mays
aaaaaatctttttctcgcctctcatcgctcctcgccatttctctctcctcccctccgtctcacccgccgcccgccgcgaaaatctgcgcacggacgcgccggctgcccgcggagagcctcgggtgggagcgcgccccgtcgaggctcttgagctaccaagcatgtcagaatcaaatgtgaagtggattgatgggcttcacttcacatcattgtactggcctccaccccaggatgtggagcagaagcaggcacaaatcttggcctacgtcgagtactttggccagtttacagctgacagtgagcagttccctgaagatgtagctcagctcattcaaagttcctatccatcaaaagaaagtcgcttgatagatgaagtattggcaacttttgttcttcatcatccggagcatggtcatgcagttgtacatccaattctttcacccatcatagatgggacactgtgctatgataggcatggtcctccattcagctccttcatctctttatttagccatacttctgagcaagagtactcagaacagtgggccttggcctgtggagaaattcttagagtcttaactcactacaataggccaattttcaaagttgaacgccaacacagtgaagctgaatgtagcaccacatctgatcaggcaacatctagtgattccacagataagaaatctaacaattctctaggaaatgaatctgaccggaagccattgaggccactaaccccgtggatcactgacatattgctagctgcacctttgggcattcgaagtgactattttcgatggtgtagcggtgtaatgggaaaatatgctgctggtggagagttgaagcctccaactactgcttacagccgaggatctggaaagcacccacaacttatgccttccacccccagatgggctgttgccaatggagctggagttatattaagtgtctgtgatgaggaggtagctcgttatgagacagcaaatttaacagcagcagctgttcctgcgcttctgctacctccgccaacgacacccttggacgagcatttggtggctggtctgccccctcttgaaccatatgctcgcttgttccatagatattatgcaattgctacaccaagtgctacacagaggttgctttttggtcttctcgaagcacctccatcatgggctccagatgcacttgatgcagcagtacagctagttgagctacttagagcagctgaagattatgcttctggcatgcggcttccaaagaattggatgcatctgcatttcttgcgtgccattggaactgcaatgtcaatgagagctggtattgctgctgatacagctgctgctctgcttttccgaatactttcccaaccaacgctgctttttccaccactgcgacatgctgaaggagttgacgtacatcatgaaccactaggtggctatgtatcatcatataagaaacagttggaagttcctgcatctgaggccactatcgatgccactgcacaaggcattgcttctttgttgtgtgctcatgggcctgatgttgagtggagaatatgtaccatctgggaagctgcctatggtttgctaccactaagttcatcagcagttgatttacctgaaattgttgtagctgccccgcttcagccacctacactgtcatggaacctgtacttaccattattaaaagtattcgagtatctacctcgtggaagtccatctgaagcatgcttgatgaggatatttgtggcaacagttgaagctatacttaggagagcttttccttctgaaacaccagagcaatccagaaagccaagaagtcaatctaagaatcttgctgttgctgaacttcacacaatgatacattcactctttgttgaatcctgtgcctcaatggaccttgcctcccggttgctatttgtggtgttaactgtttgtgtaagtcatcaagctttgccagggggcagcaaaagaccaactggtagcgataaccattccctcgaggaagccactgagcattcaagattaacaaatggaagaagcagatgtaagaagagacaaggccctgttgctacgtttgattcgtatgttctagctgcagtttgtgccttatcttgtgagcttcagctgttcccttgcatttctaagaatggatcacattcaaatttaaaggattccatgaagattatcatacctggaaaaaacaatgggatcaataatgagctacacagtagcatcagctcagcaattattcatactcgtagaattcttgccatcctcgaagcccttttctccttgaagccatcatcagttggtacctcatggagctatagctcaaatgaaatagttgcagcagctatggttgctgctcacgtttctgagttattccgtcggtccaggccatgccttaattcactctctgcactgatgagatgcaagcgggatgctgagatttctaccagggcatcatccctctaccatttgattgacttgcatggtaaaacagtgtcctccattgtgaacaaagctgagcctcttgaagctcacctgacccttacaccagtaaagaaggttaatcaacatcgctgtgaggaaaacaacaccaactcatcggatagtgccaagttggaaaacaagaatggttcaacacataagaaaaacggtttctcaaaaccacacttgaaatgtgcagaagaggttctgaacggcaatgttgcaagtacatctgggaaatccattgcaagcttacaggtggaagcatctgatttggcaaacttccttaccatggatcggaatggggggtaccgagatgtctgcagaaagcacatcagctcaccaaggatggaggaaggttgtggatgcactttgtgatgtcgtttcagcctcaccaaccaaggcctcagctgctatcgttctccaggccgagaaggacttgcagccttggattgctagagacgacgaacaaggccagaagatgtggagagtcaaccaacgtatagtgaagcttatagcggagctcatgaggaaccatgacagccctgaaaccttggtgatactcgctagtgcctctgaccttctacttcgtgctactgatggaatacttgttgacggtgaagcttgtactttgccacagcttgagcttctcgaagtaaccgctcgagcagtccatcttattattgaatggggagatccaggtttatcagttgctgatggcctttctaatctgctaaagtgccgtctttcaaccaccatccgctgcctttctcacccaagcgcgcacgtgcgcgcgctcagcatgtccgttctccgtgacatcctggaccacggatccgtgagccccaacaagatcagccgaggggaacagcagcggaatggcatccagagcccatcgtaccggtgcgtggccgcaggcatcctcaactggcaagcggacgtggagaggtgcatagagtgggaagcccacagccgccgcgccaccgggctgacgctcgccttcctcagtacggcggcgaaggagctcggctgccctctcccgtgctgacgaggccgctcccggatctgatctgacatcggcggccacttgacggccagtgctggcagcttgctgcgggaccggcgagtaggacgctaatctctcgaccaaggacgactcgccggtttgttcacgtgatatgtgatcaaactgatattagatggtgtttccaaagtatatatctactgaggggcttgctcccatgatgcgattttattccaatctgacgtcagatgctttacgagcatatttaactgcttgagctgtacgtagcttgtattacttgtaactttgtgtaatatggttattattgccgaagaagcagaacatagctttttcttttttttctctctcttttttagactgctgctagatccttatccatgcgttgcaacggagcgccatatagattgaagttccccttgcagggctccttgtacggtctataacatgaacataaagatggcatccagtagtcaatcagcaactatcgcaatgagattggtcttctgcacgtgacccagtttagctcccgtgcagggctctctgtaacctactgtgatgtcccatgacatgaacataaatgtggcaggtttatcattcaataaccaaa

SEQ ID NO: 220063 - DNA, 7689 bp, Zea Mays
aaatctttttctcgcctctcatcgctcctcgccatttctctctcctcccctccgtctcacccgccgcccgccgcgaaaatctgcgcacggacgcgccggctgcccgcggagagcctcgggtgggagcgcgccccgtcgaggctcttgagctaccaagcatgtcagaatcaaatgtgaagtggattgatgggcttcacttcacatcattgtactggcctccaccccaggatgtggagcagaagcaggcacaaatcttggcctacgtcgagtactttggccagtttacagctgacagtgagcagttccctgaagatgtagctcagctcattcaaagttcctatccatcaaaagaaagtcgcttgatagatgaagtattggcaacttttgttcttcatcatccggagcatggtcatgcagttgtacatccaattctttcacccatcatagatgggacactgtgctatgataggcatggtcctccattcagctccttcatctctttatttagccatacttctgagcaagagtactcagaacagtgggccttggcctgtggagaaattcttagagtcttaactcactacaataggccaattttcaaagttgaacgccaacacagtgaagctgaatgtagcaccacatctgatcaggcaacatctagtgattccacagataagaaatctaacaattctctaggaaatgaatctgaccggaagccattgaggccactaaccccgtggatcactgacatattgctagctgcacctttgggcattcgaagtgactattttcgatggtgagtaatattatttgtatttgacctttttctgattattgaattttcttagaacaacatattatgtatttttatatacaatgagtatatcatggactatatatacaaggaatgcaacaaacagctagttgataatacaggagtaagggaaggaattcattatccagctccagcccatactgcaacaatgtctgcaatttacttatttcaagcatgccccgctacgaatagtatgaggactcatagttcagaaataactggttactgtgatgtgatgcagatacatgaatggaattgtttgttctctgctgtgagatgcttttcagtttgttggaatatattaatttgctgctcaaagttaattgtttgctccaatcacttctagtaagtagtaacagaggctaagcacttcatttttatttcacatatatcaggtgtagcggtgtaatgggaaaatatgctgctggtggagagttgaagcctccaactactggttggtaaaatcaatccccaaatattttatcttgatattgtagatttgtagcattataaaaaactcgtccctccgtgcattatattaagaagaagatcttctcacacagtttgagaaaaccttcgaacccctgccccatccatacagcgcggtacgtagcccatgtgaaaatgatagcgaccaaggattaggccttagaccggtgctttggcgtgagactaacgaggtattttttttacccccaacctgaaatccgctcccatggggagttgaactcaggatctgagaggtgctactcacaccacctaaccaactcagctagtaactataaataaccattttcttatatgtagagattgttgggaaatgcacttgttttcattatgaggccctaaggcctgtatatatacatcggtacatgaggataaatatgcactaaacaccttattcaatggggatatataggtacatgaggataaatatgcactaaacaccttattcaatggggatatttaggaatacatatatatacatctaacaccccctctcaaactcaaggtggatcaatgacactaagtttggagagataaaactgatgctaagctctggtttgcgccctgatgaaggtaccagccaactgaagctctgaaggcacatggcgaagaacaatgacatcatcatcctgaatctgcgctcgtgtataagaagcatcaacaccaatatatgcttagtaagctcatgctttaccggatcacgaacaatactaatagcacatgtactatcagacaaatgagaagtcggtatagatacagaaactccaaaatcaacaagcaaccaccgtagccaagtcacctctgtcgtcgcaagagccatagcacacaactcagcctttgtactcgaacgagaaactgctaattgcttcttagtcttccaagcaatgagggaaccactaagaaaaacacaatggtcagaaagagattaaggatatgagaaataactagcccaagtcacatcaaaataggcatggagctgcaaggagctagaacgaggaaagaacagatgacaagagatagtcccacgaagataacatagaacacgaagaagatgattgtagtgaagttgagtgggggtagatacaaacatattcagaatatgcacatgatacgagatgtcatggtgagtaacaccaaggtaaaccagactaccttcaatgtgacgatatcgagtagaatccgaaagaggctcgccattagtggcacaaaggcaaacattgagctccatggggtcttaacagtgcaatgatcagagacacacaagggtgactagcaagtaactgggcacgaagaggctcaaacttttcacgcggatgggtaagcctagacattttacccgctacacgctacccgaacccggacccgaaatacccgaacccacagtacccaaaatctatttcggataaaaaatgctattacccaaaattagtttgggtagtttggctagcagcacctgatacccgaactacctgtaacaacgggtaatatgccctggcgtgcgaggtgtcggagtctgctatctgcgaaccgtggagacgtcagaagtggagtcatgcgacgacccatgagcccatcaagccaaggcgcattcgctttagcttcatctgatccgacgcccgacagtcgacgctgcataacctagcagtagccgccaactgtctccttgtcctcggtggcggtacccgcctgcgactacgccggacgccggttgcttcttcaccagtcaccacggccgtacactccgttgcacagtcgctgcccttactcccttcgtccctcgtccacggtccacctttgcccagttttgatgactggtagttctaaattcttttcctgtaaatcttcaagccgtatgtaatgtgctttggcctttgggcgtatggactctggaatgttgggtgtgtcactgtcagtgtgagcatgtaatgactgttgttcgatgagagcagatagcttctgtcaaatatgctttgggcttctgtcaaatatgcttttgatgagtgatgaccgctagttctattcaccggaaatatttcgggtaaatcgggtataccgaactcgaacccgaaattacgggtagagttttttcttggctgtaatggggtaacaatttctattacccgaatttatcaaagcccgaactacccgacccgaattaaacgggtaacccgaaggtcccgaacgccagtcttatggatgggtcaagaagtcatatgtgcgacgaaactcaagatcagtcttttgatccagacagaactcacatgtgctaggagacatctacagactaagagtatcaagctgacgctaggcgtcagacatctggctatagaattcatcaactgtagaatctccctgacgtaaagaccactcctgacgaatggcagcaagataagtagatgtccagcacacacaacaatcacgaagaagggtccacatctgatgagaactgtcactcaacaaactctgtagaaaagcgagcctccacactagcggtgagaatagaaccagctcaagcatcctcatccatccatatccgatatgcactctactgagcctcatatgatgccagctgatcatcataatctgcaagtagagtgcatcagctgctccctatactgctccattactcgtcttattaagaaaatggctttcatggttgaccttctagagttctaggcacgaaaccaaattggttaaaagagattctcattattcctctcaggcggcgctcgataactctcttccatatcttcatagtatggctcgtcaacttaatttctcggtaattagtacaactttgaatttattcttgtagatcggttccgatatactttaccactcagacatctttattttggacaaacccagccagaagtatctatattttgggatgtaggtagtagtcgataatgtttgttgtgtatggaaaaaaatcaacatatccctgggtgatttagcttacagccgaggatctggaaagcacccacaacttatgccttccacccccagatgggctgttgccaatggagctggagttatattaagtgtctgtgatgaggaggtagctcgttatgagacagcaaatttaacagcagcagctgttcctgcgcttctgctacctccgccaacgacacccttggacgagcatttggtggctggtctgccccctcttgaaccatatgctcgcttgttccatagatattatgcaattgctacaccaagtgctacacagaggttgctttttggtcttctcgaagcacctccatcatgggctccagatgcacttgatgcagcagtacagctagttgagctacttagagcagctgaagattatgcttctggcatgcggcttccaaagaattggatgcatctgcatttcttgcgtgccattggaactgcaatgtcaatgagagctggtattgctgctgatacagctgctgctctgcttttccgaatactttcccaaccaacgctgctttttccaccactgcgacatgctgaaggagttgacgtacatcatgaaccactaggtggctatgtatcatcatataagaaacagttggaagttcctgcatctgaggccactatcgatgccactgcacaaggcattgcttctttgttgtgtgctcatgggcctgatgttgagtggagaatatgtaccatctgggaagctgcctatggtttgctaccactaagttcatcagcagttgatttacctgaaattgttgtagctgccccgcttcagccacctacactgtcatggaacctgtacttaccattattaaaagtattcgagtatctacctcgtggaagtccatctgaagcatgcttgatgaggatatttgtggcaacagttgaagctatacttaggagagcttttccttctgaaacaccagagcaatccagaaagccaagaagtcaatctaagaatcttgctgttgctgaacttcacacaatgatacattcactctttgttgaatcctgtgcctcaatggaccttgcctcccggttgctatttgtggtgttaactgtttgtgtaagtcatcaagctttgccagggggcagcaaaagaccaactggtagcgataaccattccctcgaggaagccactgagcattcaagattaacaaatggaagaagcagatgtaagaagagacaaggccctgttgctacgtttgattcgtatgttctagctgcagtttgtgccttatcttgtgagcttcagctgttcccttgcatttctaagaatggatcacattcaaatttaaaggattccatgaagattatcatacctggaaaaaacaatgggatcaataatgagctacacagtagcatcagctcagcaattattcatactcgtagaattcttgccatcctcgaagcccttttctccttgaagccatcatcagttggtacctcatggagctatagctcaaatgaaatagttgcagcagctatggttgctgctcacgtttctgagttattccgtcggtccaggccatgccttaattcactctctgcactgatgagatgcaagcgggatgctgagatttctaccagggcatcatccctctaccatttgattgacttgcatggtaaaacagtgtcctccattgtgaacaaagctgagcctcttgaagctcacctgacccttacaccagtaaagaaggttaatcaacatcgctgtgaggaaaacaacaccaactcatcggatagtgccaagttggaaaacaagaatggttcaacacataagaaaaacggtttctcaaaaccacacttgaaatgtgcagaagaggttctgaacggcaatgttgcaagtacatctgggaaatccattgcaagcttacaggtggaagcatctgatttggcaaacttccttaccatggatcggaatggggggtaccgaggttcacaaactctcctaagatctgtattatcagagaaacaagagctgtgcttctctgttgtctcattgctctggcagaagctcatagcttctcccgaaatgcagatgtctgcagaaagcacatcagctcaccaaggatggaggaaggttgtggatgcactttgtgatgtcgtttcagcctcaccaaccaaggcctcagctgctatcgttctccaggccgagaaggacttgcagccttggattgctagagacgacgaacaaggccagaagatgtggagagtcaaccaacgtatagtgaagcttatagcggagctcatgaggaaccatgacagccctgaaaccttggtgatactcgctagtgcctctgaccttctacttcgtgctactgatggaatacttgttgacggtgaagcttgtactttgccacagcttgagcttctcgaagtaaccgctcgagcagtccatcttattattgaatggggagatccaggtttatcagttgctgatggcctttctaatctgctaaagtgccgtctttcaaccaccatccgctgcctttctcacccaagcgcgcacgtgcgcgcgctcagcatgtccgttctccgtgacatcctggaccacggatccgtgagccccaacaagatcagccgaggggaacagcagcggaatggcatccagagcccatcgtaccggtgcgtggccgcaggcatcctcaactggcaagcggacgtggagaggtgcatagagtgggaagcccacagccgccgcgccaccgggctgacgctcgccttcctcagtacggcggcgaaggagctcggctgccctctcccgtgctgacgaggccgctcccggatctgatctgacatcggcggccacttgacggccagtgctggcagcttgctgcgggaccggcgagtaggacgctaatctctcgaccaaggacgactcgccggtttgttcacgtgatatgtgatcaaactgatattagatggtgtttccaaagtatatatctactgaggggcttgctcccatgatgcgattttattccaatctgacgtcagatgctttacgagcatatttaactgcttgagctgtacgtagcttgtattacttgtaactttgtgtaatatggttattattgccgaagaagcagaacatagctttttcttttttttctctctcttttttagactgctgctagatccttatccatgcgttgcaacggagcgccatatagattgaagttccccttgcagggctccttgtacggtctataacatgaacataaagatggcatccagtagtcaatcagcaactatcgcaatgagattggtcttctgcacgtgacccagtttagctcccgtgcagggctctctgtaacctactgtgatgtcccatgacatgaacataaatgtggcaggtttatcattcaataaccaaa

SEQ ID NO: 220064 - DNA, 7326 bp, Zea Mays
ctttttctcgcctctcatcgctcctcgccatttctctctcctcccctccgtctcacccgccgcccgccgcgaaaatctgcgcacggacgcgccggctgcccgcggagagcctcgggtgggagcgcgccccgtcgaggtgctcttattggttatgggatcaatgtgcaatttttttctttccgtttgagagcctttctagtttcttgggcaggctcttgagctaccaagcatgtcagaatcaaatgtgaagtggattgatgggcttcacttcacatcattgtactggcctccaccccaggatgtggagcagaagcaggcacaaatcttggcctacgtcgagtactttggccagtttacagctgacagtgagcagttccctgaagatgtagctcagctcattcaaagttcctatccatcaaaagaaagtcgcttgatagatgaagtattggcaacttttgttcttcatcatccggagcatggtcatgcagttgtacatccaattctttcacccatcatagatgggacactgtgctatgataggcatggtcctccattcagctccttcatctctttatttagccatacttctgagcaagagtactcagaacagtgggccttggcctgtggagaaattcttagagtcttaactcactacaataggccaattttcaaagttgaacgccaacacagtgaagctgaatgtagcaccacatctgatcaggcaacatctagtgattccacagataagaaatctaacaattctctaggaaatgaatctgaccggaagccattgaggccactaaccccgtggatcactgacatattgctagctgcacctttgggcattcgaagtgactattttcgatggtgtagcggtgtaatgggaaaatatgctgctggtggagagttgaagcctccaactactggttggtaaaatcaatccccaaatattttatcttgatattgtagatttgtagcattataaaaaactcgtccctccgtgcattatattaagaagaagatcttctcacacagtttgagaaaaccttcgaacccctgccccatccatacagcgcggtacgtagcccatgtgaaaatgatagcgaccaaggattaggccttagaccggtgctttggcgtgagactaacgaggtattttttttacccccaacctgaaatccgctcccatggggagttgaactcaggatctgagaggtgctactcacaccacctaaccaactcagctagtaactataaataaccattttcttatatgtagagattgttgggaaatgcacttgttttcattatgaggccctaaggcctgtatatatacatcggtacatgaggataaatatgcactaaacaccttattcaatggggatatataggtacatgaggataaatatgcactaaacaccttattcaatggggatatttaggaatacatatatatacatctaacaccccctctcaaactcaaggtggatcaatgacactaagtttggagagataaaactgatgctaagctctggtttgcgccctgatgaaggtaccagccaactgaagctctgaaggcacatggcgaagaacaatgacatcatcatcctgaatctgcgctcgtgtataagaagcatcaacaccaatatatgcttagtaagctcatgctttaccggatcacgaacaatactaatagcacatgtactatcagacaaatgagaagtcggtatagatacagaaactccaaaatcaacaagcaaccaccgtagccaagtcacctctgtcgtcgcaagagccatagcacacaactcagcctttgtactcgaacgagaaactgctaattgcttcttagtcttccaagcaatgagggaaccactaagaaaaacacaatggtcagaaagagattaaggatatgagaaataactagcccaagtcacatcaaaataggcatggagctgcaaggagctagaacgaggaaagaacagatgacaagagatagtcccacgaagataacatagaacacgaagaagatgattgtagtgaagttgagtgggggtagatacaaacatattcagaatatgcacatgatacgagatgtcatggtgagtaacaccaaggtaaaccagactaccttcaatgtgacgatatcgagtagaatccgaaagaggctcgccattagtggcacaaaggcaaacattgagctccatggggtcttaacagtgcaatgatcagagacacacaagggtgactagcaagtaactgggcacgaagaggctcaaacttttcacgcggatgggtaagcctagacattttacccgctacacgctacccgaacccggacccgaaatacccgaacccacagtacccaaaatctatttcggataaaaaatgctattacccaaaattagtttgggtagtttggctagcagcacctgatacccgaactacctgtaacaacgggtaatatgccctggcgtgcgaggtgtcggagtctgctatctgcgaaccgtggagacgtcagaagtggagtcatgcgacgacccatgagcccatcaagccaaggcgcattcgctttagcttcatctgatccgacgcccgacagtcgacgctgcataacctagcagtagccgccaactgtctccttgtcctcggtggcggtacccgcctgcgactacgccggacgccggttgcttcttcaccagtcaccacggccgtacactccgttgcacagtcgctgcccttactcccttcgtccctcgtccacggtccacctttgcccagttttgatgactggtagttctaaattcttttcctgtaaatcttcaagccgtatgtaatgtgctttggcctttgggcgtatggactctggaatgttgggtgtgtcactgtcagtgtgagcatgtaatgactgttgttcgatgagagcagatagcttctgtcaaatatgctttgggcttctgtcaaatatgcttttgatgagtgatgaccgctagttctattcaccggaaatatttcgggtaaatcgggtataccgaactcgaacccgaaattacgggtagagttttttcttggctgtaatggggtaacaatttctattacccgaatttatcaaagcccgaactacccgacccgaattaaacgggtaacccgaaggtcccgaacgccagtcttatggatgggtcaagaagtcatatgtgcgacgaaactcaagatcagtcttttgatccagacagaactcacatgtgctaggagacatctacagactaagagtatcaagctgacgctaggcgtcagacatctggctatagaattcatcaactgtagaatctccctgacgtaaagaccactcctgacgaatggcagcaagataagtagatgtccagcacacacaacaatcacgaagaagggtccacatctgatgagaactgtcactcaacaaactctgtagaaaagcgagcctccacactagcggtgagaatagaaccagctcaagcatcctcatccatccatatccgatatgcactctactgagcctcatatgatgccagctgatcatcataatctgcaagtagagtgcatcagctgctccctatactgctccattactcgtcttattaagaaaatggctttcatggttgaccttctagagttctaggcacgaaaccaaattggttaaaagagattctcattattcctctcaggcggcgctcgataactctcttccatatcttcatagtatggctcgtcaacttaatttctcggtaattagtacaactttgaatttattcttgtagatcggttccgatatactttaccactcagacatctttattttggacaaacccagccagaagtatctatattttgggatgtaggtagtagtcgataatgtttgttgtgtatggaaaaaaatcaacatatccctgggtgatttagcttacagccgaggatctggaaagcacccacaacttatgccttccacccccagatgggctgttgccaatggagctggagttatattaagtgtctgtgatgaggaggtagctcgttatgagacagcaaatttaacagcagcagctgttcctgcgcttctgctacctccgccaacgacacccttggacgagcatttggtggctggtctgccccctcttgaaccatatgctcgcttgttccatagatattatgcaattgctacaccaagtgctacacagaggttgctttttggtcttctcgaagcacctccatcatgggctccagatgcacttgatgcagcagtacagctagttgagctacttagagcagctgaagattatgcttctggcatgcggcttccaaagaattggatgcatctgcatttcttgcgtgccattggaactgcaatgtcaatgagagctggtattgctgctgatacagctgctgctctgcttttccgaatactttcccaaccaacgctgctttttccaccactgcgacatgctgaaggagttgacgtacatcatgaaccactaggtggctatgtatcatcatataagaaacagttggaagttcctgcatctgaggccactatcgatgccactgcacaaggcattgcttctttgttgtgtgctcatgggcctgatgttgagtggagaatatgtaccatctgggaagctgcctatggtttgctaccactaagttcatcagcagttgatttacctgaaattgttgtagctgccccgcttcagccacctacactgtcatggaacctgtacttaccattattaaaagtattcgagtatctacctcgtggaagtccatctgaagcatgcttgatgaggatatttgtggcaacagttgaagctatacttaggagagcttttccttctgaaacaccagagcaatccagaaagccaagaagtcaatctaagaatcttgctgttgctgaacttcacacaatgatacattcactctttgttgaatcctgtgcctcaatggaccttgcctcccggttgctatttgtggtgttaactgtttgtgtaagtcatcaagctttgccagggggcagcaaaagaccaactggtagcgataaccattccctcgaggaagccactgagcattcaagattaacaaatggaagaagcagatgtaagaagagacaaggccctgttgctacgtttgattcgtatgttctagctgcagtttgtgccttatcttgtgagcttcagctgttcccttgcatttctaagaatggatcacattcaaatttaaaggattccatgaagattatcatacctggaaaaaacaatgggatcaataatgagctacacagtagcatcagctcagcaattattcatactcgtagaattcttgccatcctcgaagcccttttctccttgaagccatcatcagttggtacctcatggagctatagctcaaatgaaatagttgcagcagctatggttgctgctcacgtttctgagttattccgtcggtccaggccatgccttaattcactctctgcactgatgagatgcaagcgggatgctgagatttctaccagggcatcatccctctaccatttgattgacttgcatggtaaaacagtgtcctccattgtgaacaaagctgagcctcttgaagctcacctgacccttacaccagtaaagaaggttaatcaacatcgctgtgaggaaaacaacaccaactcatcggatagtgccaagttggaaaacaagaatggttcaacacataagaaaaacggtttctcaaaaccacacttgaaatgtgcagaagaggttctgaacggcaatgttgcaagtacatctgggaaatccattgcaagcttacaggtggaagcatctgatttggcaaacttccttaccatggatcggaatggggggtaccgaggttcacaaactctcctaagatctgtattatcagagaaacaagagctgtgcttctctgttgtctcattgctctggcagaagctcatagcttctcccgaaatgcagatgtctgcagaaagcacatcagctcaccaaggatggaggaaggttgtggatgcactttgtgatgtcgtttcagcctcaccaaccaaggcctcagctgctatcgttctccaggccgagaaggacttgcagccttggattgctagagacgacgaacaaggccagaagatgtggagagtcaaccaacgtatagtgaagcttatagcggagctcatgaggaaccatgacagccctgaaaccttggtgatactcgctagtgcctctgaccttctacttcgtgctactgatggaatacttgttgacggtgaagcttgtactttgccacagcttgagcttctcgaagtaaccgctcgagcagtccatcttattattgaatggggagatccaggtttatcagttgctgatggcctttctaatctgctaaagtgccgtctttcaaccaccatccgctgcctttctcacccaagcgcgcacgtgcgcgcgctcagcatgtccgttctccgtgacatcctggaccacggatccgtgagccccaacaagatcagccgaggggaacagcagcggaatggcatccagagcccatcgtaccggtgcgtggccgcaggcatcctcaactggcaagcggacgtggagaggtgcatagagtgggaagcccacagccgccgcgccaccgggctgacgctcgccttcctcagtacggcggcgaaggagctcggctgccctctcccgtgctgacgaggccgctcccggatctgatctgacatcggcggccacttgacggccagtgctggcagcttgctgcgggaccggcgagtaggacgctaatctctcgaccaaggacgactcgccggtttgttcacgtgatatgtgatcaaactgatattagatggtgtttccaaagtatatatctactgaggggcttgctcccatgatgcgattttattccaatctgacgtcagatgctttacgagcatatttaactgcttgagctgtacgtagcttgtattacttgtaactttgtgtaatatggttattattgccgaagaagcagaacatagctttttcttttttttctctctcttttttagactgctgctagatccttatccatgcgttgcaacggagcgccatatagattgaagttccccttgcagggctccttgtacggtctataacatgaacataaagatggcatccagtagtcaatcagcaactatcgcaatgagattggtcttctgcacgtgacccagtttagctcccgtgcagggctctctgtaacctactgtgatgtcccatgacatgaacataaatgtggcaggtttatcattcaataaccaaa

SEQ ID NO: 220065 - DNA, 7263 bp, Zea Mays
cgcctctcatcgctcctcgccatttctctctcctcccctccgtctcacccgccgcccgccgcgaaaatctgcgcacggacgcgccggctgcccgcggagagcctcgggtgggagcgcgccccgtcgaggctcttgagctaccaagcatgtcagaatcaaatgtgaagtggattgatgggcttcacttcacatcattgtactggcctccaccccaggatgtggagcagaagcaggcacaaatcttggcctacgtcgagtactttggccagtttacagctgacagtgagcagttccctgaagatgtagctcagctcattcaaagttcctatccatcaaaagaaagtcgcttgatagatgaagtattggcaacttttgttcttcatcatccggagcatggtcatgcagttgtacatccaattctttcacccatcatagatgggacactgtgctatgataggcatggtcctccattcagctccttcatctctttatttagccatacttctgagcaagagtactcagaacagtgggccttggcctgtggagaaattcttagagtcttaactcactacaataggccaattttcaaagttgaacgccaacacagtgaagctgaatgtagcaccacatctgatcaggcaacatctagtgattccacagataagaaatctaacaattctctaggaaatgaatctgaccggaagccattgaggccactaaccccgtggatcactgacatattgctagctgcacctttgggcattcgaagtgactattttcgatggtgtagcggtgtaatgggaaaatatgctgctggtggagagttgaagcctccaactactggttggtaaaatcaatccccaaatattttatcttgatattgtagatttgtagcattataaaaaactcgtccctccgtgcattatattaagaagaagatcttctcacacagtttgagaaaaccttcgaacccctgccccatccatacagcgcggtacgtagcccatgtgaaaatgatagcgaccaaggattaggccttagaccggtgctttggcgtgagactaacgaggtattttttttacccccaacctgaaatccgctcccatggggagttgaactcaggatctgagaggtgctactcacaccacctaaccaactcagctagtaactataaataaccattttcttatatgtagagattgttgggaaatgcacttgttttcattatgaggccctaaggcctgtatatatacatcggtacatgaggataaatatgcactaaacaccttattcaatggggatatataggtacatgaggataaatatgcactaaacaccttattcaatggggatatttaggaatacatatatatacatctaacaccccctctcaaactcaaggtggatcaatgacactaagtttggagagataaaactgatgctaagctctggtttgcgccctgatgaaggtaccagccaactgaagctctgaaggcacatggcgaagaacaatgacatcatcatcctgaatctgcgctcgtgtataagaagcatcaacaccaatatatgcttagtaagctcatgctttaccggatcacgaacaatactaatagcacatgtactatcagacaaatgagaagtcggtatagatacagaaactccaaaatcaacaagcaaccaccgtagccaagtcacctctgtcgtcgcaagagccatagcacacaactcagcctttgtactcgaacgagaaactgctaattgcttcttagtcttccaagcaatgagggaaccactaagaaaaacacaatggtcagaaagagattaaggatatgagaaataactagcccaagtcacatcaaaataggcatggagctgcaaggagctagaacgaggaaagaacagatgacaagagatagtcccacgaagataacatagaacacgaagaagatgattgtagtgaagttgagtgggggtagatacaaacatattcagaatatgcacatgatacgagatgtcatggtgagtaacaccaaggtaaaccagactaccttcaatgtgacgatatcgagtagaatccgaaagaggctcgccattagtggcacaaaggcaaacattgagctccatggggtcttaacagtgcaatgatcagagacacacaagggtgactagcaagtaactgggcacgaagaggctcaaacttttcacgcggatgggtaagcctagacattttacccgctacacgctacccgaacccggacccgaaatacccgaacccacagtacccaaaatctatttcggataaaaaatgctattacccaaaattagtttgggtagtttggctagcagcacctgatacccgaactacctgtaacaacgggtaatatgccctggcgtgcgaggtgtcggagtctgctatctgcgaaccgtggagacgtcagaagtggagtcatgcgacgacccatgagcccatcaagccaaggcgcattcgctttagcttcatctgatccgacgcccgacagtcgacgctgcataacctagcagtagccgccaactgtctccttgtcctcggtggcggtacccgcctgcgactacgccggacgccggttgcttcttcaccagtcaccacggccgtacactccgttgcacagtcgctgcccttactcccttcgtccctcgtccacggtccacctttgcccagttttgatgactggtagttctaaattcttttcctgtaaatcttcaagccgtatgtaatgtgctttggcctttgggcgtatggactctggaatgttgggtgtgtcactgtcagtgtgagcatgtaatgactgttgttcgatgagagcagatagcttctgtcaaatatgctttgggcttctgtcaaatatgcttttgatgagtgatgaccgctagttctattcaccggaaatatttcgggtaaatcgggtataccgaactcgaacccgaaattacgggtagagttttttcttggctgtaatggggtaacaatttctattacccgaatttatcaaagcccgaactacccgacccgaattaaacgggtaacccgaaggtcccgaacgccagtcttatggatgggtcaagaagtcatatgtgcgacgaaactcaagatcagtcttttgatccagacagaactcacatgtgctaggagacatctacagactaagagtatcaagctgacgctaggcgtcagacatctggctatagaattcatcaactgtagaatctccctgacgtaaagaccactcctgacgaatggcagcaagataagtagatgtccagcacacacaacaatcacgaagaagggtccacatctgatgagaactgtcactcaacaaactctgtagaaaagcgagcctccacactagcggtgagaatagaaccagctcaagcatcctcatccatccatatccgatatgcactctactgagcctcatatgatgccagctgatcatcataatctgcaagtagagtgcatcagctgctccctatactgctccattactcgtcttattaagaaaatggctttcatggttgaccttctagagttctaggcacgaaaccaaattggttaaaagagattctcattattcctctcaggcggcgctcgataactctcttccatatcttcatagtatggctcgtcaacttaatttctcggtaattagtacaactttgaatttattcttgtagatcggttccgatatactttaccactcagacatctttattttggacaaacccagccagaagtatctatattttgggatgtaggtagtagtcgataatgtttgttgtgtatggaaaaaaatcaacatatccctgggtgatttagcttacagccgaggatctggaaagcacccacaacttatgccttccacccccagatgggctgttgccaatggagctggagttatattaagtgtctgtgatgaggaggtagctcgttatgagacagcaaatttaacagcagcagctgttcctgcgcttctgctacctccgccaacgacacccttggacgagcatttggtggctggtctgccccctcttgaaccatatgctcgcttgttccatagatattatgcaattgctacaccaagtgctacacagaggttgctttttggtcttctcgaagcacctccatcatgggctccagatgcacttgatgcagcagtacagctagttgagctacttagagcagctgaagattatgcttctggcatgcggcttccaaagaattggatgcatctgcatttcttgcgtgccattggaactgcaatgtcaatgagagctggtattgctgctgatacagctgctgctctgcttttccgaatactttcccaaccaacgctgctttttccaccactgcgacatgctgaaggagttgacgtacatcatgaaccactaggtggctatgtatcatcatataagaaacagttggaagttcctgcatctgaggccactatcgatgccactgcacaaggcattgcttctttgttgtgtgctcatgggcctgatgttgagtggagaatatgtaccatctgggaagctgcctatggtttgctaccactaagttcatcagcagttgatttacctgaaattgttgtagctgccccgcttcagccacctacactgtcatggaacctgtacttaccattattaaaagtattcgagtatctacctcgtggaagtccatctgaagcatgcttgatgaggatatttgtggcaacagttgaagctatacttaggagagcttttccttctgaaacaccagagcaatccagaaagccaagaagtcaatctaagaatcttgctgttgctgaacttcacacaatgatacattcactctttgttgaatcctgtgcctcaatggaccttgcctcccggttgctatttgtggtgttaactgtttgtgtaagtcatcaagctttgccagggggcagcaaaagaccaactggtagcgataaccattccctcgaggaagccactgagcattcaagattaacaaatggaagaagcagatgtaagaagagacaaggccctgttgctacgtttgattcgtatgttctagctgcagtttgtgccttatcttgtgagcttcagctgttcccttgcatttctaagaatggatcacattcaaatttaaaggattccatgaagattatcatacctggaaaaaacaatgggatcaataatgagctacacagtagcatcagctcagcaattattcatactcgtagaattcttgccatcctcgaagcccttttctccttgaagccatcatcagttggtacctcatggagctatagctcaaatgaaatagttgcagcagctatggttgctgctcacgtttctgagttattccgtcggtccaggccatgccttaattcactctctgcactgatgagatgcaagcgggatgctgagatttctaccagggcatcatccctctaccatttgattgacttgcatggtaaaacagtgtcctccattgtgaacaaagctgagcctcttgaagctcacctgacccttacaccagtaaagaaggttaatcaacatcgctgtgaggaaaacaacaccaactcatcggatagtgccaagttggaaaacaagaatggttcaacacataagaaaaacggtttctcaaaaccacacttgaaatgtgcagaagaggttctgaacggcaatgttgcaagtacatctgggaaatccattgcaagcttacaggtggaagcatctgatttggcaaacttccttaccatggatcggaatggggggtaccgaggttcacaaactctcctaagatctgtattatcagagaaacaagagctgtgcttctctgttgtctcattgctctggcagaagctcatagcttctcccgaaatgcagatgtctgcagaaagcacatcagctcaccaaggatggaggaaggttgtggatgcactttgtgatgtcgtttcagcctcaccaaccaaggcctcagctgctatcgttctccaggtcaagatattgctatattcgccgagaaggacttgcagccttggattgctagagacgacgaacaaggccagaagatgtggagagtcaaccaacgtatagtgaagcttatagcggagctcatgaggaaccatgacagccctgaaaccttggtgatactcgctagtgcctctgaccttctacttcgtgctactgatggaatacttgttgacggtgaagcttgtactttgccacagcttgagcttctcgaagtaaccgctcgagcagtccatcttattattgaatggggagatccaggtttatcagttgctgatggcctttctaatctgctaaagtgccgtctttcaaccaccatccgctgcctttctcacccaagcgcgcacgtgcgcgcgctcagcatgtccgttctccgtgacatcctggaccacggatccgtgagccccaacaagatcagccgaggggaacagcagcggaatggcatccagagcccatcgtaccggtgcgtggccgcaggcatcctcaactggcaagcggacgtggagaggtgcatagagtgggaagcccacagccgccgcgccaccgggctgacgctcgccttcctcagtacggcggcgaaggagctcggctgccctctcccgtgctgacgaggccgctcccggatctgatctgacatcggcggccacttgacggccagtgctggcagcttgctgcgggaccggcgagtaggacgctaatctctcgaccaaggacgactcgccggtttgttcacgtgatatgtgatcaaactgatattagatggtgtttccaaagtatatatctactgaggggcttgctcccatgatgcgattttattccaatctgacgtcagatgctttacgagcatatttaactgcttgagctgtacgtagcttgtattacttgtaactttgtgtaatatggttattattgccgaagaagcagaacatagctttttcttttttttctctctcttttttagactgctgctagatccttatccatgcgttgcaacggagcgccatatagattgaagttccccttgcagggctccttgtacggtctataacatgaacataaagatggcatccagtagtcaatcagcaactatcgcaatgagattggtcttctgcacgtgacccagtttagctcccgtgcagggctctctgtaacctactgtgatgtcccatgacatgaacataaatgtggcaggtttatcattcaataaccaaa

SEQ ID NO: 220066 - DNA, 3009 bp, Zea Mays
tgctcgggcggcttccaaagaattggatgcatctgcatttcttgcgtgccattggaactgcaatgtcaatgagagctggtattgctgctgatacagctgctgctctgcttttccgaatactttcccaaccaacgctgctttttccaccactgcgacatgctgaaggagttgacgtacatcatgaaccactaggtggctatgtatcatcatataagaaacagttggaagttcctgcatctgaggccactatcgatgccactgcacaaggcattgcttctttgttgtgtgctcatgggcctgatgttgagtggagaatatgtaccatctgggaagctgcctatggtttgctaccactaagttcatcagcagttgatttacctgaaattgttgtagctgccccgcttcagccacctacactgtcatggaacctgtacttaccattattaaaagtattcgagtatctacctcgtggaagtccatctgaagcatgcttgatgaggatatttgtggcaacagttgaagctatacttaggagagcttttccttctgaaacaccagagcaatccagaaagccaagaagtcaatctaagaatcttgctgttgctgaacttcacacaatgatacattcactctttgttgaatcctgtgcctcaatggaccttgcctcccggttgctatttgtggtgttaactgtttgtgtaagtcatcaagctttgccagggggcagcaaaagaccaactggtagcgataaccattccctcgaggaagccactgagcattcaagattaacaaatggaagaagcagatgtaagaagagacaaggccctgttgctacgtttgattcgtatgttctagctgcagtttgtgccttatcttgtgagcttcagctgttcccttgcatttctaagaatggatcacattcaaatttaaaggattccatgaagattatcatacctggaaaaaacaatgggatcaataatgagctacacagtagcatcagctcagcaattattcatactcgtagaattcttgccatcctcgaagcccttttctccttgaagccatcatcagttggtacctcatggagctatagctcaaatgaaatagttgcagcagctatggttgctgctcacgtttctgagttattccgtcggtccaggccatgccttaattcactctctgcactgatgagatgcaagcgggatgctgagatttctaccagggcatcatccctctaccatttgattgacttgcatggtaaaacagtgtcctccattgtgaacaaagctgagcctcttgaagctcacctgacccttacaccagtaaagaaggttaatcaacatcgctgtgaggaaaacaacaccaactcatcggatagtgccaagttggaaaacaagaatggttcaacacataagaaaaacggtttctcaaaaccacacttgaaatgtgcagaagaggttctgaacggcaatgttgcaagtacatctgggaaatccattgcaagcttacaggtggaagcatctgatttggcaaacttccttaccatggatcggaatggggggtaccgaggttcacaaactctcctaagatctgtattatcagagaaacaagagctgtgcttctctgttgtctcattgctctggcagaagctcatagcttctcccgaaatgcagatgtctgcagaaagcacatcagctcaccaaggatggaggaaggttgtggatgcactttgtgatgtcgtttcagcctcaccaaccaaggcctcagctgctatcgttctccaggccgagaaggacttgcagccttggattgctagagacgacgaacaaggccagaagatgtggagagtcaaccaacgtatagtgaagcttatagcggagctcatgaggaaccatgacagccctgaaaccttggtgatactcgctagtgcctctgaccttctacttcgtgctactgatggaatacttgttgacggtgaagcttgtactttgccacagcttgagcttctcgaagtaaccgctcgagcagtccatcttattattgaatggggagatccaggtttatcagttgctgatggcctttctaatctgctaaagtgccgtctttcaaccaccatccgctgcctttctcacccaagcgcgcacgtgcgcgcgctcagcatgtccgttctccgtgacatcctggaccacggatccgtgagccccaacaagatcagccgaggggaacagcagcggaatggcatccagagcccatcgtaccggtgcgtggccgcaggcatcctcaactggcaagcggacgtggagaggtgcatagagtgggaagcccacagccgccgcgccaccgggctgacgctcgccttcctcagtacggcggcgaaggagctcggctgccctctcccgtgctgacgaggccgctcccggatctgatctgacatcggcggccacttgacggccagtgctggcagcttgctgcgggaccggcgagtaggacgctaatctctcgaccaaggacgactcgccggtttgttcacgtgatatgtgatcaaactgatattagatggtgtttccaaagtatatatctactgaggggcttgctcccatgatgcgattttattccaatctgacgtcagatgctttacgagcatatttaactgcttgagctgtacgtagcttgtattacttgtaactttgtgtaatatggttattattgccgaagaagcagaacatagctttttcttttttttctctctcttttttagactgctgctagatccttatccatgcgttgcaacggagcgccatatagattgaagttccccttgcagggctccttgtacggtctataacatgaacataaagatggcatccagtagtcaatcagcaactatcgcaatgagattggtcttctgcacgtgacccagtttagctcccgtgcagggctctctgtaacctactgtgatgtcccatgacatgaacataaatgtggcaggtttatcattcaataaccaaa

SEQ ID NO: 220067 - DNA, 3082 bp, Zea Mays
acacgcgacgaacagagctgaacacaaacacccgcatcaatccaagccgagcctcccctcggggacagcctacgcgagcgagatccaacccaagtcccgacgccgcgggcgagggcgaccagatccacctcctcagtcgtctcggatggcggcagcatcgacgtcggtacgggtgctccccgacggcggtgctgacgacgaggagcgctggctcgccgagggcatcgccggcgtccagcaaaacgctttctacatgcaccgtgccctcgattccaacaacctcaaggacgcactcaagtactcggcgcagatgctatcagagctgcgcacctcgcgactatcgccgcacaagtactacgagctttacatgagggcgtttgatgagatgaagaagctggagatgttcttcagggaggagactcgccgaggcagctgctctgtggttgatctgtacgagcttgtgcagcatgctgggaatgtcttaccgagactctatctcctgtgcacggtggggtctgtgtacatcaaatcgaaagaggctcctgctaaagatgttcttaaagatctcgttgaaatgtgccgaggcattcaacatcctcttcgtggcctttttttgagaagttacctttctcaaataagcagagacaaattgcctgatattggttctgagtacgaaggcgatgtggaaaatattaacgatgcggttgaatttgttcttcagaatttcatagaaatgaacaaactctgggtcccggatgcagcatcaggggcctgcccgagaaaaggaaaagcgtgggaaggaaagaaatgaactgcgtgatctggtgattcagtgacatctggatattttactcaactgtattttctaagtcatggcattgatattattattgttttttatcttctaggtaggcaaaaaccttcatgttctaggccagattgacggcgttgaccttgatatgtacaaagaaactgttcttccaaggatattagagcaggtggttaattgtaaggatgaccttgcacaattctacctgatggactgcataatccaagtctttccagacgaataccatttacaaacattggaaacgttattgagcgcatttccccagcttcagccaagtgttgatataaaaacagtactctctcaacttatggacagattgtctaactatgctgcctcaagtcctgaaagttcttgcaagttgaagcttttgctaagttcagtaatgctattggaaaggtgatagaagcccaacctgacatgccagttgttggagccataactctatatgtatcacttctgacctttactctccgtgtacatcctgatcggcttgattatgttgaccaagtgctgggtgcatgtgtcaagaaactttcaggcaaggcaaaacttgaagatagcagggcaacaaagcaaattgttgcacttcttagtgctcccctggaaaaatatagcaatattgttactgcattagaactttcaaactatcctcgggttatggattatcttgataatgctacaaccaaagtgatggctgtggtaataattcaaagcataatgaaaaacacaacctgcatatctacttctgacaagattgaggcactattcgatttaattaaggggctgataaaggatatggatggagctcaagatgatgagcttgatgaagaagactttaaggaggaacaaaactctgtagcgcgtctcattcacatgctgcacaatgatgatcctgaagagatgctgaagatcttatgtactgtacagaagcatatacttcagggaggccccaagcgtctaactttcactgtgccttcgttagtattctcttctcttaagctggtcaggcgattacaaggccaagatggagatgtcactggggaggatgttcctgcaactccaaagaaaatattccagatattgcatcagactattgaagcactttcttgtgttccttctccagagttagctctgagactatatttgcagtgtgcagaggctgccaatgactgtgatttggaaccagttgcttatgagttctttactcaagcgttcattttatatgaagaagaaatcacggattcaaaggctcagatcactgcaattcacctgataattgggacccttcagcggatgaatatatttggggtggaaaatagagacaccctcactcacaagacaacagggtactcagcaaaacttctcaagaagcctgatcaatgccgagcagtatatgcgtgttcacatcttttttggactgatgaccaagatggtataatggatggtgaaagggttctcctttgtttgaagcgtgccttgagaatcgcaaatgctgctcaacagatggctagtgctacaagggggagcagtggatctgtaaccctatttattgaaattttgaacaagtacttgtacttctttgagaaaggaattccacaaatcacaaacactgtgattcaagatttgattgaattgattagaacggagaagcaaagtgataactctgtagctgatccatctacagaggcattcttttctagcactttgcggtacattgaatttcagaagcagaaaggtggaaccataggcgaaaaatatgaacaaataaagacaagttcatgactcggaacaaacacgtcacgatgactggttttgattttgttaagagaattggatcatttgtttgacatggttcagtgaaatagaaaccgccagttttagtagcatccaactaaaggatgtttacatgagctgttattctcaaatctcacggtctgagcgggtttgctcgcccattggcaacattttcaggtttagtcaggtggcaataagctgtcctttggtgagcacaggtctgtacaggattacttgtgttcgtgattggttctactgctacctgagtttcattgttgtatatttccgcccctcatacaaagcttatggattttagatttctgtaacatttggagtgcatgcctccatttctgagttctggctggacatttgatgattgtttcatagcatttgaacattttgtttaaccactactcggctatgtggcgtgttactctt

SEQ ID NO: 220068 - DNA, 3049 bp, Zea Mays
acacgcgacgaacagagctgaacacaaacacccgcatcaatccaagccgagcctcccctcggggacagcctacgcgagcgagatccaacccaagtcccgacgccgcgggcgagggcgaccagatccacctcctcagtcgtctcggatggcggcagcatcgacgtcggtacgggtgctccccgacggcggtgctgacgacgaggagcgctggctcgccgagggcatcgccggcgtccagcaaaacgctttctacatgcaccgtgccctcgattccaacaacctcaaggacgcactcaagtactcggcgcagatgctatcagagctgcgcacctcgcgactatcgccgcacaagtactacgagctttacatgagggcgtttgatgagatgaagaagctggagatgttcttcagggaggagactcgccgaggcagctgctctgtggttgatctgtacgagcttgtgcagcatgctgggaatgtcttaccgagactctatctcctgtgcacggtggggtctgtgtacatcaaatcgaaagaggctcctgctaaagatgttcttaaagatctcgttgaaatgtgccgaggcattcaacatcctcttcgtggcctttttttgagaagttacctttctcaaataagcagagacaaattgcctgatattggttctgagtacgaaggaatttcatagaaatgaacaaactctgggtcccggatgcagcatcaggggcctgcccgagaaaaggaaaagcgtgggaaggaaagaaatgaactgcgtgatctggtgattcagtgacatctggatattttactcaactgtattttctaagtcatggcattgatattattattgttttttatcttctaggtaggcaaaaaccttcatgttctaggccagattgacggcgttgaccttgatatgtacaaagaaactgttcttccaaggatattagagcaggtggttaattgtaaggatgaccttgcacaattctacctgatggactgcataatccaagtctttccagacgaataccatttacaaacattggaaacgttattgagcgcatttccccagcttcagccaagtgttgatataaaaacagtactctctcaacttatggacagattgtctaactatgctgcctcaagtcctgaactgttgccagagttcttgcaagttgaagcttttgctaagttcagtaatgctattggaaaggtgatagaagcccaacctgacatgccagttgttggagccataactctatatgtatcacttctgacctttactctccgtgtacatcctgatcggcttgattatgttgaccaagtgctgggtgcatgtgtcaagaaactttcaggcaaggcaaaacttgaagatagcagggcaacaaagcaaattgttgcacttcttagtgctcccctggaaaaatatagcaatattgttactgcattagaactttcaaactatcctcgggttatggattatcttgataatgctacaaccaaagtgatggctgtggtaataattcaaagcataatgaaaaacacaacctgcatatctacttctgacaagattgaggcactattcgatttaattaaggggctgataaaggatatggatggagctcaagatgatgagcttgatgaagaagactttaaggaggaacaaaactctgtagcgcgtctcattcacatgctgcacaatgatgatcctgaagagatgctgaagatcttatgtactgtacagaagcatatacttcagggaggccccaagcgtctaactttcactgtgccttcgttagtattctcttctcttaagctggtcaggcgattacaaggccaagatggagatgtcactggggaggatgttcctgcaactccaaagaaaatattccagatattgcatcagactattgaagcactttcttgtgttccttctccagagttagctctgagactatatttgcagtgtgcagaggctgccaatgactgtgatttggaaccagttgcttatgagttctttactcaagcgttcattttatatgaagaagaaatcacggattcaaaggctcagatcactgcaattcacctgataattgggacccttcagcggatgaatatatttggggtggaaaatagagacaccctcactcacaagacaacagggtactcagcaaaacttctcaagaagcctgatcaatgccgagcagtatatgcgtgttcacatcttttttggactgatgaccaagatggtataatggatggtgaaagggttctcctttgtttgaagcgtgccttgagaatcgcaaatgctgctcaacagatggctagtgctacaagggggagcagtggatctgtaaccctatttattgaaattttgaacaagtacttgtacttctttgagaaaggaattccacaaatcacaaacactgtgattcaagatttgattgaattgattagaacggagaagcaaagtgataactctgtagctgatccatctacagaggcattcttttctagcactttgcggtacattgaatttcagaagcagaaaggtggaaccataggcgaaaaatatgaacaaataaagacaagttcatgactcggaacaaacacgtcacgatgactggttttgattttgttaagagaattggatcatttgtttgacatggttcagtgaaatagaaaccgccagttttagtagcatccaactaaaggatgtttacatgagctgttattctcaaatctcacggtctgagcgggtttgctcgcccattggcaacattttcaggtttagtcaggtggcaataagctgtcctttggtgagcacaggtctgtacaggattacttgtgttcgtgattggttctactgctacctgagtttcattgttgtatatttccgcccctcatacaaagcttatggattttagatttctgtaacatttggagtgcatgcctccatttctgagttctggctggacatttgatgattgtttcatagcatttgaacattttgtttaaccactactcggctatgtggcgtgttactctt

SEQ ID NO: 220069 - DNA, 2929 bp, Zea Mays
ccaatctttactagtatccaactatccatggagagtacatttcgattccactctatctcctgtgcacggtggggtctgtgtacatcaaatcgaaagaggctcctgctaaagatgttcttaaagatctcgttgaaatgtgccgaggcattcaacatcctcttcgtggcctttttttgagaagttacctttctcaaataagcagagacaaattgcctgatattggttctgagtacgaaggcgatgtggaaaatattaacgatgcggttgaatttgttcttcagaatttcatagaaatgaacaaactctgggtcccggatgcagcatcaggggcctgcccgagaaaaggaaaagcgtgggaaggaaagaaatgaactgcgtgatctggtgattcagtgacatctggatattttactcaactgtattttctaagtcatggcattgatattattattgttttttatcttctaggtaggcaaaaaccttcatgttctaggccagattgacggcgttgaccttgatatgtacaaagaaactgttcttccaaggatattagagcaggtggttaattgtaaggatgaccttgcacaattctacctgatggactgcataatccaagtctttccagacgaataccatttacaaacattggaaacgttattgagcgcatttccccagcttcagccaagtgttgatataaaaacagtactctctcaacttatggacagattgtctaactatgctgcctcaagtcctgaactgttgccagagttcttgcaagttgaagcttttgctaagttcagtaatgctattggaaaggtgatagaagcccaacctgacatgccagttgttggagccataactctatatgtatcacttctgacctttactctccgtgtacatcctgatcggcttgattatgttgaccaagtgctgggtgcatgtgtcaagaaactttcaggcaaggcaaaacttgaagatagcagggcaacaaagcaaattgttgcacttcttagtgctcccctggaaaaatatagcaatattgttactgcattagaactttcaaactatcctcgggttatggattatcttgataatgctacaaccaaagtgatggctgtggtaataattcaaagcataatgaaaaacacaacctgcatatctacttctgacaagattgaggcactattcgatttaattaaggggctgataaaggatatggatggagctcaagatgatgagcttgatgaagaagactttaaggaggaacaaaactctgtagcgcgtctcattcacatgctgcacaatgatgatcctgaagagatgctgaagatcttatgtactgtacagaagcatatacttcagggaggccccaagcgtctaactttcactgtgccttcgttagtattctcttctcttaagctggtcaggcgattacaaggccaagatggagatgtcactggggaggatgttcctgcaactccaaagaaaatattccagatattgcatcaggtttttatcattattttgcatgcatctaactttggttacagtatcataacagatgcatacactgtaaatatgttttcagtttttttaaccttttgtccttggaagagcctgggaataacacatgtttttaggcattaattatatcaaaagtttctggtaaactatggttaataacacagggcacccaatttttacattcgtaattataaaaaaaacatttcataacatctccatattcttctgcacatttgtcattgttttcatttttcttgtccagactattgaagcactttcttgtgttccttctccagagttagctctgagactatatttgcagtgtgcagaggctgccaatgactgtgatttggaaccagttgcttatgagttctttactcaagcgttcattttatatgaagaagaaatcacggattcaaaggctcagatcactgcaattcacctgataattgggacccttcagcggatgaatatatttggggtggaaaatagagacaccctcactcacaagacaacagggtactcagcaaaacttctcaagaagcctgatcaatgccgagcagtatatgcgtgttcacatcttttttggactgatgaccaagatggtataatggatggtgaaagggttctcctttgtttgaagcgtgccttgagaatcgcaaatgctgctcaacagatggctagtgctacaagggggagcagtggatctgtaaccctatttattgaaattttgaacaagtacttgtacttctttgagaaaggaattccacaaatcacaaacactgtgattcaagatttgattgaattgattagaacggagaagcaaagtgataactctgtagctgatccatctacagaggcattcttttctagcactttgcggtacattgaatttcagaagcagaaaggtggaaccataggcgaaaaatatgaacaaataaagacaagttcatgactcggaacaaacacgtcacgatgactggttttgattttgttaagagaattggatcatttgtttgacatggttcagtgaaatagaaaccgccagttttagtagcatccaactaaaggatgtttacatgagctgttattctcaaatctcacggtctgagcgggtttgctcgcccattggcaacattttcaggtttagtcaggtggcaataagctgtcctttggtgagcacaggtctgtacaggattacttgtgttcgtgattggttctactgctacctgagtttcattgttgtatatttccgcccctcatacaaagcttatggattttagatttctgtaacatttggagtgcatgcctccatttctgagttctggctggacatttgatgattgtttcatagcatttgaacattttgtttaaccactactcggctatgtggcgtgttactctt

SEQ ID NO: 220070 - DNA, 1438 bp, Zea Mays
tgagatcatacactttgttagaaagcttgatgaagaagactttaaggaggaacaaaactctgtagcgcgtctcattcacatgctgcacaatgatgatcctgaagagatgctgaagatcttatgtactgtacagaagcatatacttcagggaggccccaagcgtctaactttcactgtgccttcgttagtattctcttctcttaagctggtcaggcgattacaaggccaagatggagatgtcactggggaggatgttcctgcaactccaaagaaaatattccagatattgcatcagactattgaagcactttcttgtgttccttctccagagttagctctgagactatatttgcagtgtgcagaggctgccaatgactgtgatttggaaccagttgcttatgagttctttactcaagcgttcattttatatgaagaagaaatcacggattcaaaggctcagatcactgcaattcacctgataattgggacccttcagcggatgaatatatttggggtggaaaatagagacaccctcactcacaagacaacagggtactcagcaaaacttctcaagaagcctgatcaatgccgagcagtatatgcgtgttcacatcttttttggactgatgaccaagatggtataatggatggtgaaagggttctcctttgtttgaagcgtgccttgagaatcgcaaatgctgctcaacagatggctagtgctacaagggggagcagtggatctgtaaccctatttattgaaattttgaacaagtacttgtacttctttgagaaaggaattccacaaatcacaaacactgtgattcaagatttgattgaattgattagaacggagaagcaaagtgataactctgtagctgatccatctacagaggcattcttttctagcactttgcggtacattgaatttcagaagcagaaaggtggaaccataggcgaaaaatatgaacaaataaagacaagttcatgactcggaacaaacacgtcacgatgactggttttgattttgttaagagaattggatcatttgtttgacatggttcagtgaaatagaaaccgccagttttagtagcatccaactaaaggatgtttacatgagctgttattctcaaatctcacggtctgagcgggtttgctcgcccattggcaacattttcaggtttagtcaggtggcaataagctgtcctttggtgagcacaggtctgtacaggattacttgtgttcgtgattggttctactgctacctgagtttcattgttgtatatttccgcccctcatacaaagcttatggattttagatttctgtaacatttggagtgcatgcctccatttctgagttctggctggacatttgatgattgtttcatagcatttgaacattttgtttaaccactactcggctatgtggcgtgttactctt

SEQ ID NO: 220071 - DNA, 791 bp, Zea Mays
tgttagaaagggttctcctttgtttgaagcgtgccttgagaatcgcaaatgctgctcaacagatggctagtgctacaagggggagcagtggatctgtaaccctatttattgaaattttgaacaagtacttgtacttctttgagaaaggaattccacaaatcacaaacactgtgattcaagatttgattgaattgattagaacggagaagcaaagtgataactctgtagctgatccatctacagaggcattcttttctagcactttgcggtacattgaatttcagaagcagaaaggtggaaccataggcgaaaaatatgaacaaataaagacaagttcatgactcggaacaaacacgtcacgatgactggttttgattttgttaagagaattggatcatttgtttgacatggttcagtgaaatagaaaccgccagttttagtagcatccaactaaaggatgtttacatgagctgttattctcaaatctcacggtctgagcgggtttgctcgcccattggcaacattttcaggtttagtcaggtggcaataagctgtcctttggtgagcacaggtctgtacaggattacttgtgttcgtgattggttctactgctacctgagtttcattgttgtatatttccgcccctcatacaaagcttatggattttagatttctgtaacatttggagtgcatgcctccatttctgagttctggctggacatttgatgattgtttcatagcatttgaacattttgtttaaccactactcggctatgtggcgtgttactctt

SEQ ID NO: 220072 - DNA, 807 bp, Zea Mays
atgagctcaagcctatggaaatccaaggttctcctttgtttgaagcgtgccttgagaatcgcaaatgctgctcaacagatggctagtgctacaagggggagcagtggatctgtaaccctatttattgaaattttgaacaagtacttgtacttctttgagaaaggaattccacaaatcacaaacactgtgattcaagatttgattgaattgattagaacggagaagcaaagtgataactctgtagctgatccatctacagaggcattcttttctagcactttgcggtacattgaatttcagaagcagaaaggtggaaccataggcgaaaaatatgaacaaataaagacaagttcatgactcggaacaaacacgtcacgatgactggttttgattttgttaagagaattggatcatttgtttgacatggttcagtgaaatagaaaccgccagttttagtagcatccaactaaaggatgtttacatgagctgttattctcaaatctcacggtctgagcgggtttgctcgcccattggcaacattttcaggtttagtcaggtggcaataagctgtcctttggtgagcacaggtctgtacaggattacttgtgttcgtgattggttctactgctacctgagtttcattgttgtatatttccgcccctcatacaaagcttatggattttagatttctgtaacatttggagtgcatgcctccatttctgagttctggctggacatttgatgattgtttcatagcatttgaacattttgtttaaccactactcggctatgtggcgtgttactctt

SEQ ID NO: 220073 - DNA, 2259 bp, Zea Mays
atcgagtcacctggtggaacgttcgaagcagtctctccatatttacgggaacatagagaataatattttttctggaccggtgcctgcgagcttgcttaacataccaaacttcaaaaaggacgggaatccattcaataccacatctgcatctccgccttcaacaggacccgacccaactctaacaccagcacctaacacttcaaattcaacgcccccagcaccagcacccccatctccttcaagagctactcccccgcctaaaacaacctcaaattatcctgaaggatcaactacccgagacagcacttcatcatctaggaaacacaatacatcaaccctcaagattgttggttttgttcttgctggagtagtgctgtttattgttatagtcttcctagtattattttgtctatccaagtaccaagggagacagtcgagatacgatcgtaatagaagtcagctgggaggggtgcatcatagggttgaaccgcaaatcaagccacctccagtgcaacaaagcaatgatattaaagaaggcgagacaccggacaggagggtccatcaactaagttcatctgcagcagctctcccaaagaagtctcctgaaaaccaaaaggagcacataattaattttgatcaaacagattcagatctgtttcatgtttctctaccacctcctcctccaccaccgccattaaccccaattgaaagagttgctgcaaatctcattgttccactagaaaagcgatatattcctccaccaaagacaagtagctcgacttcttccgcgtcattctctgttgcatctcttcagcaatatacagatagtctcagagaggagaatgtgatcagagagagtagattaggaagggtttacctagcagagcttcctgatggcaagttattggaggttttaaagattggcaatgctaatggaagaatatcagtagatgacttcctagaacagattgaatgtatctcagatatcaagcatcctaacattcttgagttagtcggatactgtgctgaatatgggcagaggttactcgtatacgaacacttcagcagaacgacactggatgatgcaattcatgatggaaaggatactgaaagtgcactgtcatggaatgcccgcctccaggttgctcttggttcaggaaaagccttagagtatctccatcatagcttccattctccaattgtgcaccagaactttgaaccagctaatgtgctccttgataaaaagttctcagtgtgtgttgctgaatgtggactggcagaattgatgacatcaagttcagtcactcagctgtcaggtcggatgcgtgcatcactggactacgaagcacctgaattccaggattatggggtcatttcagaaaggggtgatgtctacagctttggtgtagtgatgctggaacttcttacggggcgtaaaccatatgatagttcacgcccgcgtcatgagcaacatcttgttagatgggccagttggcagcttcatgacattgaatccctatccaagatggtggacccacctatacgtggacatgttctgagaagcattgtcacattttgctgacataatcagccgctgtatccagcggcagccagagttcaggccaccaatgtctgatattgtacaagacctaactagacttgtaaatgctactggtgaggaatcagagtaaagaaaaaccatggggatatacaatacaaccctcgtgaccaagttgcgtgttgtacaaaattttgggaagataattgtcttgccacaatctgaggacaatattgtaaggatgtattttcttcagagatcattccacactaactcatgtcaaattggagtttcatttacacatggctggagagtggaggtacagcaatttgtgcacctggtcgttgatcatcaaatccatctttttgcatacatgatattgtacatagcaaggccctgaattcttgtaactaacagtcaggagttcgataaattggttagtctaaagctagtcatttaattattcgcttgttcatcatgttggatggatctactctcagcagtcgaagaaaaattgttcggccatttacttcttgtagagaatagagatgatttggttactgctgtaaaacccagttgtattctcctttcagctcttgcctgttgaaatttgaatgtttatctgtggatttattcccgcaatgctgaaaaaaacatgtagcgtgaattttgttcatagtggatatgtatgaagatgtaaa

SEQ ID NO: 220074 - DNA, 2403 bp, Zea Mays
atctagaagggtaggcttagtgtagtggtgagagctgtctcatcgagtcacctggtggaacgttcgaagcagtctctccatatttacgggtaaaggtttgcctcagtttatcccttccccatacaccactcgtatggaagccttcggcactagattttccctttaatgatattttaataaggttttcttcattggagaaagtaacacatgtttcatttaccatgatcttgcaaatgaacacttagtcaacactaaggaagcgttaaacagtttatgtcaagctcagcattcatgcagtacagccgctctactcttatacttgaattgaattactgaaaccaaactctgacctattatattgaaatattactttgatcgttaactgtttacattttttaatatactttcctgacttcggacaggaacatagagaataatattttttctggaccggtgcctgcgagcttgcttaacataccaaacttcaaaaaggacgggaatccattcaataccacatctgcatctccgccttcaacaggacccgacccaactctaacaccagcacctaacacttcaaattcaacgcccccagcaccagcacccccatctccttcaagagctactcccccgcctaaaacaacctcaaattatcctgaaggatcaactacccgagacagcacttcatcatctaggaaacacaatacatcaaccctcaagattgttggttttgttcttgctggagtagtgctgtttattgttatagtcttcctagtattattttgtctatccaagtaccaagggagacagtcgagatacgatcgtaatagaagtcagctgggaggggtgcatcatagggttgaaccgcaaatcaagccacctccagtgcaacaaagcaatgatattaaagaaggcgagacaccggacaggagggtccatcaactaagttcatctgcagcagcaatatacagatagtctcagagaggagaatgtgatcagagagagtagattaggaagggtttacctagcagagcttcctgatggcaagttattggaggttttaaagattggcaatgctaatggaagaatatcagtagatgacttcctagaacagattgaatgtatctcagatatcaagcatcctaacattcttgagttagtcggatactgtgctgaatatgggcagaggttactcgtatacgaacacttcagcagaacgacactggatgatgcaattcatgatggaaaggatactgaaagtgcactgtcatggaatgcccgcctccaggttgctcttggttcaggaaaagccttagagtatctccatcatagcttccattctccaattgtgcaccagaactttgaaccagctaatgtgctccttgataaaaagttctcagtgtgtgttgctgaatgtggactggcagaattgatgacatcaagttcagtcactcagctgtcaggtcggatgcgtgcatcactggactacgaagcacctgaattccaggattatggggtcatttcagaaaggggtgatgtctacagctttggtgtagtgatgctggaacttcttacggggcgtaaaccatatgatagttcacgcccgcgtcatgagcaacatcttgttagatgggccagttggcagcttcatgacattgaatccctatccaagatggtggacccacctatacgtggacatgttctgagaagcattgtcacattttgctgacataatcagccgctgtatccagcggcagccagagttcaggccaccaatgtctgatattgtacaagacctaactagacttgtaaatgctactggtgaggaatcagagtaaagaaaaaccatggggatatacaatacaaccctcgtgaccaagttgcgtgttgtacaaaattttgggaagataattgtcttgccacaatctgaggacaatattgtaaggatgtattttcttcagagatcattccacactaactcatgtcaaattggagtttcatttacacatggctggagagtggaggtacagcaatttgtgcacctggtcgttgatcatcaaatccatctttttgcatacatgatattgtacatagcaaggccctgaattcttgtaactaacagtcaggagttcgataaattggttagtctaaagctagtcatttaattattcgcttgttcatcatgttggatggatctactctcagcagtcgaagaaaaattgttcggccatttacttcttgtagagaatagagatgatttggttactgctgtaaaacccagttgtattctcctttcagctcttgcctgttgaaatttgaatgtttatctgtggatttattcccgcaatgctgaaaaaaacatgtagcgtgaattttgttcatagtggatatgtatgaagatgtaaa

SEQ ID NO: 220075 - DNA, 2513 bp, Zea Mays
tactttgcagagtcttttcctctctgctaatcaaattactggaagcataccaagttcactgtcaaaactcgaaaacttatcagccatgtcagtcaacggcaaccatctaagtggaggcctaccagacacttttgattcactcaatagacttgtaaatttggatatttcttcgaataacttgactggcgtgttaccgtcgtcaatgaaaagtttggcatctttaacttcattgcacatgcaagacaatcaactgtctgggacccttaacgttttgcaaggtctcccactgaaagacttgaacatagagaataatattttttctggaccggtgcctgcgagcttgcttaacataccaaacttcaaaaaggacgggaatccattcaataccacatctgcatctccgccttcaacaggacccgacccaactctaacaccagcacctaacacttcaaattcaacgcccccagcaccagcacccccatctccttcaagagctactcccccgcctaaaacaacctcaaattatcctgaaggatcaactacccgagacagcacttcatcatctaggaaacacaatacatcaaccctcaagattgttggttttgttcttgctggagtagtgctgtttattgttatagtcttcctagtattattttgtctatccaagtaccaagggagacagtcgagatacgatcgtaatagaagtcagctgggaggggtgcatcatagggttgaaccgcaaatcaagccacctccagtgcaacaaagcaatgatattaaagaagttcaggcgagacaccggacaggagggtccatcaactaagttcatctgcagcagctctcccaaagaagtctcctgaaaaccaaaaggagcacataattaattttgatcaaacagattcagatctgtttcatgtttctctaccacctcctcctccaccaccgccattaaccccaattgaaagagttgctgcaaatctcattgttccactagaaaagcgatatattcctccaccaaagacaagtagctcgacttcttccgcgtcattctctgttgcatctcttcagcaatatacagatagtctcagagaggagaatgtgatcagagagagtagattaggaagggtttacctagcagagcttcctgatggcaagttattggaggttttaaagattggcaatgctaatggaagaatatcagtagatgacttcctagaacagattgaatgtatctcagatatcaagcatcctaacattcttgagttagtcggatactgtgctgaatatgggcagaggttactcgtatacgaacacttcagcagaacgacactggatgatgcaattcatgatggaaaggatactgaaagtgcactgtcatggaatgcccgcctccaggttgctcttggttcaggaaaagccttagagtatctccatcatagcttccattctccaattgtgcaccagaactttgaaccagctaatgtgctccttgataaaaagttctcagtgtgtgttgctgaatgtggactggcagaattgatgacatcaagttcagtcactcagctgtcaggtcggatgcgtgcatcactggactacgaagcacctgaattccaggattatggggtcatttcagaaaggggtgatgtctacagctttggtgtagtgatgctggaacttcttacggggcgtaaaccatatgatagttcacgcccgcgtcatgagcaacatcttgttagatgggccagttggcagcttcatgacattgaatccctatccaagatggtggacccacctatacgtggacatgttctgagaagcattgtcacattttgctgacataatcagccgctgtatccagcggcagccagagttcaggccaccaatgtctgatattgtacaagacctaactagacttgtaaatgctactggtgaggaatcagagtaaagaaaaaccatggggatatacaatacaaccctcgtgaccaagttgcgtgttgtacaaaattttgggaagataattgtcttgccacaatctgaggacaatattgtaaggatgtattttcttcagagatcattccacactaactcatgtcaaattggagtttcatttacacatggctggagagtggaggtacagcaatttgtgcacctggtcgttgatcatcaaatccatctttttgcatacatgatattgtacatagcaaggccctgaattcttgtaactaacagtcaggagttcgataaattggttagtctaaagctagtcatttaattattcgcttgttcatcatgttggatggatctactctcagcagtcgaagaaaaattgttcggccatttacttcttgtagagaatagagatgatttggttactgctgtaaaacccagttgtattctcctttcagctcttgcctgttgaaatttgaatgtttatctgtggatttattcccgcaatgctgaaaaaaacatgtagcgtgaattttgttcatagtggatatgtatgaagatgtaaa

SEQ ID NO: 220076 - DNA, 2747 bp, Zea Mays
ctcgcatgttggatccgtggatattgatagcatgcagacgcaggagaaaatcatgtctttgcaataaatgggctgtacatttcactgggatcaccacctcttcctggatggactggagatggtggagacccttgtggtgagggctggcagggtgttctgtgtaccggctcttctataactggaataaccatgaatgctgcaaacttgggaggacagctgggaagtttaggaaacttcaatgccatcaccagcattttcctctctgctaatcaaattactggaagcataccaagttcactgtcaaaactcgaaaacttatcagccatgtcagtcaacggcaaccatctaagtggaggcctaccagacacttttgattcactcaatagacttgtaaatttggatatttcttcgaataacttgactggcgtgttaccgtcgtcaatgaaaagtttggcatctttaacttcattgcacatgcaagacaatcaactgtctgggacccttaacgttttgcaaggtctcccactgaaagacttgaacatagagaataatattttttctggaccggtgcctgcgagcttgcttaacataccaaacttcaaaaaggacgggaatccattcaataccacatctgcatctccgccttcaacaggacccgacccaactctaacaccagcacctaacacttcaaattcaacgcccccagcaccagcacccccatctccttcaagagctactcccccgcctaaaacaacctcaaattatcctgaaggatcaactacccgagacagcacttcatcatctaggaaacacaatacatcaaccctcaagattgttggttttgttcttgctggagtagtgctgtttattgttatagtcttcctagtattattttgtctatccaagtaccaagggagacagtcgagatacgatcgtaatagaagtcagctgggaggggtgcatcatagggttgaaccgcaaatcaagccacctccagtgcaacaaagcaatgatattaaagaaggcgagacaccggacaggagggtccatcaactaagttcatctgcagcagctctcccaaagaagtctcctgaaaaccaaaaggagcacataattaattttgatcaaacagattcagatctgtttcatgtttctctaccacctcctcctccaccaccgccattaaccccaattgaaagagttgctgcaaatctcattgttccactagaaaagcgatatattcctccaccaaagacaagtagctcgacttcttccgcgtcattctctgttgcatctcttcagcaatatacagatagtctcagagaggagaatgtgatcagagagagtagattaggaagggtttacctagcagagcttcctgatggcaagttattggaggttttaaagattggcaatgctaatggaagaatatcagtagatgacttcctagaacagattgaatgtatctcagatatcaagcatcctaacattcttgagttagtcggatactgtgctgaatatgggcagaggttactcgtatacgaacacttcagcagaacgacactggatgatgcaattcatgatggaaaggatactgaaagtgcactgtcatggaatgcccgcctccaggttgctcttggttcaggaaaagccttagagtatctccatcatagcttccattctccaattgtgcaccagaactttgaaccagctaatgtgctccttgataaaaagttctcagtgtgtgttgctgaatgtggactggcagaattgatgacatcaagttcagtcactcagctgtcaggtcggatgcgtgcatcactggactacgaagcacctgaattccaggattatggggtcatttcagaaaggggtgatgtctacagctttggtgtagtgatgctggaacttcttacggggcgtaaaccatatgatagttcacgcccgcgtcatgagcaacatcttgttagatgggccagttggcagcttcatgacattgaatccctatccaagatggtggacccacctatacgtggacatgttctgagaagcattgtcacattttgctgacataatcagccgctgtatccagcggcagccagagttcaggccaccaatgtctgatattgtacaagacctaactagacttgtaaatgctactggtgaggaatcagagtaaagaaaaaccatggggatatacaatacaaccctcgtgaccaagttgcgtgttgtacaaaattttgggaagataattgtcttgccacaatctgaggacaatattgtaaggatgtattttcttcagagatcattccacactaactcatgtcaaattggagtttcatttacacatggctggagagtggaggtacagcaatttgtgcacctggtcgttgatcatcaaatccatctttttgcatacatgatattgtacatagcaaggccctgaattcttgtaactaacagtcaggagttcgataaattggttagtctaaagctagtcatttaattattcgcttgttcatcatgttggatggatctactctcagcagtcgaagaaaaattgttcggccatttacttcttgtagagaatagagatgatttggttactgctgtaaaacccagttgtattctcctttcagctcttgcctgttgaaatttgaatgtttatctgtggatttattcccgcaatgctgaaaaaaacatgtagcgtgaattttgttcatagtggatatgtatgaagatgtaaa

SEQ ID NO: 220077 - DNA, 2730 bp, Zea Mays
gccgaggctcgtgcgcgcggtcaccgacgctgccgacgtctttgcaataaatgggctgtacatttcactgggatcaccacctcttcctggatggactggagatggtggagacccttgtggtgagggctggcagggtgttctgtgtaccggctcttctataactggaataaccatgaatgctgcaaacttgggaggacagctgggaagtttaggaaacttcaatgccatcaccagcatagagcttaacaacaataatattggtggaagcataccagaggacctacctgttactttgcagagtcttttcctctctgctaatcaaattactggaagcataccaagttcactgtcaaaactcgaaaacttatcagccatgtcagtcaacggcaaccatctaagtggaggcctaccagacacttttgattcactcaatagacttgtaaatttggatatttcttcgaataacttgactggcgtgttaccgtcgtcaatgaaaagtttggcatctttaacttcattgaacatagagaataatattttttctggaccggtgcctgcgagcttgcttaacataccaaacttcaaaaaggacgggaatccattcaataccacatctgcatctccgccttcaacaggacccgacccaactctaacaccagcacctaacacttcaaattcaacgcccccagcaccagcacccccatctccttcaagagctactcccccgcctaaaacaacctcaaattatcctgaaggatcaactacccgagacagcacttcatcatctaggaaacacaatacatcaaccctcaagattgttggttttgttcttgctggagtagtgctgtttattgttatagtcttcctagtattattttgtctatccaagtaccaagggagacagtcgagatacgatcgtaatagaagtcagctgggaggggtgcatcatagggttgaaccgcaaatcaagccacctccagtgcaacaaagcaatgatattaaagaaggcgagacaccggacaggagggtccatcaactaagttcatctgcagcagctctcccaaagaagtctcctgaaaaccaaaaggagcacataattaattttgatcaaacagattcagatctgtttcatgtttctctaccacctcctcctccaccaccgccattaaccccaattgaaagagttgctgcaaatctcattgttccactagaaaagcgatatattcctccaccaaagacaagtagctcgacttcttccgcgtcattctctgttgcatctcttcagcaatatacagatagtctcagagaggagaatgtgatcagagagagtagattaggaagggtttacctagcagagcttcctgatggcaagttattggaggttttaaagattggcaatgctaatggaagaatatcagtagatgacttcctagaacagattgaatgtatctcagatatcaagcatcctaacattcttgagttagtcggatactgtgctgaatatgggcagaggttactcgtatacgaacacttcagcagaacgacactggatgatgcaattcatgatggaaaggatactgaaagtgcactgtcatggaatgcccgcctccaggttgctcttggttcaggaaaagccttagagtatctccatcatagcttccattctccaattgtgcaccagaactttgaaccagctaatgtgctccttgataaaaagttctcagtgtgtgttgctgaatgtggactggcagaattgatgacatcaagttcagtcactcagctgtcaggtcggatgcgtgcatcactggactacgaagcacctgaattccaggattatggggtcatttcagaaaggggtgatgtctacagctttggtgtagtgatgctggaacttcttacggggcgtaaaccatatgatagttcacgcccgcgtcatgagcaacatcttgttagatgggccagttggcagcttcatgacattgaatccctatccaagatggtggacccacctatacgtggacatgttctgagaagcattgtcacattttgctgacataatcagccgctgtatccagcggcagccagagttcaggccaccaatgtctgatattgtacaagacctaactagacttgtaaatgctactggtgaggaatcagagtaaagaaaaaccatggggatatacaatacaaccctcgtgaccaagttgcgtgttgtacaaaattttgggaagataattgtcttgccacaatctgaggacaatattgtaaggatgtattttcttcagagatcattccacactaactcatgtcaaattggagtttcatttacacatggctggagagtggaggtacagcaatttgtgcacctggtcgttgatcatcaaatccatctttttgcatacatgatattgtacatagcaaggccctgaattcttgtaactaacagtcaggagttcgataaattggttagtctaaagctagtcatttaattattcgcttgttcatcatgttggatggatctactctcagcagtcgaagaaaaattgttcggccatttacttcttgtagagaatagagatgatttggttactgctgtaaaacccagttgtattctcctttcagctcttgcctgttgaaatttgaatgtttatctgtggatttattcccgcaatgctgaaaaaaacatgtagcgtgaattttgttcatagtggatatgtatgaagatgtaaa

SEQ ID NO: 220078 - DNA, 3610 bp, Zea Mays
gccgaggctcgtgcgcgcggtcaccgacgctgccgacgtctttgcaataaatgggctgtacatttcactgggatcaccacctcttcctggatggactggagatggtggagacccttgtggtgagggctggcagggtgttctgtgtaccggctcttctataactggaataaccatgaatgctgcaaacttgggaggacagctgggaagtttaggaaacttcaatgccatcaccagcatagagcttaacaacaataatattggtggaagcataccagaggacctacctgttactttgcagatttcctctctgctaatcaaattactggaagcataccaagttcactgtcaaaactcgaaaacttatcagccatgtcagtcaacggcaaccatctaagtggaggcctaccagacacttttgattcactcaatagacttgtaaatttggatatttcttcgaataacttgactggcgtgttaccgtcgtcaatgaaaagtttggcatctttaacttcattgcacatgcaagacaatcaactgtctgggacccttaacgttttgcaaggtctcccactgaaagacttgtaatacctcaatctcatatctcttcttccatagttgttctgttacatttgtattgataattgaaggcatgccatttatcattatcttctcatttacataacttagcctatatgttgactttccctatggtacatggcattgcaatacaatgtgccgtcaatttccattgttgatttccaaagagtgtaacatttcatattggttccagacactacaagtttgacttgaacattagtttaacagatcatgattggctgatgtctacaatccagaagcttgtgctcggttgctaaaggaattagcatttttaacaaactatctcttgctgccttctcgtagtatgttgcacttgcacttctctcatgtgccgctcactgatatctggaggcaatgatatctagaagggtaggcttagtgtagtggtgagagctgtctcatcgagtcacctggtggaacgttcgaagcagtctctccatatttacgggtaaaggtttgcctcagtttatcccttccccatacaccactcgtatggaagccttcggcactagattttccctttaatgatattttaataaggttttcttcattggagaaagtaacacatgtttcatttaccatgatcttgcaaatgaacacttagtcaacactaaggaagcgttaaacagtttatgtcaagctcagcattcatgcagtacagccgctctactcttatacttgaattgaattactgaaaccaaactctgacctattatattgaaatattactttgatcgttaactgtttacattttttaatatactttcctgacttcggacaggaacatagagaataatattttttctggaccggtgcctgcgagcttgcttaacataccaaacttcaaaaaggacgggaatccattcaataccacatctgcatctccgccttcaacaggacccgacccaactctaacaccagcacctaacacttcaaattcaacgcccccagcaccagcacccccatctccttcaagagctactcccccgcctaaaacaacctcaaattatcctgaaggatcaactacccgagacagcacttcatcatctaggaaacacaatacatcaaccctcaagattgttggttttgttcttgctggagtagtgctgtttattgttatagtcttcctagtattattttgtctatccaagtaccaagggagacagtcgagatacgatcgtaatagaagtcagctgggaggggtgcatcatagggttgaaccgcaaatcaagccacctccagtgcaacaaagcaatgatattaaagaaggcgagacaccggacaggagggtccatcaactaagttcatctgcagcagctctcccaaagaagtctcctgaaaaccaaaaggagcacataattaattttgatcaaacagattcagatctgtttcatgtttctctaccacctcctcctccaccaccgccattaaccccaattgaaagagttgctgcaaatctcattgttccactagaaaagcgatatattcctccaccaaagacaagtagctcgacttcttccgcgtcattctctgttgcatctcttcagcaatatacagatagtctcagagaggagaatgtgatcagagagagtagattaggaagggtttacctagcagagcttcctgatggcaagttattggaggttttaaagattggcaatgctaatggaagaatatcagtagatgacttcctagaacagattgaatgtatctcagatatcaagcatcctaacattcttgagttagtcggatactgtgctgaatatgggcagaggttactcgtatacgaacacttcagcagaacgacactggatgatgcaattcatgatggaaaggatactgaaagtgcactgtcatggaatgcccgcctccaggttgctcttggttcaggaaaagccttagagtatctccatcatagcttccattctccaattgtgcaccagaactttgaaccagctaatgtgctccttgataaaaagttctcagtgtgtgttgctgaatgtggactggcagaattgatgacatcaagttcagtcactcagctgtcaggtcggatgcgtgcatcactggactacgaagcacctgaattccaggattatggggtcatttcagaaaggggtgatgtctacagctttggtgtagtgatgctggaacttcttacggggcgtaaaccatatgatagttcacgcccgcgtcatgagcaacatcttgttagatgggccagttggcagcttcatgacattgaatccctatccaagatggtggacccacctatacgtggacatgttctgagaagcattgtcacattttgctgacataatcagccgctgtatccagcggcagccagagttcaggccaccaatgtctgatattgtacaagacctaactagacttgtaaatgctactggtgaggaatcagagtaaagaaaaaccatggggatatacaatacaaccctcgtgaccaagttgcgtgttgtacaaaattttgggaagataattgtcttgccacaatctgaggacaatattgtaaggatgtattttcttcagagatcattccacactaactcatgtcaaattggagtttcatttacacatggctggagagtggaggtacagcaatttgtgcacctggtcgttgatcatcaaatccatctttttgcatacatgatattgtacatagcaaggccctgaattcttgtaactaacagtcaggagttcgataaattggttagtctaaagctagtcatttaattattcgcttgttcatcatgttggatggatctactctcagcagtcgaagaaaaattgttcggccatttacttcttgtagagaatagagatgatttggttactgctgtaaaacccagttgtattctcctttcagctcttgcctgttgaaatttgaatgtttatctgtggatttattcccgcaatgctgaaaaaaacatgtagcgtgaattttgttcatagtggatatgtatgaagatgtaaa

SEQ ID NO: 220079 - DNA, 3548 bp, Zea Mays
gccgaggctcgtgcgcgcggtcaccgacgctgccgacgtctttgcaataaatgggctgtacatttcactgggatcaccacctcttcctggatggactggagatggtggagacccttgtggtgagggctggcagggtgttctgtgtaccggctcttctataactggaataaccatgaatgctgcaaacttgggaggacagctgggaagtttaggaaacttcaatgccatcaccagcattttcctctctgctaatcaaattactggaagcataccaagttcactgtcaaaactcgaaaacttatcagccatgtcagtcaacggcaaccatctaagtggaggcctaccagacacttttgattcactcaatagacttgtaaatttggatatttcttcgaataacttgactggcgtgttaccgtcgtcaatgaaaagtttggcatctttaacttcattgcacatgcaagacaatcaactgtctgggacccttaacgttttgcaaggtctcccactgaaagacttgtaatacctcaatctcatatctcttcttccatagttgttctgttacatttgtattgataattgaaggcatgccatttatcattatcttctcatttacataacttagcctatatgttgactttccctatggtacatggcattgcaatacaatgtgccgtcaatttccattgttgatttccaaagagtgtaacatttcatattggttccagacactacaagtttgacttgaacattagtttaacagatcatgattggctgatgtctacaatccagaagcttgtgctcggttgctaaaggaattagcatttttaacaaactatctcttgctgccttctcgtagtatgttgcacttgcacttctctcatgtgccgctcactgatatctggaggcaatgatatctagaagggtaggcttagtgtagtggtgagagctgtctcatcgagtcacctggtggaacgttcgaagcagtctctccatatttacgggtaaaggtttgcctcagtttatcccttccccatacaccactcgtatggaagccttcggcactagattttccctttaatgatattttaataaggttttcttcattggagaaagtaacacatgtttcatttaccatgatcttgcaaatgaacacttagtcaacactaaggaagcgttaaacagtttatgtcaagctcagcattcatgcagtacagccgctctactcttatacttgaattgaattactgaaaccaaactctgacctattatattgaaatattactttgatcgttaactgtttacattttttaatatactttcctgacttcggacaggaacatagagaataatattttttctggaccggtgcctgcgagcttgcttaacataccaaacttcaaaaaggacgggaatccattcaataccacatctgcatctccgccttcaacaggacccgacccaactctaacaccagcacctaacacttcaaattcaacgcccccagcaccagcacccccatctccttcaagagctactcccccgcctaaaacaacctcaaattatcctgaaggatcaactacccgagacagcacttcatcatctaggaaacacaatacatcaaccctcaagattgttggttttgttcttgctggagtagtgctgtttattgttatagtcttcctagtattattttgtctatccaagtaccaagggagacagtcgagatacgatcgtaatagaagtcagctgggaggggtgcatcatagggttgaaccgcaaatcaagccacctccagtgcaacaaagcaatgatattaaagaaggcgagacaccggacaggagggtccatcaactaagttcatctgcagcagctctcccaaagaagtctcctgaaaaccaaaaggagcacataattaattttgatcaaacagattcagatctgtttcatgtttctctaccacctcctcctccaccaccgccattaaccccaattgaaagagttgctgcaaatctcattgttccactagaaaagcgatatattcctccaccaaagacaagtagctcgacttcttccgcgtcattctctgttgcatctcttcagcaatatacagatagtctcagagaggagaatgtgatcagagagagtagattaggaagggtttacctagcagagcttcctgatggcaagttattggaggttttaaagattggcaatgctaatggaagaatatcagtagatgacttcctagaacagattgaatgtatctcagatatcaagcatcctaacattcttgagttagtcggatactgtgctgaatatgggcagaggttactcgtatacgaacacttcagcagaacgacactggatgatgcaattcatgatggaaaggatactgaaagtgcactgtcatggaatgcccgcctccaggttgctcttggttcaggaaaagccttagagtatctccatcatagcttccattctccaattgtgcaccagaactttgaaccagctaatgtgctccttgataaaaagttctcagtgtgtgttgctgaatgtggactggcagaattgatgacatcaagttcagtcactcagctgtcaggtcggatgcgtgcatcactggactacgaagcacctgaattccaggattatggggtcatttcagaaaggggtgatgtctacagctttggtgtagtgatgctggaacttcttacggggcgtaaaccatatgatagttcacgcccgcgtcatgagcaacatcttgttagatgggccagttggcagcttcatgacattgaatccctatccaagatggtggacccacctatacgtggacatgttctgagaagcattgtcacattttgctgacataatcagccgctgtatccagcggcagccagagttcaggccaccaatgtctgatattgtacaagacctaactagacttgtaaatgctactggtgaggaatcagagtaaagaaaaaccatggggatatacaatacaaccctcgtgaccaagttgcgtgttgtacaaaattttgggaagataattgtcttgccacaatctgaggacaatattgtaaggatgtattttcttcagagatcattccacactaactcatgtcaaattggagtttcatttacacatggctggagagtggaggtacagcaatttgtgcacctggtcgttgatcatcaaatccatctttttgcatacatgatattgtacatagcaaggccctgaattcttgtaactaacagtcaggagttcgataaattggttagtctaaagctagtcatttaattattcgcttgttcatcatgttggatggatctactctcagcagtcgaagaaaaattgttcggccatttacttcttgtagagaatagagatgatttggttactgctgtaaaacccagttgtattctcctttcagctcttgcctgttgaaatttgaatgtttatctgtggatttattcccgcaatgctgaaaaaaacatgtagcgtgaattttgttcatagtggatatgtatgaagatgtaaa

SEQ ID NO: 220080 - DNA, 3615 bp, Zea Mays
cgccgaggctcgtgcgcgcggtcaccgacgctgccgacgtctttgcaataaatgggctgtacatttcactgggatcaccacctcttcctggatggactggagatggtggagacccttgtggtgagggctggcagggtgttctgtgtaccggctcttctataactggaataaccatgaatgctgcaaacttgggaggacagctgggaagtttaggaaacttcaatgccatcaccagcatagagcttaacaacaataatattggtggaagcataccagaggacctacctgttactttgcagagtcttttcctctctgctaatcaaattactggaagcataccaagttcactgtcaaaactcgaaaacttatcagccatgtcagtcaacggcaaccatctaagtggaggcctaccagacacttttgattcactcaatagacttgtaaatttggatatttcttcgaataacttgactggcgtgttaccgtcgtcaatgaaaagtttggcatctttaacttcattgcacatgcaagacaatcaactgtctgggacccttaacgttttgcaaggtctcccactgaaagacttgtaatacctcaatctcatatctcttcttccatagttgttctgttacatttgtattgataattgaaggcatgccatttatcattatcttctcatttacataacttagcctatatgttgactttccctatggtacatggcattgcaatacaatgtgccgtcaatttccattgttgatttccaaagagtgtaacatttcatattggttccagacactacaagtttgacttgaacattagtttaacagatcatgattggctgatgtctacaatccagaagcttgtgctcggttgctaaaggaattagcatttttaacaaactatctcttgctgccttctcgtagtatgttgcacttgcacttctctcatgtgccgctcactgatatctggaggcaatgatatctagaagggtaggcttagtgtagtggtgagagctgtctcatcgagtcacctggtggaacgttcgaagcagtctctccatatttacgggtaaaggtttgcctcagtttatcccttccccatacaccactcgtatggaagccttcggcactagattttccctttaatgatattttaataaggttttcttcattggagaaagtaacacatgtttcatttaccatgatcttgcaaatgaacacttagtcaacactaaggaagcgttaaacagtttatgtcaagctcagcattcatgcagtacagccgctctactcttatacttgaattgaattactgaaaccaaactctgacctattatattgaaatattactttgatcgttaactgtttacattttttaatatactttcctgacttcggacaggaacatagagaataatattttttctggaccggtgcctgcgagcttgcttaacataccaaacttcaaaaaggacgggaatccattcaataccacatctgcatctccgccttcaacaggacccgacccaactctaacaccagcacctaacacttcaaattcaacgcccccagcaccagcacccccatctccttcaagagctactcccccgcctaaaacaacctcaaattatcctgaaggatcaactacccgagacagcacttcatcatctaggaaacacaatacatcaaccctcaagattgttggttttgttcttgctggagtagtgctgtttattgttatagtcttcctagtattattttgtctatccaagtaccaagggagacagtcgagatacgatcgtaatagaagtcagctgggaggggtgcatcatagggttgaaccgcaaatcaagccacctccagtgcaacaaagcaatgatattaaagaaggcgagacaccggacaggagggtccatcaactaagttcatctgcagcagctctcccaaagaagtctcctgaaaaccaaaaggagcacataattaattttgatcaaacagattcagatctgtttcatgtttctctaccacctcctcctccaccaccgccattaaccccaattgaaagagttgctgcaaatctcattgttccactagaaaagcgatatattcctccaccaaagacaagtagctcgacttcttccgcgtcattctctgttgcatctcttcagcaatatacagatagtctcagagaggagaatgtgatcagagagagtagattaggaagggtttacctagcagagcttcctgatggcaagttattggaggttttaaagattggcaatgctaatggaagaatatcagtagatgacttcctagaacagattgaatgtatctcagatatcaagcatcctaacattcttgagttagtcggatactgtgctgaatatgggcagaggttactcgtatacgaacacttcagcagaacgacactggatgatgcaattcatgatggaaaggatactgaaagtgcactgtcatggaatgcccgcctccaggttgctcttggttcaggaaaagccttagagtatctccatcatagcttccattctccaattgtgcaccagaactttgaaccagctaatgtgctccttgataaaaagttctcagtgtgtgttgctgaatgtggactggcagaattgatgacatcaagttcagtcactcagctgtcaggtcggatgcgtgcatcactggactacgaagcacctgaattccaggattatggggtcatttcagaaaggggtgatgtctacagctttggtgtagtgatgctggaacttcttacggggcgtaaaccatatgatagttcacgcccgcgtcatgagcaacatcttgttagatgggccagttggcagcttcatgacattgaatccctatccaagatggtggacccacctatacgtggacatgttctgagaagcattgtcacattttgctgacataatcagccgctgtatccagcggcagccagagttcaggccaccaatgtctgatattgtacaagacctaactagacttgtaaatgctactggtgaggaatcagagtaaagaaaaaccatggggatatacaatacaaccctcgtgaccaagttgcgtgttgtacaaaattttgggaagataattgtcttgccacaatctgaggacaatattgtaaggatgtattttcttcagagatcattccacactaactcatgtcaaattggagtttcatttacacatggctggagagtggaggtacagcaatttgtgcacctggtcgttgatcatcaaatccatctttttgcatacatgatattgtacatagcaaggccctgaattcttgtaactaacagtcaggagttcgataaattggttagtctaaagctagtcatttaattattcgcttgttcatcatgttggatggatctactctcagcagtcgaagaaaaattgttcggccatttacttcttgtagagaatagagatgatttggttactgctgtaaaacccagttgtattctcctttcagctcttgcctgttgaaatttgaatgtttatctgtggatttattcccgcaatgctgaaaaaaacatgtagcgtgaattttgttcatagtggatatgtatgaagatgtaaa

SEQ ID NO: 220081 - DNA, 2807 bp, Zea Mays
gcattggcggcggccgcgccgaggctcgtgcgcgcggtcaccgacgctgccgacgtctttgcaataaatgggctgtacatttcactgggatcaccacctcttcctggatggactggagatggtggagacccttgtggtgagggctggcagggtgttctgtgtaccggctcttctataactggaataaccatgaatgctgcaaacttgggaggacagctgggaagtttaggaaacttcaatgccatcaccagcatagagcttaacaacaataatattggtggaagcataccagaggacctacctgttactttgcagagtcttttcctctctgctaatcaaattactggaagcataccaagttcactgtcaaaactcgaaaacttatcagccatgtcagtcaacggcaaccatctaagtggaggcctaccagacacttttgattcactcaatagacttgtaaatttggatatttcttcgaataacttgactggcgtgttaccgtcgtcaatgaaaagtttggcatctttaacttcattgcacatgcaagacaatcaactgtctgggacccttaacgttttgcaaggtctcccactgaaagacttgaacatagagaataatattttttctggaccggtgcctgcgagcttgcttaacataccaaacttcaaaaaggacgggaatccattcaataccacatctgcatctccgccttcaacaggacccgacccaactctaacaccagcacctaacacttcaaattcaacgcccccagcaccagcacccccatctccttcaagagctactcccccgcctaaaacaacctcaaattatcctgaaggatcaactacccgagacagcacttcatcatctaggaaacacaatacatcaaccctcaagattgttggttttgttcttgctggagtagtgctgtttattgttatagtcttcctagtattattttgtctatccaagtaccaagggagacagtcgagatacgatcgtaatagaagtcagctgggaggggtgcatcatagggttgaaccgcaaatcaagccacctccagtgcaacaaagcaatgatattaaagaaggcgagacaccggacaggagggtccatcaactaagttcatctgcagcagctctcccaaagaagtctcctgaaaaccaaaaggagcacataattaattttgatcaaacagattcagatctgtttcatgtttctctaccacctcctcctccaccaccgccattaaccccaattgaaagagttgctgcaaatctcattgttccactagaaaagcgatatattcctccaccaaagacaagtagctcgacttcttccgcgtcattctctgttgcatctcttcagcaatatacagatagtctcagagaggagaatgtgatcagagagagtagattaggaagggtttacctagcagagcttcctgatggcaagttattggaggttttaaagattggcaatgctaatggaagaatatcagtagatgacttcctagaacagattgaatgtatctcagatatcaagcatcctaacattcttgagttagtcggatactgtgctgaatatgggcagaggttactcgtatacgaacacttcagcagaacgacactggatgatgcaattcatgatggaaaggatactgaaagtgcactgtcatggaatgcccgcctccaggttgctcttggttcaggaaaagccttagagtatctccatcatagcttccattctccaattgtgcaccagaactttgaaccagctaatgtgctccttgataaaaagttctcagtgtgtgttgctgaatgtggactggcagaattgatgacatcaagttcagtcactcagctgtcaggtcggatgcgtgcatcactggactacgaagcacctgaattccaggattatggggtcatttcagaaaggggtgatgtctacagctttggtgtagtgatgctggaacttcttacggggcgtaaaccatatgatagttcacgcccgcgtcatgagcaacatcttgttagatgggccagttggcagcttcatgacattgaatccctatccaagatggtggacccacctatacgtggacatgttctgagaagcattgtcacattttgctgacataatcagccgctgtatccagccagagttcaggccaccaatgtctgatattgtacaagacctaactagacttgtaaatgctactggtgaggaatcagagtaaagaaaaaccatggggatatacaatacaaccctcgtgaccaagttgcgtgttgtacaaaattttgggaagataattgtcttgccacaatctgaggacaatattgtaaggatgtattttcttcagagatcattccacactaactcatgtcaaattggagtttcatttacacatggctggagagtggaggtacagcaatttgtgcacctggtcgttgatcatcaaatccatctttttgcatacatgatattgtacatagcaaggccctgaattcttgtaactaacagtcaggagttcgataaattggttagtctaaagctagtcatttaattattcgcttgttcatcatgttggatggatctactctcagcagtcgaagaaaaattgttcggccatttacttcttgtagagaatagagatgatttggttactgctgtaaaacccagttgtattctcctttcagctcttgcctgttgaaatttgaatgtttatctgtggatttattcccgcaatgctgaaaaaaacatgtagcgtgaattttgttcatagtggatatgtatgaagatgtaaa

SEQ ID NO: 220082 - DNA, 2809 bp, Zea Mays
gcattggcggcggccgcgccgaggctcgtgcgcgcggtcaccgacgctgccgacgtctttgcaataaatgggctgtacatttcactgggatcaccacctcttcctggatggactggagatggtggagacccttgtggtgagggctggcagggtgttctgtgtaccggctcttctataactggaataaccatgaatgctgcaaacttgggaggacagctgggaagtttaggaaacttcaatgccatcaccagcatagagcttaacaacaataatattggtggaagcataccagaggacctacctgttactttgcagatttcctctctgctaatcaaattactggaagcataccaagttcactgtcaaaactcgaaaacttatcagccatgtcagtcaacggcaaccatctaagtggaggcctaccagacacttttgattcactcaatagacttgtaaatttggatatttcttcgaataacttgactggcgtgttaccgtcgtcaatgaaaagtttggcatctttaacttcattgcacatgcaagacaatcaactgtctgggacccttaacgttttgcaaggtctcccactgaaagacttgaacatagagaataatattttttctggaccggtgcctgcgagcttgcttaacataccaaacttcaaaaaggacgggaatccattcaataccacatctgcatctccgccttcaacaggacccgacccaactctaacaccagcacctaacacttcaaattcaacgcccccagcaccagcacccccatctccttcaagagctactcccccgcctaaaacaacctcaaattatcctgaaggatcaactacccgagacagcacttcatcatctaggaaacacaatacatcaaccctcaagattgttggttttgttcttgctggagtagtgctgtttattgttatagtcttcctagtattattttgtctatccaagtaccaagggagacagtcgagatacgatcgtaatagaagtcagctgggaggggtgcatcatagggttgaaccgcaaatcaagccacctccagtgcaacaaagcaatgatattaaagaaggcgagacaccggacaggagggtccatcaactaagttcatctgcagcagctctcccaaagaagtctcctgaaaaccaaaaggagcacataattaattttgatcaaacagattcagatctgtttcatgtttctctaccacctcctcctccaccaccgccattaaccccaattgaaagagttgctgcaaatctcattgttccactagaaaagcgatatattcctccaccaaagacaagtagctcgacttcttccgcgtcattctctgttgcatctcttcagcaatatacagatagtctcagagaggagaatgtgatcagagagagtagattaggaagggtttacctagcagagcttcctgatggcaagttattggaggttttaaagattggcaatgctaatggaagaatatcagtagatgacttcctagaacagattgaatgtatctcagatatcaagcatcctaacattcttgagttagtcggatactgtgctgaatatgggcagaggttactcgtatacgaacacttcagcagaacgacactggatgatgcaattcatgatggaaaggatactgaaagtgcactgtcatggaatgcccgcctccaggttgctcttggttcaggaaaagccttagagtatctccatcatagcttccattctccaattgtgcaccagaactttgaaccagctaatgtgctccttgataaaaagttctcagtgtgtgttgctgaatgtggactggcagaattgatgacatcaagttcagtcactcagctgtcaggtcggatgcgtgcatcactggactacgaagcacctgaattccaggattatggggtcatttcagaaaggggtgatgtctacagctttggtgtagtgatgctggaacttcttacggggcgtaaaccatatgatagttcacgcccgcgtcatgagcaacatcttgttagatgggccagttggcagcttcatgacattgaatccctatccaagatggtggacccacctatacgtggacatgttctgagaagcattgtcacattttgctgacataatcagccgctgtatccagcggcagccagagttcaggccaccaatgtctgatattgtacaagacctaactagacttgtaaatgctactggtgaggaatcagagtaaagaaaaaccatggggatatacaatacaaccctcgtgaccaagttgcgtgttgtacaaaattttgggaagataattgtcttgccacaatctgaggacaatattgtaaggatgtattttcttcagagatcattccacactaactcatgtcaaattggagtttcatttacacatggctggagagtggaggtacagcaatttgtgcacctggtcgttgatcatcaaatccatctttttgcatacatgatattgtacatagcaaggccctgaattcttgtaactaacagtcaggagttcgataaattggttagtctaaagctagtcatttaattattcgcttgttcatcatgttggatggatctactctcagcagtcgaagaaaaattgttcggccatttacttcttgtagagaatagagatgatttggttactgctgtaaaacccagttgtattctcctttcagctcttgcctgttgaaatttgaatgtttatctgtggatttattcccgcaatgctgaaaaaaacatgtagcgtgaattttgttcatagtggatatgtatgaagatgtaaa

SEQ ID NO: 220083 - DNA, 2813 bp, Zea Mays
gcattggcggcggccgcgccgaggctcgtgcgcgcggtcaccgacgctgccgacgtctttgcaataaatgggctgtacatttcactgggatcaccacctcttcctggatggactggagatggtggagacccttgtggtgagggctggcagggtgttctgtgtaccggctcttctataactggaataaccatgaatgctgcaaacttgggaggacagctgggaagtttaggaaacttcaatgccatcaccagcatagagcttaacaacaataatattggtggaagcataccagaggacctacctgttactttgcagagtcttttcctctctgctaatcaaattactggaagcataccaagttcactgtcaaaactcgaaaacttatcagccatgtcagtcaacggcaaccatctaagtggaggcctaccagacacttttgattcactcaatagacttgtaaatttggatatttcttcgaataacttgactggcgtgttaccgtcgtcaatgaaaagtttggcatctttaacttcattgcacatgcaagacaatcaactgtctgggacccttaacgttttgcaaggtctcccactgaaagacttgaacatagagaataatattttttctggaccggtgcctgcgagcttgcttaacataccaaacttcaaaaaggacgggaatccattcaataccacatctgcatctccgccttcaacaggacccgacccaactctaacaccagcacctaacacttcaaattcaacgcccccagcaccagcacccccatctccttcaagagctactcccccgcctaaaacaacctcaaattatcctgaaggatcaactacccgagacagcacttcatcatctaggaaacacaatacatcaaccctcaagattgttggttttgttcttgctggagtagtgctgtttattgttatagtcttcctagtattattttgtctatccaagtaccaagggagacagtcgagatacgatcgtaatagaagtcagctgggaggggtgcatcatagggttgaaccgcaaatcaagccacctccagtgcaacaaagcaatgatattaaagaaggcgagacaccggacaggagggtccatcaactaagttcatctgcagcagctctcccaaagaagtctcctgaaaaccaaaaggagcacataattaattttgatcaaacagattcagatctgtttcatgtttctctaccacctcctcctccaccaccgccattaaccccaattgaaagagttgctgcaaatctcattgttccactagaaaagcgatatattcctccaccaaagacaagtagctcgacttcttccgcgtcattctctgttgcatctcttcagcaatatacagatagtctcagagaggagaatgtgatcagagagagtagattaggaagggtttacctagcagagcttcctgatggcaagttattggaggttttaaagattggcaatgctaatggaagaatatcagtagatgacttcctagaacagattgaatgtatctcagatatcaagcatcctaacattcttgagttagtcggatactgtgctgaatatgggcagaggttactcgtatacgaacacttcagcagaacgacactggatgatgcaattcatgatggaaaggatactgaaagtgcactgtcatggaatgcccgcctccaggttgctcttggttcaggaaaagccttagagtatctccatcatagcttccattctccaattgtgcaccagaactttgaaccagctaatgtgctccttgataaaaagttctcagtgtgtgttgctgaatgtggactggcagaattgatgacatcaagttcagtcactcagctgtcaggtcggatgcgtgcatcactggactacgaagcacctgaattccaggattatggggtcatttcagaaaggggtgatgtctacagctttggtgtagtgatgctggaacttcttacggggcgtaaaccatatgatagttcacgcccgcgtcatgagcaacatcttgttagatgggccagttggcagcttcatgacattgaatccctatccaagatggtggacccacctatacgtggacatgttctgagaagcattgtcacattttgctgacataatcagccgctgtatccagcggcagccagagttcaggccaccaatgtctgatattgtacaagacctaactagacttgtaaatgctactggtgaggaatcagagtaaagaaaaaccatggggatatacaatacaaccctcgtgaccaagttgcgtgttgtacaaaattttgggaagataattgtcttgccacaatctgaggacaatattgtaaggatgtattttcttcagagatcattccacactaactcatgtcaaattggagtttcatttacacatggctggagagtggaggtacagcaatttgtgcacctggtcgttgatcatcaaatccatctttttgcatacatgatattgtacatagcaaggccctgaattcttgtaactaacagtcaggagttcgataaattggttagtctaaagctagtcatttaattattcgcttgttcatcatgttggatggatctactctcagcagtcgaagaaaaattgttcggccatttacttcttgtagagaatagagatgatttggttactgctgtaaaacccagttgtattctcctttcagctcttgcctgttgaaatttgaatgtttatctgtggatttattcccgcaatgctgaaaaaaacatgtagcgtgaattttgttcatagtggatatgtatgaagatgtaaa

SEQ ID NO: 220084 - DNA, 2849 bp, Zea Mays
aacggtgtgatcgagcccgttgggaactggggaagccaggccatgcagcgtgctccggggtgccgccgcggcgcggggccgatcctgctgctggcgctggtcgcattggcggcggccgcgccgaggctcgtgcgcgcggtcaccgacgctgccgacgtctttgcaataaatgggctgtacatttcactgggatcaccacctcttcctggatggactggagatggtggagacccttgtggtgagggctggcagggtgttctgtgtaccggctcttctataactggaataaccatgaatgctgcaaacttgggaggacagctgggaagtttaggaaacttcaatgccatcaccagcattttcctctctgctaatcaaattactggaagcataccaagttcactgtcaaaactcgaaaacttatcagccatgtcagtcaacggcaaccatctaagtggaggcctaccagacacttttgattcactcaatagacttgtaaatttggatatttcttcgaataacttgactggcgtgttaccgtcgtcaatgaaaagtttggcatctttaacttcattgcacatgcaagacaatcaactgtctgggacccttaacgttttgcaaggtctcccactgaaagacttgaacatagagaataatattttttctggaccggtgcctgcgagcttgcttaacataccaaacttcaaaaaggacgggaatccattcaataccacatctgcatctccgccttcaacaggacccgacccaactctaacaccagcacctaacacttcaaattcaacgcccccagcaccagcacccccatctccttcaagagctactcccccgcctaaaacaacctcaaattatcctgaaggatcaactacccgagacagcacttcatcatctaggaaacacaatacatcaaccctcaagattgttggttttgttcttgctggagtagtgctgtttattgttatagtcttcctagtattattttgtctatccaagtaccaagggagacagtcgagatacgatcgtaatagaagtcagctgggaggggtgcatcatagggttgaaccgcaaatcaagccacctccagtgcaacaaagcaatgatattaaagaaggcgagacaccggacaggagggtccatcaactaagttcatctgcagcagctctcccaaagaagtctcctgaaaaccaaaaggagcacataattaattttgatcaaacagattcagatctgtttcatgtttctctaccacctcctcctccaccaccgccattaaccccaattgaaagagttgctgcaaatctcattgttccactagaaaagcgatatattcctccaccaaagacaagtagctcgacttcttccgcgtcattctctgttgcatctcttcagcaatatacagatagtctcagagaggagaatgtgatcagagagagtagattaggaagggtttacctagcagagcttcctgatggcaagttattggaggttttaaagattggcaatgctaatggaagaatatcagtagatgacttcctagaacagattgaatgtatctcagatatcaagcatcctaacattcttgagttagtcggatactgtgctgaatatgggcagaggttactcgtatacgaacacttcagcagaacgacactggatgatgcaattcatgatggaaaggatactgaaagtgcactgtcatggaatgcccgcctccaggttgctcttggttcaggaaaagccttagagtatctccatcatagcttccattctccaattgtgcaccagaactttgaaccagctaatgtgctccttgataaaaagttctcagtgtgtgttgctgaatgtggactggcagaattgatgacatcaagttcagtcactcagctgtcaggtcggatgcgtgcatcactggactacgaagcacctgaattccaggattatggggtcatttcagaaaggggtgatgtctacagctttggtgtagtgatgctggaacttcttacggggcgtaaaccatatgatagttcacgcccgcgtcatgagcaacatcttgttagatgggccagttggcagcttcatgacattgaatccctatccaagatggtggacccacctatacgtggacatgttctgagaagcattgtcacattttgctgacataatcagccgctgtatccagcggcagccagagttcaggccaccaatgtctgatattgtacaagacctaactagacttgtaaatgctactggtgaggaatcagagtaaagaaaaaccatggggatatacaatacaaccctcgtgaccaagttgcgtgttgtacaaaattttgggaagataattgtcttgccacaatctgaggacaatattgtaaggatgtattttcttcagagatcattccacactaactcatgtcaaattggagtttcatttacacatggctggagagtggaggtacagcaatttgtgcacctggtcgttgatcatcaaatccatctttttgcatacatgatattgtacatagcaaggccctgaattcttgtaactaacagtcaggagttcgataaattggttagtctaaagctagtcatttaattattcgcttgttcatcatgttggatggatctactctcagcagtcgaagaaaaattgttcggccatttacttcttgtagagaatagagatgatttggttactgctgtaaaacccagttgtattctcctttcagctcttgcctgttgaaatttgaatgtttatctgtggatttattcccgcaatgctgaaaaaaacatgtagcgtgaattttgttcatagtggatatgtatgaagatgtaaa

SEQ ID NO: 220085 - DNA, 651 bp, Zea Mays
cgcctgcagattgcaaaaacgggactgctaagcaagctaagatttcaatggcatattccttcatacataggccattgagcgacgaggcacgccgcgtcagcactcccttggtggtcacttgcaatgaccagagacgggaggtctccgttgcccagaacatcgctaacaaggaaattgaccgcaccgttgcattcgacaaggtgctaggtccaaagtctcaacagcaggacgtcttcaaccatgctgttgtgccacttgtcagcgaggttttggacggttataattgcacaatatttgcatatggccagactggaactggcaaaacatacataatggaaggaggagggggcaaagcactgaatgctgacctcccgactgatgctagtgtcattccaagtgctgttaagcgcatatttgacatcctcgaggcacagagtgcagagtacagcatgaaggtttcttttcttgagctgtacaatgtggagctcactgatcttctagctctacaatgagattgcaagaacgggactgctaagcaagctaagatttcaatggcctattccttcatacataggccattgaaccggaagattttgtcggtattcgatgattgcaataagatatcatgaggcgcgccgaggagaacagggg

SEQ ID NO: 220086 - DNA, 661 bp, Zea Mays
cgtccaatgacaaattaacggttcagattagctatgacccacaagacaagtctgccttcgtcgtcctcaaccctcgtagtcatagagcatcagaggcgccgctcctttcggatctgggcgaggtgagctgcggcgccggacgtcgcggggaagaggatgaactggatcgggcgcaagatccacctctacaatgtcaccatcggcctctacatgctcgattgatattttgatggtttgcctcttctggtacattctccgctatctccttgggttcttccaaagtaatgtgaagactcttttccaagaggggaactaccttgggcaaggcagtacataaccattgtcaaacaagatctgcttatgatcatttgccccatgtaattccatgtgtttaattagttgttaactacttaactgaggagctgagaagaagtaatttaagcaagtgttacagtgtagccatcgtctgtatcttccctggaagccaatagtctctagtgttaatttcaatggaataaaaaaaatacgttgtgcaagttttgattaatttttttttttggttagttgtttccttgctttgctggcctgcggactttacttgtaccatctgttgagttgatcactgaagtacgaatcagtaacctgtgatatctgatgtcta

SEQ ID NO: 220087 - DNA, 735 bp, Zea Mays
gttcagattagctatgacccacaagacaagtctgccttcgtcgtcctcaaccctcgtagtcatagagcatcagaggcgccgctcctttcggatctgggcgaggtgagctgcggcgccggacgtcgcggggaagaggatgaactggatcgggcgcaagatccacctctacaatgtcaccatcggcctctacatgctcgattgtacagacaatttcggcaaacaagacaatgtcattacagtgcccctacttcctcgaccctaaaactgttcaagaaattttacagccttctatttaatattttgatggtttgcctcttctggtacattctccgctatctccttgggttcttccaaagtaatgtgaagactcttttccaagaggggaactaccttgggcaaggcagtacataaccattgtcaaacaagatctgcttatgatcatttgccccatgtaattccatgtgtttaattagttgttaactacttaactgaggagctgagaagaagtaatttaagcaagtgttacagtgtagccatcgtctgtatcttccctggaagccaatagtctctagtgttaatttcaatggaataaaaaaaatacgttgtgcaagttttgattaatttttttttttggttagttgtttccttgctttgctggcctgcggactttacttgtaccatctgttgagttgatcactgaagtacgaatcagtaacctgtgatatctgatgtcta

SEQ ID NO: 220088 - DNA, 750 bp, Zea Mays
gttcagattagctatgacccacaagacaagtctgccttcgtcgtcctcaaccctcgtagtcatagagcatcagaggcgccgctcctttcggatctgggcgaggtgagctgcggcgccggacgtcgcggggaagaggatgaactggatcgggcgcaagatccacctctacaatgtcaccatcggcctctacatgctcgattggtgggagcgctacctcttcaacaatttcggcaaacaagacaatgtcattacagtgcccctacttcctcgaccctaaaactgttcaagaaattttacagccttctatttaatattttgatggtttgcctcttctggtacattctccgctatctccttgggttcttccaaagtaatgtgaagactcttttccaagaggggaactaccttgggcaaggcagtacataaccattgtcaaacaagatctgcttatgatcatttgccccatgtaattccatgtgtttaattagttgttaactacttaactgaggagctgagaagaagtaatttaagcaagtgttacagtgtagccatcgtctgtatcttccctggaagccaatagtctctagtgttaatttcaatggaataaaaaaaatacgttgtgcaagttttgattaatttttttttttggttagttgtttccttgctttgctggcctgcggactttacttgtaccatctgttgagttgatcactgaagtacgaatcagtaacctgtgatatctgatgtcta

SEQ ID NO: 220089 - DNA, 784 bp, Zea Mays
aaatatcatagcacaacactgcaatgttggggacatgaaccttgtttaaaacaaattattcctggtgtccctgagtctgtcacactaaccctgtcttgatgattgtgctcaatctgcaactgtggttatccttcagttaagggtgccatgctgcatgttcttcctggtcactttgaacctgcaatgccaagttcttcaaaattcaaatgcttgcattcatgtcccatcatttgcaactttacctccacagtacagacaatttcggcaaacaagacaatgtcattacagtgcccctacttcctcgaccctaaaactgttcaagaaattttacagccttctatttaatattttgatggtttgcctcttctggtacattctccgctatctccttgggttcttccaaagtaatgtgaagactcttttccaagaggggaactaccttgggcaaggcagtacataaccattgtcaaacaagatctgcttatgatcatttgccccatgtaattccatgtgtttaattagttgttaactacttaactgaggagctgagaagaagtaatttaagcaagtgttacagtgtagccatcgtctgtatcttccctggaagccaatagtctctagtgttaatttcaatggaataaaaaaaatacgttgtgcaagttttgattaatttttttttttggttagttgtttccttgctttgctggcctgcggactttacttgtaccatctgttgagttgatcactgaagtacgaatcagtaacctgtgatatctgatgtcta

SEQ ID NO: 220090 - DNA, 973 bp, Zea Mays
cacgcacacggcacacacaccttcttcgtccccttcaccccctgccgctagcctctccctcccctcggtcgtagccatggagaccacttcccctgcctcttcacctgggcacacctccctcccagctgctgcaggtaggactaagtagtaaatagccatatacataggttgagtggatcgttaagagacggtagccatatacataggagtactggatagtatacaagaacggtagatacagggcaggggacatgatgctgggaaagagatctgggcgcccgtcgccggcggcgcggcagcacatgcggcggaccacgagcatgacggagttcgcggcaccgcacgtgctggtagacgtcgcggaggaggaggaggacgaggagctgcagctgctgccggcgcacgccgaggccacaggggaggcggccgagcaggaggacccctacgggtgggccatcggcggcgccgcggcggccgggcgcgcggactggctggcggcgtaccgcgcccgcgcggcgccggcactggcggggctacgccggaactcggccgacttctcggctgccgagaccgccgcgttcctccgcgcctgcgggctctgcaaccgccgcctcggacccggccgcgacaccttcatgtacaggggcgacacggcgttctgcagcctcgagtgccggcagcagcacatcacgatcgaggagtggaaggagaagtgcgcgctcgccacgccgccgacggcgccggcgtccgacccggtggtgccgctgccgcccagcggcgcgggctccgacaaaccagatcagctcagcaaaggtacgccgagttttaatttcccccggtttctatgaaattcggcgttgcaaagatatatagatggttaccaggattggtatgtatttatatgatgttcgtcaccgatgacaacccccccggcccggccacatgatggcatgaataatattttatttatgag

SEQ ID NO: 220091 - DNA, 1813 bp, Zea Mays
agccgccatcgcttcgggctccagatcccagcgccagcgccccaaaggtccaggggaacactcacattccaagcgcatctctcaaggtgcccaagatatactaagcaaaaatcttgtatcctaatctgataacatgcataaatgtggatggaataggggcatatgactggttcaatcaaggccatgctcctgctgtgacattttaatgctaacgaataagatagcagcatcgatgaaaacagcctgaacataacccagtttttttaaagcatactaacattcaagacaagatagcaataaaccaaatcaatacttctagctcattggaatgtcttcctgccttattttatccggattctttgagaaagagacatggatgcacccgattttccctgccctcttctatgcctgtgaaagagtcataaggaaatttcatgagaacgactaccattcaggtattgtgagcaatttatctgggagatgtgctctctattcacatgaagaagcctcggggtttcaagtactaaagtggaatgcatcttttttttgtaaaataccaagtcttgcctttcgactggcaccccttctctataactctggcaccaggagataactacttgactgtgcatatccgcgcgctgggtgaccgggcatccaaactttcgattctctgagattttgaactttgatggcagtgaaagggatcaggctccgaaaacagggagcaagaatatgtgtgttgtcttgcaagtcctctttcacgaacgagttgcttcttttatttttttaacatctaaatatccattcaaaatcatacacaatacttcactttgttcttcatgttatacagttcactaagtcaaaaggaaccttgtgcctcctgtgtttccatgatttactattgaacaatgaacatatctgattcacaatgatttagagaacaaaacaacaaggggattaacattttactttcactactttagaccagcactcttgtccgtttttttgtatccaataataaaggccaatttctggcttctctttgcaatatgctttgttgggattgaatctagaaccactgttcttaataatctagcacaaatatgaactgctgccaacaccaccatcttgctctttgtcttcaatatctagaacttttttggctggctgggggaggtgttcttatttctgaattgattcaagacatcgatactcccttagccaagggtgaaagggctataaagccaagaagacgaagaagggtgaagaattcaggttttcggaagcaatagtgaagactattttttggcttctctttgcaatatgctttattgggattggatcctcgatcattgttattaataatctatcacaaatatgagttgttgcagatcctattgacacaaccatctgactctctaccttcatttttttgcaatttttggttgcctgggaggtgttgttgttcctgagtatcttgtcaggcctccttcatgtcttctccctgttcaagtggtgggcttgggagattggctcttgagatatcttctctacgtacatgtactataataaaattcttcatctaaatctagctcatatcatttattttctgatgctatatttttattgagaaatcaaaatatccatatgttgagagcaaatcttgatgtaatcactactgatcaaagtgcacctgagtattttatgcctttaaatgagtagccgaggaactaaagaaggaacgattgggacatgtttgttaggatgaacttaagttaagttcattccactctttgaaatcttaagaaatgtg

SEQ ID NO: 220092 - DNA, 3111 bp, Zea Mays
cctccccctcctccctcccccgcccgttcgtagctccggtgacagccgccatcgcttcgggctccagatcccagcgccagcgccccaaaggtccaggtaagcggaggcggatcttccccttctcccccattcgttttccttgctagggttcatcgtcccctcctcattcccttcccgacgagctctctccccattgctagggttcgtcgtgctggggttggagtagacacggctgcggcggtggctcttccccttcccccctcatccatttttccttgctggggtttgactagacacagaaattcctcatgctaccatttagggtttagggttggttctcctacgtttcagcctcaaggtatcaatgattctgaggcatacgacatattttttgcggtacgacatgtagcaactacaaacctgcttgggattgttgtcttttgggtctgggtgtggaggtatttgaagatatgaagaataatgtctgaattggaccacactaattgttgttgacatgttctgccatatggagatggaaagtgatgccacttttctttgcaacattatcaacatctatccattattaacgtctatccatatttgactatctaatcttaacgacgtgatgtttatttttctcatattctcaaaggggaacactcacattccaagcgcatctctcaaggtgcccaagatatactaagcaaaaatcttgtatcctaatctgataacatgcataaatgtggatggaataggggcatatgactggttcaatcaaggccatgctcctgctgtgacattttaatgctaacgaataagatagcagcatcgatgaaaacagcctgaacataacccagtttttttaaagcatactaacattcaagacaagatagcaataaaccaaatcaatacttctagctcattggaatgtcttcctgccttattttatccggattctttgagaaagaggtaagctcaatgtttgtttcaatctaattttttagtatgttttaatttcttcgcatctgctggagactttaaatttgaactaagtctcaggagaagcatttgaattgttacagatacttttggtctcacctaactgtgtggtatttatagtttgctcatttgtatacaatcatcggctttacaaccttgtttgctcaacccaaaaaaaaggtgggcagaaactgtctgtttcatcactcaccaagcacacccaacgtacatttaaggagaacagcacaagaagacaagaagcacctaaacggaagtgaataattaattaaccatgtaaaaccatgtcctcacacgtttaagttgtttacatttcctcataaatgaatttgtaccaattcaaacaagcttgttagcaagtacgagtagcatttgtgttagaaaaatacaagaaaaaagatctcttaagttctcaacttttgcttgatcttgtgtgttagactgttagtgttcatatggcgcatcccaaatattcctgtcctgtaattgaacacagacagcccaaatactccttctgtaattgaacacaagaatatgtttagttgatggtctggtcatggagctcaaatttggttcaacatgaattatgatactgactgtgtactctagatatttatgtttattttttgcaaatttgtttgttcatttcagacatggatgcacccgattttccctgccctcttctatgcctgtgaaagagtcataaggaaatttcatgagaacgactaccattcaggtattgtgagcaatttatctgggagatgtgctctctattcacatgaagaagcctcggggtttcaagtactaaagtggaatgcatcttttttttgtaaaataccaagtcttgcctttcgactggcaccccttctctataactctggcaccaggagataactacttgactgtgcatatccgcgcgctgggtgaccgggcatccaaactttcgattctctgagattttgaactttgatggcagtgaaagggatcaggctccgaaaacagggagcaagaatatgtgtgttgtcttgcaagtcctctttcacgaacgagttgcttcttttatttttttaacatctaaatatccattcaaaatcatacacaatacttcactttgttcttcatgttatacagttcactaagtcaaaaggaaccttgtgcctcctgtgtttccatgatttactattgaacaatgaacatatctgattcacaatgatttagagaacaaaacaacaaggggattaacattttactttcactactttagaccagcactcttgtccgtttttttgtatccaataataaaggccaatttctggcttctctttgcaatatgctttgttgggattgaatctagaaccactgttcttaataatctagcacaaatatgaactgctgccaacaccaccatcttgctctttgtcttcaatatctagaacttttttggctggctgggggaggtgttcttatttctgaattgattcaagacatcgatactcccttagccaagggtgaaagggctataaagccaagaagacgaagaagggtgaagaattcaggttttcggaagcaatagtgaagactattttttggcttctctttgcaatatgctttattgggattggatcctcgatcattgttattaataatctatcacaaatatgagttgttgcagatcctattgacacaaccatctgactctctaccttcatttttttgcaatttttggttgcctgggaggtgttgttgttcctgagtatcttgtcaggcctccttcatgtcttctccctgttcaagtggtgggcttgggagattggctcttgagatatcttctctacgtacatgtactataataaaattcttcatctaaatctagctcatatcatttattttctgatgctatatttttattgagaaatcaaaatatccatatgttgagagcaaatcttgatgtaatcactactgatcaaagtgcacctgagtattttatgcctttaaatgagtagccgaggaactaaagaaggaacgattgggacatgtttgttaggatgaacttaagttaagttcattccactctttgaaatcttaagaaatgtg

SEQ ID NO: 220093 - DNA, 1030 bp, Zea Mays
cccccgcccgttcgtagctccggtgacagccgccatcgcttcgggctccagatcccagcgccagcgccccaaaggtccagggttcgtcgtgctggggttggagtagacacggctgcggcggtggctcttccccttcccccctcatccatttttccttgctggggtttgactagacacagaaattcctcatgctaccatttagggtttagggttggttctcctacgtttcagcctcaaggtatcaatgattctgaggcatacgacatattttttgcggtacgacatgtagcaactacaaacctgcttgggattgttgtcttttgggtctgggtgtggaggtatttgaagatatgaagaataatgtctgaattggaccacactaattgttgttgacatgttctgccatatggagatggaaagtgatgccacttttctttgcaacattatcaacatctatccattattaacgtctatccatatttgactatctaatcttaacgacgtgatgtttatttttctcatattctcaaaggggaacactcacattccaagcgcatctctcaaggtgcccaagatatactaagcaaaaatcttgtatcctaatctgataacatgcataaatgtggatggaataggggcatatgactggttcaatcaaggccatgctcctgctgtgacattttaatgctaacgaataagatagcagcatcgatgaaaacagcctgaacataacccagcatactaacattcaagacaagatagcaataaaccaaatcaatacttctagctcattggaatgtcttcctgccttattttatccggattctttgagaaagagacatggatgcacccgattttccctgccctcttctatgcctgtgaaagagtcataaggaaatttcatgagaacgactaccattcaggtattgtgaggcaccccttctctataactctggcaccaggagataactacttgactgtgcatatccgcgcgctgggtgaccgggcatccaaactttcgattctctga

SEQ ID NO: 220094 - DNA, 1984 bp, Zea Mays
accatttggacaccgatccatccatccatccagccccgtacgtgtctcgctggccgtccgtatatatagagagaggcatcggagattggccgccacgttgccatcgcgcgcggcgcccgccggccaaggccaaccatgctggcgagggctcctccgccgcggccgtgctccagcggcggcagaggccgcttctaacgggtcagcggcggcggccgtcgcagggatcagcagcagcagcagcgcgctggtgacctcgaccgtcgggaaatcgacgaacatcctgtggcatgagtgcgccatcgggcagaaggagcgacagggtctgctgaaccagaagggctgcgtcgtgtggatcactggcctaagcggttcagggaaaagcacgctcgcgtgcgcgctgagccgcgagctgcacggcagaggccacctcacgtacgtcctcgacggcgacaacctcaggcacgggctgaacagggacctcagcttcggagcagaggaccgcgccgagaacatccgcagagtaggggaagtagcgaagctgttcgccgacgctggcctcgtctgcatcgccagcctcatatcgccctacagaagcgaccgaagcgcgtgtcgcgatctgctgcccaagcactcgtttatcgaggtgttcctggacgtgccgcttcaagtgtgcgaagccagggaccccaaaggcctctacaagctcgcacgcgccggcaaaatcaaaggtacggcgttgattcttacgacatttatgacaatgctttcgaaaggtcggttccaaaaaaaaaacaaattccatttattgcaatgatggagatggcccatacatgtagtaaagaacagccgtcctgaagattgaaaacaagggcaattttgatgcaaaatggccaggtctatttaatgtcatcactcagggtctagaccaaggcaatagaaatgtttggttgctactggtaccatcacggaaggttgcgtgcgtcaaggtgaatcaaatctgtgaagggaacgtggccgtcagatctacgggttgggagttagatcaattatatcttttgctaaatggtttagctctaaaacatctagcggaaaatgttgacaatgtttaatggacaacataaataagaggagggttggctccaactacctatctttctagcatctatctggtggtttaattttcacgccttctctcttgtaggtctcaccctcacttgtgtaacttgagattaagaaagtgcagcacttaccacagtggtttatggtgaagtgaaatccattttcgtgctccattgagttcttgatttttttttggtttggatttttccttcccgatttgaatttgagttcttggaacttttgggttggatagaaacgtgcaggaacctccaggtggtttgggcagattcaacaagagcacgaaaatccaacctcttgactgattttgagaaaacagagttcgcttatatcatttttgccttttagagcttttgttcaggctgctagcagccgtcaacacatcactgccatgcactgagcacggacaattcaccgttttgagtcttttttggtgtttggggtgtctgttttgtgatccgtttttgattttttatatactttagggactttttcaaagaatccaaccactagttggttgtgatgttttttgtttgagctctttcttcgttaccattagagcagagctcacttttcggatttcaaaaggcttcacttgtgtacttagttttggctggctcaagtgctccgttggcttgagagtatctcatttgtttctttttgaaacaagaaggcaagagttctgccttatatattgataaggaaagaaatgccctaaagaaagagtcaatataaagacgatgtcaagcacaacagatactctctaagcatcccgtagcaactaaaaataagactcacaactagcaactcagctaagttatgaggataagagagtagctaattgcct

SEQ ID NO: 220095 - DNA, 3373 bp, Zea Mays
cgcctgcctctcctcgccccactctgtctcccgcaatcctcgccttctcgccccaaattgtcggggctctcggtcctcgcccacgctctctatggaaggagatcgcctccgctgcaccccagcactcttgccccggatcgtggtcgggagaggaggcgacatccgaaacacggttcttagcttggaatcaactgctggattagaatcagtgagatgcatgtcacgaactgatctcaaacttgatggatcatttgctgacatgattcttattcctgatactggggttcttgataaaagcagaattctgcaccttttgttttgacaaatcctggatagctgaatttttatgacggtggctctctattttctgtgcaaaactcaaaagagggaaatcctcttcctgaagcacagaaatttcaagtcgcaattcctacccttgatcccaacataacggtcactggtctttattcgctaaccaaaagtgaatttccaaatatttcactgaaggtgcattctgctcaaatttggatattttactctatctagacatcatcattacttatgtaagaccatatcgctgtggattttctgtagaaattttgtgctaggaaaaatgttgggcatttcatatcagagaacatgaaatgacctttgactggtggggttccaaatgagatgtcactgaacgaagatcatgctgttgaaagaatataaattgcaggctaccaagatggttctgtgagtatatgggatgcaacatttcctgttctaatgccaatgtttgtcttggatggttgctgatgttaatttggatggagctaatgcttctgtatgatctctagccttttgttcattaagcatgactttagctgttgggacaacaagtggtctggttagatcttgtcagtcttacgaattggtcgaagggtggtcatttgtatcattttagaatatgtttttataccattttttgtagttgtgcatctataaactccgagaacacattggggattcaagcttccattttgtgagtgaatttaagcaagaaggtaaatatttcatacggaacctgattatatatgcctaaagcttcacctgctgcctattccccaacaatgttgtcatctttgttaagacagttttatgccaatttcacttcttctcaccagcacgtacaagatgtctgtcgtgactggtcatctaacaagcagaatccataacatgcttctttggtaaagagagacagtaaattggtactgtcacttacgtgaatgtttattattgaaatgaaaatacatttgattatgatcggacacttataaaaacttgacttgcggggctaagacaacctccgagcattgtgtgatagagaagacctctcatacatgccaaaacaaccttgcccacgtgagcgaccgcgacctggtccgggtcatagtcacaaagtttgtggatcgatagggttgaggaacatcgtacgctacgtgtgagagatttttacatggtgggaacaaaaatgaccttgcgtacccgggtcgagggtcgctaccactgtacccatttcttgtgactatggttttggtcttcgacccgtgctttggtgtggtggcaggcgaggggattttttaaccccagtctgaaataatgtgtttgtttttatgtaatctttgtgctctaatatactgctccgattgatatgttggcctgctaaagctattattttcagtttgcttgcatggaactcattatttttactagctctgttttatttaaacttatagtagcacatgtgtccattattgatattgattaatctagctcctatcattatgttcactatattgaattagttttgacaaaaaccctggtaagctggaatcacattgttttgtagatatttttcttcaatataaatgcttaaacttaacctgataaattcatctacatgctctttcaaatggcaagcccactattgttgagttttatgcaaattggtgtgaagtctgcagggaacaagctccatatatctacaaagttgaacaacaatacaaagactgtggaattgtgaggtctgtccatgctgcctgctagaaatgggaaaatatgttagcagtagcaacaagtgtttttggcctttgatcttctggaggtcatgtggttgcagttctaccgatacttgttctacttgggcaaaattaggacaattcagttggagtacactgatgctaaagaaagcctcctgcaagttgctcgtaaggcaccaacaacagcccatggttttcggatccagtgcaacaaatgggttatcatagagaggctgctgcttggttggaacagaacaagacattgtgattttctttgactgttttgtaaggaatcagtgaaggaggctgaattgtggaatactattgtgatgaacatagtgaagcaggctgagttgttgcgtgcttctggttctggtctcagggagttacttggaaggggtttgtctctccgactctgctactgctttttaggcactgcttttttttgaagcacacattgttgtagctgaaacctccataatttcttcaccggttttatttaatctcttgttgcaattataggtgtacacaaaaactaatttttcatttgcttgtattactaaacttaatttcacaatcagccttgtagcactttgagattctgttgtttatttcttgtattagatattcttctgagtactggaataaagtcaatttatcatttttcatcagtaacatcttgagaggctgcttcttacatacaaacctaaagaaccagaggaaattcttgagcctgctcctcttgaagaggaaatggcaccagttgaagatcatgttcttgtaccacctgttaatgaagttgtttcacctcctcccaagactgaggtgtcccgatactggtgacttactggttgggaaaattataatatggtctaaatcttatgtgcttgattctaaaatctgaagttgtgttcctggtgtggaaatagagttgttgggctatttgtgtggggtgtgggttggcatgttcggagctgttcctggttggaaccagtgattttgctactcttttgacggataatttgagtttggagtcgtcgaattttgaaacagaggagtgggtttacatgtaatgttggcaaacgggatctgaattattaataaagcaacactgtttcgctgatatttttagttccaatctctacttctaattatatatatttgtgagatagaattatgcattgtgtactcacataatatttttcattgcatttgtgtggccaggacgtttggaaactttagaccacacggttttttagttcaatcatactcatagtgcgacaagtgat

SEQ ID NO: 220096 - DNA, 3749 bp, Zea Mays
gtgaagcacgccacgcccccgcctgcctctcctcgccccactctgtctcccgcaatcctcgccttctcgccccaaattgtcggggctctcggtcctcgcccacgctctctatggaaggagatcgcctccgctgcaccccagcactcttgccccggatcgtggtcgggagaggaggcgacatccgaaacacggtgagtggagaggatcccgtttggcccctgggtaggtcggcttccttgtgccccgaatctcggtcctcgcccaccctctccatggaaggggattccgtgtatcgcgagcggatcatggtcgggagaggaggtggcatccaaagcgcagcgagtggagaggatctagtttggcccctgagtaggttggcttccatgtgccccggatcccggtcctcgcccaccctgtgccctggatctcgatcctcgcccaccctctccatagaaggggatcccgtgtatcgcaagcagaccgtggtcgggagaggaggcggtatccgaagcatgacgaggactcctgtttctgtcagaggctatggggatttacgcatgaagggtcaaatcaatggtgctcagggggattctggtgcagatcaactaaatactactattgatgacagtgaagaagttcttagcttggaatcaactgctggattagaatcagtgagatgcatgtcacgaactgatctcaaacttgatggatcatttgctgacatgattcttattcctgatactggggttcttgataaaagcagaattctgcaccttttgttttgacaaatcctggatagctgaatttttatgacggtggctctctattttctgtgcaaaactcaaaagagggaaatcctcttcctgaagcacagaaatttcaagtcgcaattcctacccttgatcccaacataacggtcactggtctttattcgctaaccaaaagtgaatttccaaatatttcactgaagaaattttgtgctaggaaaaatgttgggcatttcatatcagagaacatgaaatgacctttgactggtggggttccaaatgagatgtcactgaacgaagatcatgctgttgaaagaatataaattgcaggctaccaagatggttctgtgagtatatgggatgcaacatttcctgttctaatgccaatgtttgtcttggatggttgctgatgttaatttggatggagctaatgcttctgtatgatctctagccttttgttcattaagcatgactttagctgttgggacaacaagtggtctggttagatcttgtcagtcttacgaattggtcgaagggtggtcatttgtatcattttagaatatgtttttataccattttttgtagttgtgcatctataaactccgagaacacattggggattcaagcttccattttgtgagtgaatttaagcaagaaggtaaatatttcatacggaacctgattatatatgcctaaagcttcacctgctgcctattccccaacaatgttgtcatctttgttaagacagttttatgccaatttcacttcttctcaccagcacgtacaagatgtctgtcgtgactggtcatctaacaagcagaatccataacatgcttctttggtaaagagagacagtaaattggtactgtcacttacgtgaatgtttattattgaaatgaaaatacatttgattatgatcggacacttataaaaacttgacttgcggggctaagacaacctccgagcattgtgtgatagagaagacctctcatacatgccaaaacaaccttgcccacgtgagcgaccgcgacctggtccgggtcatagtcacaaagtttgtggatcgatagggttgaggaacatcgtacgctacgtgtgagagatttttacatggtgggaacaaaaatgaccttgcgtacccgggtcgagggtcgctaccactgtacccatttcttgtgactatggttttggtcttcgacccgtgctttggtgtggtggcaggcgaggggattttttaaccccagtctgaaataatgtgtttgtttttatgtaatctttgtgctctaatatactgctccgattgatatgttggcctgctaaagctattattttcagtttgcttgcatggaactcattatttttactagctctgttttatttaaacttatagtagcacatgtgtccattattgatattgattaatctagctcctatcattatgttcactatattgaattagttttgacaaaaaccctggtaagctggaatcacattgttttgtagatatttttcttcaatataaatgcttaaacttaacctgataaattcatctacatgctctttcaaatggcaagcccactattgttgagttttatgcaaattggtgtgaagtctgcagggaacaagctccatatatctacaaagttgaacaacaatacaaagactgtggaattgtgaggtctgtccatgctgcctgctagaaatgggaaaatatgttagcagtagcaacaagtgtttttggcctttgatcttctggaggtcatgtggttgcagttctaccgatacttgttctacttgggcaaaattaggacaattcagttggagtacactgatgctaaagaaagcctcctgcaagttgctcgtaaggcaccaacaacagcccatggttttcggatccagtgcaacaaatgggttatcatagagaggctgctgcttggttggaacagaacaagacattgtgattttctttgactgttttgtaaggaatcagtgaaggaggctgaattgtggaatactattgtgatgaacatagtgaagcaggctgagttgttgcgtgcttctggttctggtctcagggagttacttggaaggggtttgtctctccgactctgctactgctttttaggcactgcttttttttgaagcacacattgttgtagctgaaacctccataatttcttcaccggttttatttaatctcttgttgcaattataggtgtacacaaaaactaatttttcatttgcttgtattactaaacttaatttcacaatcagccttgtagcactttgagattctgttgtttatttcttgtattagatattcttctgagtactggaataaagtcaatttatcatttttcatcagtaacatcttgagaggctgcttcttacatacaaacctaaagaaccagaggaaattcttgagcctgctcctcttgaagaggaaatggcaccagttgaagatcatgttcttgtaccacctgttaatgaagttgtttcacctcctcccaagactgaggtgtcccgatactggtgacttactggttgggaaaattataatatggtctaaatcttatgtgcttgattctaaaatctgaagttgtgttcctggtgtggaaatagagttgttgggctatttgtgtggggtgtgggttggcatgttcggagctgttcctggttggaaccagtgattttgctactcttttgacggataatttgagtttggagtcgtcgaattttgaaacagaggagtgggtttacatgtaatgttggcaaacgggatctgaattattaataaagcaacactgtttcgctgatatttttagttccaatctctacttctaattatatatatttgtgagatagaattatgcattgtgtactcacataatatttttcattgcatttgtgtggccaggacgtttggaaactttagaccacacggttttttagttcaatcatactcatagtgcgacaagtgat

SEQ ID NO: 220097 - DNA, 4352 bp, Zea Mays
caaattctggtgaagcacgccacgcccccgcctgcctctcctcgccccactctgtctcccgcaatcctcgccttctcgccccaaattgtcggggctctcggtcctcgcccacgctctctatggaaggagatcgcctccgctgcaccccagcactcttgccccggatcgtggtcgggagaggaggcgacatccgaaacacggtgagtggagaggatcccgtttggcccctgggtaggtcggcttccttgtgccccgaatctcggtcctcgcccaccctctccatggaaggggattccgtgtatcgcgagcggatcatggtcgggagaggaggtggcatccaaagcgcagcgagtggagaggatctagtttggcccctgagtaggttggcttccatgtgccccggatcccggtcctcgcccaccctgtgccctggatctcgatcctcgcccaccctctccatagaaggggatcccgtgtatcgcaagcagaccgtggtcgggagaggaggcggtatccgaagcatgacgaggactcctgaggctatggggatttacgcatgaagggtcaaatcaatggtgctcagggggattctggtgcagatcaactaaatactactattgatgacagtgaagaagtgacacacttctatgggatatgactacaaaatcctccagacaagagaagcaaagtgatgtttcatctaatgttgttaagctacaactagtctcagggagtagtaggctgcctgttattgtcttgcattggtctgctgggtcagcagtacattctaataaaggagggcatctttttgtttatggcggcgatgatatgggatctgaagaagttctcatggtttgcctattttttcttactcattattacaatttcttttgcttgccatcttaaaggctgctgtgcacacaatatgccttcttaggtttgctgctttacaaatttggtaaagtgaattcctagcttcctgaactgaaatcatggtcacctggctgtgagcctatgacatgtgtttagtgtagagacacagtactagcttgacatggcgatagggcaacccgggtttgcatgaaacatgatcaaccatgagagtttcctgcaagtataagaattgtttcctcaggcagaacccatgttgtcgacccaaacaattctgaagatatttttagttcaggtctcagcatccaaataatgtatacatacctatcataatcacttccctaaacatggaagaagataattgtttccgaaatattgcactgcagaaaactcagcctccatcaatgacaaaatttcgcattctcttgcaggttcttagcttggaatcaactgctggattagaatcagtgagatgcatgtcacgaactgatctcaaacttgatggatcatttgctgacatgattcttattcctgatactggggttcttgataaaagcagaattctgcaccttttgttttgacaaatcctggatagctgaatttttatgacggtggctctctattttctgtgcaaaactcaaaagagggaaatcctcttcctgaagcacagaaatttcaagtcgcaattcctacccttgatcccaacataacggtcactggtctttattcgctaaccaaaagtgaatttccaaatatttcactgaagaaattttgtgctaggaaaaatgttgggcatttcatatcagagaacatgaaatgacctttgactggtggggttccaaatgagatgtcactgaacgaagatcatgctgttgaaagaatataaattgcaggctaccaagatggttctgtgagtatatgggatgcaacatttcctgttctaatgccaatgtttgtcttggatggttgctgatgttaatttggatggagctaatgcttctgtatgatctctagccttttgttcattaagcatgactttagctgttgggacaacaagtggtctgttgtgcatctataaactccgagaacacattggggattcaagcttccattttgtgagtgaatttaagcaagaaggtaaatatttcatacggaacctgattatatatgcctaaagcttcacctgctgcctattccccaacaatgttgtcatctttgttaagacagttttatgccaatttcacttcttctcaccagcacgtacaagatgtctgtcgtgactggtcatctaacaagcagaatccataacatgcttctttggtaaagagagacagtaaattggtactgtcacttacgtgaatgtttattattgaaatgaaaatacatttgattatgatcggacacttataaaaacttgacttgcggggctaagacaacctccgagcattgtgtgatagagaagacctctcatacatgccaaaacaaccttgcccacgtgagcgaccgcgacctggtccgggtcatagtcacaaagtttgtggatcgatagggttgaggaacatcgtacgctacgtgtgagagatttttacatggtgggaacaaaaatgaccttgcgtacccgggtcgagggtcgctaccactgtacccatttcttgtgactatggttttggtcttcgacccgtgctttggtgtggtggcaggcgaggggattttttaaccccagtctgaaataatgtgtttgtttttatgtaatctttgtgctctaatatactgctccgattgatatgttggcctgctaaagctattattttcagtttgcttgcatggaactcattatttttactagctctgttttatttaaacttatagtagcacatgtgtccattattgatattgattaatctagctcctatcattatgttcactatattgaattagttttgacaaaaaccctggtaagctggaatcacattgttttgtagatatttttcttcaatataaatgcttaaacttaacctgataaattcatctacatgctctttcaaatggcaagcccactattgttgagttttatgcaaattggtgtgaagtctgcagggaacaagctccatatatctacaaagttgaacaacaatacaaagactgtggaattgtgaggtctgtccatgctgcctgctagaaatgggaaaatatgttagcagtagcaacaagtgtttttggcctttgatcttctggaggtcatgtggttgcagttctaccgatacttgttctacttgggcaaaattaggacaattcagttggagtacactgatgctaaagaaagcctcctgcaagttgctcgtaaggcaccaacaacagcccatggttttcggatccagtgcaacaaatgggttatcatagagaggctgctgcttggttggaacagaacaagacattgtgattttctttgactgttttgtaaggaatcagtgaaggaggctgaattgtggaatactattgtgatgaacatagtgaagcaggctgagttgttgcgtgcttctggttctggtctcagggagttacttggaaggggtttgtctctccgactctgctactgctttttaggcactgcttttttttgaagcacacattgttgtagctgaaacctccataatttcttcaccggttttatttaatctcttgttgcaattataggtgtacacaaaaactaatttttcatttgcttgtattactaaacttaatttcacaatcagccttgtagcactttgagattctgttgtttatttcttgtattagatattcttctgagtactggaataaagtcaatttatcatttttcatcagtaacatcttgagaggctgcttcttacatacaaacctaaagaaccagaggaaattcttgagcctgctcctcttgaagaggaaatggcaccagttgaagatcatgttcttgtaccacctgttaatgaagttgtttcacctcctcccaagactgaggtgtcccgatactggtgacttactggttgggaaaattataatatggtctaaatcttatgtgcttgattctaaaatctgaagttgtgttcctggtgtggaaatagagttgttgggctatttgtgtggggtgtgggttggcatgttcggagctgttcctggttggaaccagtgattttgctactcttttgacggataatttgagtttggagtcgtcgaattttgaaacagaggagtgggtttacatgtaatgttggcaaacgggatctgaattattaataaagcaacactgtttcgctgatatttttagttccaatctctacttctaattatatatatttgtgagatagaattatgcattgtgtactcacataatatttttcattgcatttgtgtggccaggacgtttggaaactttagaccacacggttttttagttcaatcatactcatagtgcgacaagtgat

SEQ ID NO: 220098 - DNA, 3981 bp, Zea Mays
atcaaattctggtgaagcacgccacgcccccgcctgcctctcctcgccccactctgtctcccgcaatcctcgccttctcgccccaaattgtcggggctctcggtcctcgcccacgctctctatggaaggagatcgcctccgctgcaccccagcactcttgccccggatcgtggtcgggagaggaggcgacatccgaaacacggtgagtggagaggatcccgtttggcccctgggtaggtcggcttccttgtgccccgaatctcggtcctcgcccaccctctccatggaaggggattccgtgtatcgcgagcggatcatggtcgggagaggaggtggcatccaaagcgcagcgagtggagaggatctagtttggcccctgagtaggttggcttccatgtgccccggatcccggtcctcgcccaccctgtgccctggatctcgatcctcgcccaccctctccatagaaggggatcccgtgtatcgcaagcagaccgtggtcgggagaggaggcggtatccgaagcatgacgaggactcctgtttctgtcagaggctatggggatttacgcatgaagggtcaaatcaatggtgctcagggggattctggtgcagatcaactaaatactactattgatgacagtgaagaagtgacacacttctatgggatatgactacaaaatcctccagacaagagaagcaaagtgatgtttcatctaatgttgttaagctacaactagtctcagggagtagtaggctgcctgttattgtcttgcattggtctgctgggtcagcagtacattctaataaaggagggcatctttttgtttatggcggcgatgatatgggatctgaagaagttctcatggttcttagcttggaatcaactgctggattagaatcagtgagatgcatgtcacgaactgatctcaaacttgatggatcatttgctgacatgattcttattcctgatactggggttcttgataaaagcagaattctgcaccttttgttttgacaaatcctggatagctgaatttttatgacggtggctctctattttctgtgcaaaactcaaaagagggaaatcctcttcctgaagcacagaaatttcaagtcgcaattcctacccttgatcccaacataacggtcactggtctttattcgctaaccaaaagtgaatttccaaatatttcactgaaggtgcattctgctcaaatttggatattttactctatctagacatcatcattacttatgtaagaccatatcgctgtggattttctgtagaaattttgtgctaggaaaaatgttgggcatttcatatcagagaacatgaaatgacctttgactggtggggttccaaatgagatgtcactgaacgaagatcatgctgttgaaagaatataaattgcaggctaccaagatggttctgtgagtatatgggatgcaacatttcctgttctaatgccaatgtttgtcttggatggttgctgatgttaatttggatggagctaatgcttctgtatgatctctagccttttgttcattaagcatgactttagctgttgggacaacaagtggtctgttgtgcatctataaactccgagaacacattggggattcaagcttccattttgtgagtgaatttaagcaagaaggtaaatatttcatacggaacctgattatatatgcctaaagcttcacctgctgcctattccccaacaatgttgtcatctttgttaagacagttttatgccaatttcacttcttctcaccagcacgtacaagatgtctgtcgtgactggtcatctaacaagcagaatccataacatgcttctttggtaaagagagacagtaaattggtactgtcacttacgtgaatgtttattattgaaatgaaaatacatttgattatgatcggacacttataaaaacttgacttgcggggctaagacaacctccgagcattgtgtgatagagaagacctctcatacatgccaaaacaaccttgcccacgtgagcgaccgcgacctggtccgggtcatagtcacaaagtttgtggatcgatagggttgaggaacatcgtacgctacgtgtgagagatttttacatggtgggaacaaaaatgaccttgcgtacccgggtcgagggtcgctaccactgtacccatttcttgtgactatggttttggtcttcgacccgtgctttggtgtggtggcaggcgaggggattttttaaccccagtctgaaataatgtgtttgtttttatgtaatctttgtgctctaatatactgctccgattgatatgttggcctgctaaagctattattttcagtttgcttgcatggaactcattatttttactagctctgttttatttaaacttatagtagcacatgtgtccattattgatattgattaatctagctcctatcattatgttcactatattgaattagttttgacaaaaaccctggtaagctggaatcacattgttttgtagatatttttcttcaatataaatgcttaaacttaacctgataaattcatctacatgctctttcaaatggcaagcccactattgttgagttttatgcaaattggtgtgaagtctgcagggaacaagctccatatatctacaaagttgaacaacaatacaaagactgtggaattgtgaggtctgtccatgctgcctgctagaaatgggaaaatatgttagcagtagcaacaagtgtttttggcctttgatcttctggaggtcatgtggttgcagttctaccgatacttgttctacttgggcaaaattaggacaattcagttggagtacactgatgctaaagaaagcctcctgcaagttgctcgtaaggcaccaacaacagcccatggttttcggatccagtgcaacaaatgggttatcatagagaggctgctgcttggttggaacagaacaagacattgtgattttctttgactgttttgtaaggaatcagtgaaggaggctgaattgtggaatactattgtgatgaacatagtgaagcaggctgagttgttgcgtgcttctggttctggtctcagggagttacttggaaggggtttgtctctccgactctgctactgctttttaggcactgcttttttttgaagcacacattgttgtagctgaaacctccataatttcttcaccggttttatttaatctcttgttgcaattataggtgtacacaaaaactaatttttcatttgcttgtattactaaacttaatttcacaatcagccttgtagcactttgagattctgttgtttatttcttgtattagatattcttctgagtactggaataaagtcaatttatcatttttcatcagtaacatcttgagaggctgcttcttacatacaaacctaaagaaccagaggaaattcttgagcctgctcctcttgaagaggaaatggcaccagttgaagatcatgttcttgtaccacctgttaatgaagttgtttcacctcctcccaagactgaggtgtcccgatactggtgacttactggttgggaaaattataatatggtctaaatcttatgtgcttgattctaaaatctgaagttgtgttcctggtgtggaaatagagttgttgggctatttgtgtggggtgtgggttggcatgttcggagctgttcctggttggaaccagtgattttgctactcttttgacggataatttgagtttggagtcgtcgaattttgaaacagaggagtgggtttacatgtaatgttggcaaacgggatctgaattattaataaagcaacactgtttcgctgatatttttagttccaatctctacttctaattatatatatttgtgagatagaattatgcattgtgtactcacataatatttttcattgcatttgtgtggccaggacgtttggaaactttagaccacacggttttttagttcaatcatactcatagtgcgacaagtgat

SEQ ID NO: 220099 - DNA, 3644 bp, Zea Mays
atcaaattctggtgaagcacgccacgcccccgcctgcctctcctcgccccactctgtctcccgcaatcctcgccttctcgccccaaattgtcggggctctcggtcctcgcccacgctctctatggaaggagatcgcctccgctgcaccccagcactcttgccccggatcgtggtcgggagaggaggcgacatccgaaacacggtgagtggagaggatcccgtttggcccctgggtaggtcggcttccttgtgccccgaatctcggtcctcgcccaccctctccatggaaggggattccgtgtatcgcgagcggatcatggtcgggagaggaggtggcatccaaagcgcagcgagtggagaggatctagtttggcccctgagtaggttggcttccatgtgccccggatcccggtcctcgcccaccctgtgccctggatctcgatcctcgcccaccctctccatagaaggggatcccgtgtatcgcaagcagaccgtggtcgggagaggaggcggtatccgaagcatgacgaggactcctgtttctgtcagaggctatggggatttacgcatgaagggtcaaatcaatggtgctcagggggattctggtgcagatcaactaaatactactattgatgacagtgaagaagtaagagaaatttgctttctttgttgggcttcaagagatggctcaattgttgcggtgggctatataacaggttcttagcttggaatcaactgctggattagaatcagtgagatgcatgtcacgaactgatctcaaacttgatggatcatttgctgacatgattcttattcctgatactggggttcttgataaaagcagaattctgcaccttttgttttgacaaatcctggatagctgaatttttatgacggtggctctctattttctgtgcaaaactcaaaagagggaaatcctcttcctgaagcacagaaatttcaagtcgcaattcctacccttgatcccaacataacggtcactggtctttattcgctaaccaaaagtgaatttccaaatatttcactgaaggtgcattctgctcaaatttggatattttactctatctagacatcatcattacttatgtaagaccatatcgctgtggattttctgtagaaattttgtgctaggaaaaatgttgggcatttcatatcagagaacatgaaatgacctttgactggtggggttccaaatgagatgtcactgaacgaagatcatgctgttgaaagaatataaattgcaggctaccaagatggttctgtgagtatatgggatgcaacatttcctgttctaatgccaatgtttgtcttggatggttgctgatgttaatttggatggagctaatgcttctgtatgatctctagccttttgttcattaagcatgactttagctgttgggacaacaagtggtctggttagatcttgtcagtcttacgaattggtcgaagggtggtcatttgtatcattttagaatatgtttttataccattttttgtagttgtgcatctataaactccgagaacacattggggattcaagcttccattttgtgagtgaatttaagcaagaaggtaaatatttcatacggaacctgattatatatgcctaaagcttcacctgctgcctattccccaacaatgttgtcatctttgttaagacagttttatgccaatttcacttcttctcaccagcacgtacaagatgtctgtcgtgactggtcatctaacaagcagaatccataacatgcttctttggtaaagagagacagtaaattggtactgtcacttacgtgaatgtttattattgaaatgaaaatacatttgattatgatcggacacttataaaaacttgacttgcggggctaagacaacctccgagcattgtgtgatagagaagacctctcatacatgccaaaacaaccttgcccacgtgagcgaccgcgacctggtccgggtcatagtcacaaagtttgtggatcgatagggttgaggaacatcgtacgctacgtgtgagagatttttacatggtgggaacaaaaatgaccttgcgtacccgggtcgagggtcgctaccactgtacccatttcttgtgactatggttttggtcttcgacccgtgctttggtgtggtggcaggcgaggggattttttaaccccagtctgaaataatgtgtttgtttttatgtaatctttgtgctctaatatactgctccgattgatatgttggcctgctaaagctattattttcagtttgcttgcatggaactcattatttttactagctctgttttatttaaacttatagtagcacatgtgtccattattgatattgattaatctagctcctatcattatgttcactatattgaattagttttgacaaaaaccctggtaagctggaatcacattgttttgtagatatttttcttcaatataaatgcttaaacttaacctgataaattcatctacatgctctttcaaatggcaagcccactattgttgagttttatgcaaattggtgtgaagtctgcagggaacaagctccatatatctacaaagttgaacaacaatacaaagactgtggaattgtgaggtctgtccatgctgcctgctagaaatgggaaaatatgttagcagtagcaacaagtgtttttggcctttgatcttctggaggtcatgtggttgcagttctaccgatacttgttctacttgggcaaaattaggacaattcagttggagtacactgatgctaaagaaagcctcctgcaagttgctcgtaaggcaccaacaacagcccatggttttcggatccagtgcaacaaatgggttatcatagagaggctgctgcttggttggaacagaacaagacattgtgattttctttgactgttttgtaaggaatcagtgaaggaggctgaattgtggaatactattgtgatgaacatagtgaagcaggctgagttgttgcgtgcttctggttctggtctcagggagttacttggaagggtaacatcttgagaggctgcttcttacatacaaacctaaagaaccagaggaaattcttgagcctgctcctcttgaagaggaaatggcaccagttgaagatcatgttcttgtaccacctgttaatgaagttgtttcacctcctcccaagactgaggtgtcccgatactggtgacttactggttgggaaaattataatatggtctaaatcttatgtgcttgattctaaaatctgaagttgtgttcctggtgtggaaatagagttgttgggctatttgtgtggggtgtgggttggcatgttcggagctgttcctggttggaaccagtgattttgctactcttttgacggataatttgagtttggagtcgtcgaattttgaaacagaggagtgggtttacatgtaatgttggcaaacgggatctgaattattaataaagcaacactgtttcgctgatatttttagttccaatctctacttctaattatatatatttgtgagatagaattatgcattgtgtactcacataatatttttcattgcatttgtgtggccaggacgtttggaaactttagaccacacggttttttagttcaatcatactcatagtgcgacaagtgat

SEQ ID NO: 220100 - DNA, 723 bp, Zea Mays
ccggaaattcagattgctggctccaaggcttatcagcaagggaagatctatggaattgatgccgcttctggagctgctatattagcacttgatgttcgaccaggaaatcatgttcttgacctctgtgctgccccaggtgcaaagctttgcatgctcgcagatacgcttggaaccactggttctctgactggtgttgatgttgcaaagcaccgccttgcggcctgtcgtacaatgttgcagaagtattctcttggtgaccgtactcggctctttgttgctgatggaactttgttttcccttttacctgtgaactccaggatgcaaagaatggaagggtcaattggcgttgaagaaaatggaagcatattcccagaatggacttcaaggagatcatggaaggatcggcagaagactaggaaagcaaatgcaaatggtcaacagcacctactggcagcttcagaacctgaactgatatactatggtaaacattcaggattagttggacagtgtaaatctgatgtcttttgtccatcagttgatgatgaagcttgtacatctggctatgacaaggtcctagtggatgcggagtgtactcatgatggatccataaaacatattcaaaaatttgaattctggggatggaaaagtctagatcgccgcgtacttgatgctgaaagaactgagaaccttcttcagcttcagatggttttgtaaacttcattt

SEQ ID NO: 220101 - DNA, 779 bp, Zea Mays
tctgaatgcggtgagtggtgcaaatatgagttcttaggttggggctcatttcaacggtggtggcagagcacctaggatatggtctgacggagacaacattggattaaggagagttgatggctttggatgtgcaataccaggtgcatggccgaagacagtgtcatacttgtttacagacgagtaccttgctggaagttttggagggattgtccattccaggagtgcgacggcttgttgttattgaacaaagtaccagatttgtggaaggaatcatctcattgagagacgtatttacatttctccttggatagcatgtgtagccattccatacatgaaaaagcttgctgtacttggttcaaacgaaataaaaagcttacaaatgtgatagtcatcttcttgtttccatcttgttttggttgatattatgcctcagacactgcatatttaaactgtgccgaaaaaaaaagaacagtggcaggtgctgcagcccttctaagcagaagtatgcagaagtgttcaggtgattgtttcttgcactcgtccagctaacatttcacgatttgcaggtttgaagaactgctacttgcaagttaggaatgcttcacgaatcacgatatttttaagaggccgagatttctgtttttttaaaacatcgatacaggctacagaatcagtttcgtaccgtctttgaaactagggaattttgaaggaactgaatcttgtggcttttttattttttttggaatgaggtgaaatgacctcttcaaattcgaacatct

SEQ ID NO: 220102 - DNA, 2367 bp, Zea Mays
gttttggccgttacataatgcctgtaaggtagaatgccattgcagttgttgcatcagaaagcagccatttaacgccattgtaaagtgagtgatgattaaatacagccacacttctgtctctcaggtttctgtacatggagtttttattgcacctcttcttccccagcaattagtacttgcagttagattaaatgaatcctgaatgccccttaactgttggctttacatggaactacttttgcatataccagacaactattttgaacttcaatatgtttttcaattccagcaattgatcgaaacatgatatatttgacatattcacgatggatttgtgtatttgatgtgtcgctttttcatctatcaatgtaattcttggacataacattgcgcacagtaccggtttttggttgatggtgtctggaggtgtgatgagacaaaaccctttgtacgtgatgaatatggactgatcagcaatgaagtgcttgtggaaaacaatgtacaacctgttgtgcagccagagccttctatcagaggaactaatatggataagggtaccattttgaaaacaatgcccccggagccatcatctcagaacccaagcatgcaaatagcagttatccgccatgtggtctctggaatattattacacaataccatatatgacgttgttcccctttctagcaagttaacagttttggacactcagcttcctgttaaacaagcatttaaaataatgcatgatgaggtatgtatgttactgtgcttgctagagttgcttcaaatagttcactttccctctatggtgcttgtttgctctcatttcaactttgctctgtttttaatttcattttgaagaatttttaaaggtgtgctagcaattatttgcctttttaagtagcagtttaatttgttttcctattatgttttgcagtttaaaaacacaacaaaatcgctcctagaagcaggcacttctttcatctgcactgcatacgtggcatcagtttaataatttaagaatagcttcaaaccttttgtgtctcatagggtcttgctctggttcctctttgggatgaccgtcagggaaccataacaggcatgctcactgcatcagattttgttttaatcttgagaaagttgcagagaaacattcaagttattggcaacgaagagcccatttctgcttggaaagaagcaaagctacagttctatggtgggcctgatggtgctgccatgcagagaaggccattaatccatgttaaggattcagataatttagtggatgtggcactgactataatcagaaatgaaatatcttcagttcctatctttaagtgcatggcagattcatcaggggtgcctttccttaatcttgcaaccttacaggggatcttgaaatttctttgctcgaagctacaagaagaggctgagggctgttcccttctgcacaatcagcttctcagtattcctattggtacatggtctccacatacggggaggtcaagtagcaggcaactcagaactttgctactgagttctcctctaaatacctgcctggatattctgcttcaagatagagtaagctcaattcctatagttgatgacaatggatccctccgtgatgtctactcactcagtgatatcatggctctggcgaagaatgatgtttatgctcgcatcgaacttgaacaagtgaccgtacaaaatgctttggatgtgcaataccaggtgcatggccgaagacagtgtcatacttgtttacagacgagtaccttgctggaagttttggagggattgtccattccaggagtgcgacggcttgttgttattgaacaaagtaccagatttgtggaaggaatcatctcattgagagacgtatttacatttctccttggatagcatgtgtagccattccatacatgaaaaagcttgctgtacttggttcaaacgaaataaaaagcttacaaatgtgatagtcatcttcttgtttccatcttgttttggttgatattatgcctcagacactgcatatttaaactgtgccgaaaaaaaaagaacagtggcaggtgctgcagcccttctaagcagaagtatgcagaagtgttcaggtgattgtttcttgcactcgtccagctaacatttcacgatttgcaggtttgaagaactgctacttgcaagttaggaatgcttcacgaatcacgatatttttaagaggccgagatttctgtttttttaaaacatcgatacaggctacagaatcagtttcgtaccgtctttgaaactagggaattttgaaggaactgaatcttgtggcttttttattttttttggaatgaggtgaaatgacctcttcaaattcgaacatct

SEQ ID NO: 220103 - DNA, 1765 bp, Zea Mays
ccaggtttctctctcctcactcctccttcgcttgtcgctccgcttcaccccagcagggcagagccccgctctcccttcacaccaaagatttcctcttccgcgtgcgcttccctttgccccgctctcccccagcctcgctcgccatataatacgggccggccggccggccagctgggtccccgcggatgggctcggtctcgcgaggctagggtttggtcggtcgtctcgccggcgtcgaggccgccagcgctgctagctagctctctcgcgttagggttccccgtagccatggtgctgcagcgcttctcgtggccgtacggcggccggagcgccaccttctgcggtagcttcaccgggtggagagagtgtcccatggggctggtcggggccgtgttccaggtcgtcttcgatctgccccccggagtttaccagtaccggtttttggttgatggtgtctggaggtgtgatgagacaaaaccctttgtacgtgatgaatatggactgatcagcaatgaagtgcttgtggaaaacaatgtacaacctgttgtgcagccagagccttctatcagaggaactaatatggataagggtaccattttgaaaacaatgcccccggagccatcatctcagaacccaagcatgcaaatagcagttatccgccatgtggtctctggaatattattacacaataccatatatgacgttgttcccctttctagcaagttaacagttttggacactcagcttcctgttaaacaagcatttaaaataatgcatgatgaggtatgtatgttactgtgcttgctagagttgcttcaaatagttcactttccctctatggtgcttgtttgctctcatttcaactttgctctgtttttaatttcattttgaagaatttttaaaggtgtgctagcaattatttgcctttttaagtagcagtttaatttgttttcctattatgttttgcagtttaaaaacacaacaaaatcgctcctagaagcaggcacttctttcatctgcactgcatacgtggcatcagtttaataatttaagaatagcttcaaaccttttgtgtctcatagggtcttgctctggttcctctttgggatgaccgtcagggaaccataacaggcatgctcactgcatcagattttgttttaatcttgagaaagttgcagagaaacattcaagttattggcaacgaagagcccatttctgcttggaaagaagcaaagctacagttctatggtgggcctgatggtgctgccatgcagagaaggccattaatccatgttaaggattcagataatttagtggatgtggcactgactataatcagaaatgaaatatcttcagttcctatctttaagtgcatggcagattcatcaggggtgcctttccttaatcttgcaaccttacaggggatcttgaaatttctttgctcgaagctacaagaagaggctgagggctgttcccttctgcacaatcagcttctcagtattcctattggtacatggtctccacatacggggaggtcaagtagcaggcaactcagaactttgctactgagttctcctctaaatacctgcctggatattctgcttcaagatagagtaagctcaattcctatagttgatgacaatggatccctccgtgatgtctactcactcagtgatatcatggctctggcgaagaatgatgtttatgctcgcatcgaacttgaacaagtgaccgtacaaaatcattcaacacaagtcctttgcag

SEQ ID NO: 220104 - DNA, 724 bp, Zea Mays
tattttttcatctcgtcaccctagtagaatcattgtcatcttcgttgccctgctagtcccgtagcttctctccctcctcgctcctcggctcctcgcttgtcgctcctcctcagccctcaccgcgttccctcggtcccaccttccccgcgaagtaaccaccactaggacatcggtccacacgctaagcatctagtgcatctaggtctacgcggcgcgggcacgcggccggtacagcttccccctgccccccatcctcctcgtcgccggatgatcgccgccggcgccgcctcgatggggcgcgcagcgactccagcccccggggcccagtcctcccggttgccgcgcgccgtctcgaggctgcggcttgtgcttcgctcctcggaagcagcagcgaggagcggcagcaagagatggatagggtgcttccggccgtcgccatcgccggccaccgccgcggcgggggcggccgtggtgaaggaggcgaagggaaagcggccggaggtggaggtggagccggcgcgcggcggaggggaggacgtgtggagcgccgatgctgagaccgaagtggctcagggtggggcgttccccgagcacctcgtcatcatggtcaatggcctcgtcgggagcgcggacgattggaagttcgcggcagagcagtttgtgaggcggatgccggacaaggtgatcgtgcaccattaaaggcagctgccatcatccgctgctt

SEQ ID NO: 220105 - DNA, 1195 bp, Zea Mays
cattggaagattggggtggatatgtgctagaaaactctccacagtgcatggaaagaaatatcaagattgcgtgacaatgtcagtaccaaaaggagcagactccagcttcaaaagcaaaaactcaagctgtttgctattcttaggaggcagatgtcatttctagaggactggtctcatatcgaaaaacatcattcaagtgctttatcagcagcaatcaaagctctgaaggctagtactctacgtcttccagttgttgatggtgcaaaggctgatgcactagctgtgaaggaagcagttaactcagcagtggatgtaatgaacacaatgacatcatcaatatgtaatttgctgtctaaggtcgagggaacaagctctgtggtgtctgagctttctaaacttgcaacacaagaacaaatgttgttggaccaatcaaaggatctcttgtccacggttgcagcaatacatgtaaaaaactgcagtttgcaaactcatatgctacagcgaaaccaaaagcagagcccggcacagttgtagatcagtttgccctcgccacattgggtggtcactaacaacatcacacggcctcatgttttctcaccggagactgtgcctacaggtaataaaaagctgtaaccatttgttgggtgtgaagcgtttcctaatctgctcggtcgacctcactgagtgtagctgattcgtgtaattgtttgagtgcatatcaaccatagaagcggcccctgctcgccgcaattggtgtatacagaaacccctagccttgacccaaagataagcttcctgtagatatgaaaagagcttgtcgtttgcgtgcttgctcttctgtgtggagtgctcgagtggtgatgagtgtttgtattgtgtaagggagacggttgctggcttgatacaggtgtctcattgcaaaatcaacaagttgtttctcctgacttgctcatggaatcacagtatctgctttgatgcatactgattcctgaaagagtataaatctatctcttagcgctgtaaagattctgcttgctgcatgggccgtcaaacgtttgttgcggtctttggtgtcaagtttagggccgtggctgcaacaactgctttgggcttgttgtttttatggttatgctgatccagttgggatgcaatgcaacaaagtgaaaatgaatttgaatatacctatcagttgtgt

SEQ ID NO: 220106 - DNA, 1360 bp, Zea Mays
ccgccgtagccgtagtaatggcggtggtggtcggcgaggcgggcgctgaaggcgttgcgggggctggtgaagctgcaggcgctggtccggggcaacatcgtgcggcggcaggcggcggagacgctgcgatgcatgcacgcgctcgtccgcgtccaggcgcgcgcgcgcgcctgccgcgcaattcgctcgcagcatgtcacggcgcatccggatccgccgacgccggagaagtacgagcaggcgggtgcgcccaggcacggccgttccggctctctgaaggcgaactcttcgaggacaccgggcggcgagaggctgggcagggagaggtcggaatcctgcgggaggaactggctggaccgctgggtggaggagaggtacatggacgacgagaagaacgccaagattctcgaggtggacaacggcaagccacggcgccggtatgcttccaagaggcgcggcggcggcggcggaaaccaccaccaccaccaccagtcgccgtgctcgacgacgatgggttccgagcagaacagccggagctacgcgaccatggcggagtcgccgtccaaggactcgacgaccgcgcagcagtcggtgccgagcccggcgtcggtgggcatggccgaggaggccctgagcccgctgcgcgtgcccgtgcccgcggacgtggccgagctctgcgacagcccccagttcttctcggccacgtcgtcgcggcccgggagctcgaggcggggcccgttcacgccgacggccaagagcgagtgctcgcgcagcctcttcggcggctactccgactacccgaactacatggccaacacggagtcgttccgcgccaaggcgcggtcgcagagcgcgcccaagcagaggccgcagtacgagaggtccagctccctacgcagggcgtcggcggcgcagaggtcggcggcggcggcggcctcctccctgcacgccaagttcaccaacaaggcgtacccgggctctggcaggctggatcggcttggcttgccggccaggtactgatcctgatcctgatcctgcctaattcgcgccagggatgatgtgctgccgctgtgtctcgagcgaggacgacgacgaagaagtgcaatcgactagtggtagttaggttccgtgccttggttgtgctattaccatcaacagtttttctgtttcttgctttgtgtagctagccatgtctaaagttgctggtagctgtaatgatgctataatgcgtgcttaactgctgacgaaccttttcctctacatttccgtggtatatatatatgtgccgtcaaatcatgcatgggaattgaatgtgttgttgcaaatgctggctcgataagatatactactacgtaagctc

SEQ ID NO: 220107 - DNA, 1831 bp, Zea Mays
aagccgccacacatcggatatcgcccgcccgaacgggtggctgcggcgcatgcaatcgccttatccccccggcccgccgccccgcggccacaagcgcaagcagtgaacacggcgcctcctcgctcgcgcggccacgcccccgtcgtcgtcttctcccggcaggccaccggggagaacgccgtgagggcgcccgcagaggcgaagctgaaggtggcgatcaacggcttcggccgcatcggccggaacttcctccggtgctggcacggccgcgaggactcgccgatcgacgtcgtcgtcgtgaacgacagcggaggcgtcaggaacgcgtcccacctcctcaagtacgactcgatgctcggcaccttcaaggccgacgtcaagatcgtggacgacacgaccatcagcgtcgacggcaagcccatcacggtcgtctccagcagggacccgctcaagctcccatggggtgagctcggcattgacatcgtcatcgagggcaccggagtcttcgtcgacggccccggcgccggcaagcacatccaggccggcgcgaagaaggtgatcatcacggctcccgccaagggcgccgacatcccgacctatgtcgtcggcgtcaacgagggcgactacgaccacagcgtcgccgacatcatcagcaacgcgtcctgcacgaccaactgcctcgcgccattcgtcaagatcttggacgaggagttcggaatcgtgaaggggaccatgacgacgacgcactcgtacaccggcgaccagaggctgctggacgcgtcccaccgcgacctccggcgggcccgcgcggcggcgctgaacatcgtgccgacgagcacgggcgccgccaaggccgtggcgctggtgctgccgcagctcaaggggaagctgaacggcatcgcgctgcgggtgccgaccccgaacgtgtccgtggtggacctggtgatcaacaccgtgaagactggcatcacggccgacgacgtgaacgcggcgttccgcaaggccgccgccggcccgctgcagggcatcctggaggtctgcgacgtgccgctcgtgtccgtcgacttcaggtgctccgacgtgtcctgcaccatcgacgcgtcgctcagcatggtcatgggcgacgacatggtcaaggtcgtcgcctggtacgacaacgagtgggggtacagccaacgcgtggttgatctggcgcacctggtggcggccaagtggcccggcgcggcggcggccggcagcggcgaccctctggaggacttctgcaaggacaaccccgagaccgacgagtgcaaggtgtacgaagcatgaggccagggttctttccacgacgaaacgtacagcacgggcgcgagggttctttccatagagaataatatacagattattcgacgaaagagacgtatgttatatatatatatgagttgtatgcagtcaccgaactggcggtacaggcttccgctttccatttcctgttgggagtcgtgtagtgtaatcctggggtgtgtatttgtttcatcaaccatgcctgccgatttgaatctcgtttcaccagcatggcagcattatctgatttgggtatacaagtataaaccgcaacgagcgatcttgtaaaaagagaaacggagttgcagggggttaagggtttctctccaagatagataccttggatagaaaatttcatctcagaagaagacagtgtggctgtaaacgttaaatgacaaaatatgtcatggtttttaaacgaaggaaggctttaggcaagaaggtatgctttcgctcctccttttttaatatgataggagatatgttggctatagaaattaaaagggca

SEQ ID NO: 220108 - DNA, 3347 bp, Zea Mays
aagagcgagtcagcgagaggcaattccgctgccgcaattcaacacgcgaggctaaaaacaattcgaaacccccgacctacgccgagtcgccgagaaaacaacagtgctccggcgcttagagaagagcgaaaggcgagcgcgcagcacagcacggctcccgtgggccgtggcggaggcaaaaaccccgacccgcattaccccgaaaccctccgattcggcccggggcgagctcgaatccgtgcaacctcgccgccgccgggctcgatctgagccagggctaccgcgcgccggcgaggaatgaggagcgtgaacggcgaggtcgaggggacccacgaccacgaagggatcaatgtctcctgtagtggaatgtctcttggttttgagagacagtgtggatcctagattaggtgacgatattccaccagatgttaccagaactcctttgagaaaacaatggggagttccggaaatggacaagcctcaagttcatggtgcagcactagggaaaagatcccctgcagaggacaagagaaatggcgttgcagatcccaaagcccatcagaaaacttctgtcttttctggacaaaagttttgtgatgttttccaattaaaacacggatcatattctggacctgctgctgccaagatttcagagatgatgcactctaatagcttagataatgcaccaacacagtcacttattagtgttgtcaatggcattttggatgaaagcatagaaaggaaaaagggagaaataccacatcgtgtagtttacttactgcggaaagtcgttcaagagattgagcgccgtctctatattcaagcagaacacataagaagtcaaaatgttatcatgaagagaagagaacagaagtactgttcaaaaattaaagtacttgaaatgttggtaaatggcacaaatgaagaaaaccagatggcaataaacaggcttcagatagtcaagaatgagaagtcaaaaatcgaagagaggagaaaacttagtgagcaagatgttcatcgattgatgagagagaaagaacattctgaaaacatcatagcaaacctaaagaaagatatagaagccatgaatagattgcatgaacagcaacttgagcaaactgaaagaaaggcaaaggaaatggaggagcaactaaccaccaaagtaaaagaagtagagtatctcttgctacaatcgaagaagaaagttgaagaagttgagactgcttccaggctaaaatcacagttatgggataagaaagaggacaattttcagagtcacatggataatcaacaactaattatcaaggacataagaatattgtcgcgatcatgtgaaaatgatatgtatgcacttcaaatgcagtggagaaatgagatctctaacttaggatctgggttaaaatgtttggttgatgctgctgaaaattatcataaagtcttggcggagaaccaaaagttatttaatgaagtgcaagaactaaaaggtaatataagagtatattgtcgtgtgaggccatttctttcgggtcaagacaaaaagtctactacaattgactacatgggggaaaatggtgagcttcttatatcaaatccatttaaacaagggaaggacggacacagattgttcaagtttaataaagtgtttagtccatttgcttctcaagctgaggttttttctgacatacaaccactaatccgatcagtcctggatggattcaacgtttgtatttttgcatatggtcagactggttctggcaaaacttacaccatgagtgggcctagcacatcgaagcaagattggggtgtcaattatcgggctttaaatgatttgtttgatatttcactaagtagaagaaatgccttctcatatgaggtgggtgtacagatggttgagatatacaatgaacaagttcgtgatttgctatcaaatgatattgcacagagaaggcttgggatttggagcacttctcaacccaatgggcttgttgttccagatgcaagcttgcactcagttaagtcgacatctgatgtattagacttgatggaaattgggcaagcaaatagagcagttggttcaacagcactaaatgagcgaagtagtcggtcacacagtattctaactgtacatgttcgagggttggatttgaagaatggatctacctcgaggggttgtttgcatcttattgatcttgctggtagtgagagggtggagaagtctgaagtaactggggatagattaaaagaagctcaatacatcaacaaatcactttctgcgttaggcgatgtgatttttgctctgtcacagaaaagtatccacgtgccttatagaaacagcaagctaacacaagttcttcaaagttctttaggtaatcaagtatttatttactaccagtaaactagatcttaaatagatttatgtgaatattttaaatatttgtactaccttttgctttcttccaggtggacaagcaaaaactctaatgttcgttcaaataaatcctgatgttgagtcatattcagaaactataagcactttaaagtttgctgaaagggtgtctggagtagagttaggtgctgcaagaagcaacaaggagggaaaggatataaaagagctactggaacaggttgcgtctttgaaagacacaatttcacgcaaagatatggaaatagagcagctccaagtcatcaaagacaaagcaaaatccccaaatttattgttagatagaaatgggcctggcttgacaaagattacagtaaaccaacctagccaactattatcaggcgaacgaatgctcaagtctagtgacagagttctatcagatcctcctgataacagagattctaaccataatttgacggatactgctccagtgagcttagatgaagcagaatatgatggcaatgcatctgatgatggtttatcaggtgaagccgagaattacaattcagctgctgagatgacagcggaacggttgcatggaattccatcaagaataagcagattcactctcacaaaaaacgggcaaccatctatgtctagatcaaaatcaaaggatgctaagactccaagtaatgcaaaagctccatctagccagttaacaggaggttcttcagccagggggtctaaaagatggcagaagtaaagcacgatcatgttgctcgtgttgatgcacattgtaattgaaatgtgaatttgctgggtagctgtgttagaaagttaggcatttttagttttaatttaatccagaaaaacagtgcgatatatgtgatgacatgtatgtgcatgtgtgtataactactcgcataagcagtaaacaacaatgaaacatgcacaaatacgaagaaca

SEQ ID NO: 220109 - DNA, 3209 bp, Zea Mays
aagagcgagtcagcgagaggcaattccgctgccgcaattcaacacgcgaggctaaaaacaattcgaaacccccgacctacgccgagtcgccgagaaaacaacagtgctccggcgcttagagaagagcgaaaggcgagcgcgcagcacagcacggctcccgtgggccgtggcggaggcaaaaaccccgacccgcattaccccgaaaccctccgattcggcccggggcgagctcgaatccgtgcaacctcgccgccgccgggctcgatctgagccagggctaccgcgcgccggcgaggaatgaggagcgtgaacggcgaggtcgaggggacccacgaccacgaagggatcaatgtctcctgtagtggaatgtctcttggttttgagagacagtgtggatcctagattaggtgacgatattccaccagatgttaccagaactcctttgagaaaacaatggggagttccggaaatggacaagcctcaagttcatggtgcagcactagggaaaagatcccctgcagaggacaagagaaatggcgttgcagatcccaaagcccatcagaaaacttctgtcttttctggacaaaagttttgtgatgttttccaattaaaacacggatcatattctggacctgctgctgccaagatttcagagatgatgcactctaatagcttagataatgcaccaacacagtcacttattagtgttgtcaatggcattttggatgaaagcatagaaaggaaaaagggagaaataccacattttacttactgcggaaagtcgttcaagagattgagcgccgtctctatattcaagcagaacacataagaagtcaaaatgttatcatgaagagaagagaacagaagtactgttcaaaaattaaagtacttgaaatgttggtaaatggcacaaatgaagaaaaccagatggcaataaacaggcttcagatagtcaagaatgagaagtcaaaaatcgaagagaggagaaaacttagtgagcaagatgttcatcgattgatgagagagaaagaacattctgaaaacatcatagcaaacctaaagaaagatatagaagccatgaatagattgcatgaacagcaacttgagcaaactgaaagaaaggcaaaggaaatggaggagcaactaaccaccaaagtaaaagaagtagagtatctcttgctacaatcgaagaagaaagttgaagaagttgagactgcttccaggctaaaatcacagttatgggataagaaagaggacaattttcagagtcacatggataatcaacaactaattatcaaggacataagaatattgtcgcgatcatgtgaaaatgatatgtatgcacttcaaatgcagtggagaaatgagatctctaacttaggatctgggttaaaatgtttggttgatgctgctgaaaattatcataaagtcttggcggagaaccaaaagttatttaatgaagtgcaagaactaaaaggtaatataagagtatattgtcgtgtgaggccatttctttcgggtcaagacaaaaagtctactacaattgactacatgggggaaaatggtgagcttcttatatcaaatccatttaaacaagggaaggacggacacagattgttcaagtttaataaagtgtttagtccatttgcttctcaagctgaggttttttctgacatacaaccactaatccgatcagtcctggatggattcaacgtttgtatttttgcatatggtcagactggttctggcaaaacttacaccatgagtgggcctagcacatcgaagcaagattggggtgtcaattatcgggctttaaatgatttgtttgatatttcactaagtagaagaaatgccttctcatatgaggtgggtgtacagatggttgagatatacaatgaacaagttcgtgatttgctatcaaatgatattgcacagagaaggcttgggatttggagcacttctcaacccaatgggcttgttgttccagatgcaagcttgcactcagttaagtcgacatctgatgtattagacttgatggaaattgggcaagcaaatagagcagttggttcaacagcactaaatgagcgaagtagtcggtcacacagaatggatctacctcgaggggttgtttgcatcttattgatcttgctggtagtgagagggtggagaagtctgaagtaactggggatagattaaaagaagctcaatacatcaacaaatcactttctgcgttaggcgatgtgatttttgctctgtcacagaaaagtatccacgtgccttatagaaacagcaagctaacacaagttcttcaaagttctttaggtggacaagcaaaaactctaatgttcgttcaaataaatcctgatgttgagtcatattcagaaactataagcactttaaagtttgctgaaagggtgtctggagtagagttaggtgctgcaagaagcaacaaggagggaaaggatataaaagagctactggaacaggttgcgtctttgaaagacacaatttcacgcaaagatatggaaatagagcagctccaagtcatcaaagacaaagcaaaatccccaaatttattgttagatagaaatgggcctggcttgacaaagattacagtaaaccaacctagccaactattatcaggcgaacgaatgctcaagtctagtgacagagttctatcagatcctcctgataacagagattctaaccataatttgacggatactgctccagtgagcttagatgaagcagaatatgatggcaatgcatctgatgatggtttatcaggtgaagccgagaattacaattcagctgctgagatgacagcggaacggttgcatggaattccatcaagaataagcagattcactctcacaaaaaacgggcaaccatctatgtctagatcaaaatcaaaggatgctaagactccaagtaatgcaaaagctccatctagccagttaacaggaggttcttcagccagggggtctaaaagatggcagaagtaaagcacgatcatgttgctcgtgttgatgcacattgtaattgaaatgtgaatttgctgggtagctgtgttagaaagttaggcatttttagttttaatttaatccagaaaaacagtgcgatatatgtgatgacatgtatgtgcatgtgtgtataactactcgcataagcagtaaacaacaatgaaacatgcacaaatacgaagaaca

SEQ ID NO: 220110 - DNA, 3764 bp, Zea Mays
aagagcgagtcagcgagaggcaattccgctgccgcaattcaacacgcgaggctaaaaacaattcgaaacccccgacctacgccgagtcgccgagaaaacaacagtgctccggcgcttagagaagagcgaaaggcgagcgcgcagcacagcacggctcccgtgggccgtggcggaggcaaaaaccccgacccgcattaccccgaaaccctccgattcggcccggggcgagctcgaatccgtgcaacctcgccgccgccgggctcgatctgagccagggctaccgcgcgccggcgaggaatgaggagcgtgaacggcgaggtcgaggggacccacgaccacgaagctaatcggcgtggtcagctgatcgaatggatgaacgccttactcccggaattcagtttgcctccggattcatcggatgaagagctacgagagctgctcagtgacggcgtggtcctgtgccgtgttgcgaacacactcatcccgggggttcttgagggatcctgggacggttatgcaccgtcggatcaacggttgggcaatctgaacaaattcctctcagtgattgctgatatggggctgccaggtttcagtgtgaaagatcttgatgagggatcaatgtctcctgtagtggaatgtctcttggttttgagagacagtgtggatcctagattaggtgacgatattccaccagatgttaccagaactcctttgagaaaacaatggggagttccggaaatggacaagcctcaagttcatggtgcagcactagggaaaagatcccctgcagaggacaagagaaatggcgttgcagatcccaaagcccatcagaaaacttctgtcttttctggtagatttatttctcgcacaacctttcaagaatcatccagaaatgagatattcagattctgattacagctgacataattttaatccgttacaaattgcacattcaatgatcattatcatttaatatcgtttctaagctgcgcgcatccacaatattataacatttcccactttgtatagtgttattcattgtgtccggtgcagatttcatatctgtttaatctacggaggattgttatatgtcccacaggacaaaagttttgtgatgttttccaattaaaacacggatcatattctggacctgctgctgccaagatttcagagatgatgcactctaatagcttagataatgcaccaacacagtcacttattagtgttgtcaatggcattttggatgaaagcatagaaaggaaaaagggagaaataccacattttacttactgcggaaagtcgttcaagagattgagcgccgtctctatattcaagcagaacacataagaagtcaaaatgttatcatgaagagaagagaacagaagtactgttcaaaaattaaagtacttgaaatgttggtaaatggcacaaatgaagaaaaccagatggcaataaacaggcttcagatagtcaagaatgagaagtcaaaaatcgaagagaggagaaaacttagtgagcaagatgttcatcgattgatgagagagaaagaacattctgaaaacatcatagcaaacctaaagaaagatatagaagccatgaatagattgcatgaacagcaacttgagcaaactgaaagaaaggcaaaggaaatggaggagcaactaaccaccaaagtaaaagaagtagagtatctcttgctacaatcgaagaagaaagttgaagaagttgagactgcttccaggctaaaatcacagttatgggataagaaagaggacaattttcagagtcacatggataatcaacaactaattatcaaggacataagaatattgtcgcgatcatgtgaaaatgatatgtatgcacttcaaatgcagtggagaaatgagatctctaacttaggatctgggttaaaatgtttggttgatgctgctgaaaattatcataaagtcttggcggagaaccaaaagttatttaatgaagtgcaagaactaaaaggtaatataagagtatattgtcgtgtgaggccatttctttcgggtcaagacaaaaagtctactacaattgactacatgggggaaaatggtgagcttcttatatcaaatccatttaaacaagggaaggacggacacagattgttcaagtttaataaagtgtttagtccatttgcttctcaagctgaggttttttctgacatacaaccactaatccgatcagtcctggatggattcaacgtttgtatttttgcatatggtcagactggttctggcaaaacttacaccatgagtgggcctagcacatcgaagcaagattggggtgtcaattatcgggctttaaatgatttgtttgatatttcactaagtagaagaaatgccttctcatatgaggtgggtgtacagatggttgagatatacaatgaacaagttcgtgatttgctatcaaatgatattgcacagagaaggcttgggatttggagcacttctcaacccaatgggcttgttgttccagatgcaagcttgcactcagttaagtcgacatctgatgtattagacttgatggaaattgggcaagcaaatagagcagttggttcaacagcactaaatgagcgaagtagtcggtcacacagtattctaactgtacatgttcgagggttggatttgaagaatggatctacctcgaggggttgtttgcatcttattgatcttgctggtagtgagagggtggagaagtctgaagtaactggggatagattaaaagaagctcaatacatcaacaaatcactttctgcgttaggcgatgtgatttttgctctgtcacagaaaagtatccacgtgccttatagaaacagcaagctaacacaagttcttcaaagttctttaggtggacaagcaaaaactctaatgttcgttcaaataaatcctgatgttgagtcatattcagaaactataagcactttaaagtttgctgaaagggtgtctggagtagagttaggtgctgcaagaagcaacaaggagggaaaggatataaaagagctactggaacaggttgcgtctttgaaagacacaatttcacgcaaagatatggaaatagagcagctccaagtcatcaaagacaaagcaaaatccccaaatttattgttagatagaaatgggcctggcttgacaaagattacagtaaaccaacctagccaactattatcaggcgaacgaatgctcaagtctagtgacagagttctatcagatcctcctgataacagagattctaaccataatttgacggatactgctccagtgagcttagatgaagcagaatatgatggcaatgcatctgatgatggtttatcaggtgaagccgagaattacaattcagctgctgagatgacagcggaacggttgcatggaattccatcaagaataagcagattcactctcacaaaaaacgggcaaccatctatgtctagatcaaaatcaaaggatgctaagactccaagtaatgcaaaagctccatctagccagttaacaggaggttcttcagccagggggtctaaaagatggcagaagtaaagcacgatcatgttgctcgtgttgatgcacattgtaattgaaatgtgaatttgctgggtagctgtgttagaaagttaggcatttttagttttaatttaatccagaaaaacagtgcgatatatgtgatgacatgtatgtgcatgtgtgtataactactcgcataagcagtaaacaacaatgaaacatgcacaaatacgaagaaca

SEQ ID NO: 220111 - DNA, 1737 bp, Zea Mays
cgccgtgatggcgcgtctcttcttcctcctcctcctctttccgctcctctactcctccgtcaccggcctcaaccgcagcgacttcccgccgtccttcctcttcggcgccagcacgtcgtcttaccaggtcgaaggcgcatacctagacgacagcaagggcctaagcaattgggatgtcttctcccatgttccaggaaatattgacgatggaagcaatggcgacgtagctgctgaccattatcatcgatacaaggacgacatagaaatgatgcattcgattggtctcagctcctacagattctcattgtcgtggtcgagaattcttccaaagggtcgcttcggaggtgttaatcaggcaggcgttaaattctacaatagcctcatcaacggactgctagaaaaagggatacaaccatttgtgacgatcaaccactatgacatacctgaagaactccaagaaagatacaattcttggttgaacccagagattcaggaggacttcacctacttcgttgagctttgcttcaagatgtttggtgaccgagtaaagcactgggtcacattcaatgagccaaatcttattgtaaagcttgcatactccattggggcatttccacccaaccgttgttccgagccatatgggaaatgtgattcagggaattcatcaactgagccctacattgcagcgcataacatgatattagctcatgcaaagacggtcaacatctacagaaagaattacaagtccaagcaaggtggctttgtaggaatttcattacatctaagatggtatgaaccactaaggaatatcacagaggaccacttggcagtaagccgagctctgtctttcgatgctccatggatcttggatcccttgttctttggtgactatcctcaccagatgcgccaaatcttaggtccaaacttgccaaaatttacagaaggagagaagaaactactgaagaaccaaattgacttcatcgggacacctgttgcaaacacctatgtcgttccaagctccatggagaagttggtcatgtatttaaagcagagatataaaagcatacctttgtacatcacagagaacggttatgcccaaatagccaatattagcactacagcagaagaaataattaatgatattgaaagatcaacttacattcgtgactacctcacttacttgagctttgcaataaggttgttgcatgcctcaattatcttttcatgtaaactgctctccagccaggtaataataaaactttgctacttttgtgcaggaaaggagcagatgtgagaggttattttgtgtggtctttgatggataacttcgaatggatctctggttacaccgtaaagtatggtctttgtcatgtgaatttcaagtcactaaagcgaacaccaaaattgtctgctaaatggtatagcaagtttatcaagggctatgaacagatagagatggcctctgaagaattgcctaagcatatggtttcctagtacagaaatacagaattctcaaagtccttgtttctacattactcaatgatttgttaaaaatgtttacaccgtaatttttctcatgcccatgtatgccagtgccataataaaatctaagcttatttttttcaaatatgtatctaaagggagtttactgaaaaggaagaagcagagtagtagagtacatagtctggccaagcagagtagtagagtacatagtctggccatcctccttctagccca

SEQ ID NO: 220112 - DNA, 791 bp, Zea Mays
cgccgtgatggcgcgtctcttcttcctcctcctcctctttccgctcctctactcctccgtcaccggcctcaaccgcagcgacttcccgccgtccttcctcttcggcgccagcacgtcgtcttaccaggtcgaaggcgcatacctagacgacagcaagggcctaagcaattgggatgtcttctcccatgttccaggaaatattgacgatggaagcaatggcgacgtagctgctgaccattatcatcgatacaaggacgacatagaaatgatgcattcgattggtctcagctcctacagattctcattgtcgtggtcgagaattcttccaaagggtcgcttcggaggtgttaatcaggcaggcgttaaattctacaatagcctcatcaacggactgctagaaaaagggatacaaccatttgtgacgatcaaccactatgacatacctgaagaactccaagaaagatacaattcttggttgaacccagagattcaggaggacttcacctacttcgttgagctttgcttcaagatgtttggtgaccgagtaaagcactgggtcacattcaatgagccaaatcttattgtaaagcttgcatactccattggggcatttccacccaaccgttgttccgagccatatgggaaatgtgattcagggaattcatcaactgagccctacattgcagcgcataacatgatattagctcatgcaaagacggtcaacatctacagaaagaattacaagtccaagcaagaaggagagaagaaactactgaagaaccaaattgact

SEQ ID NO: 220113 - DNA, 2326 bp, Zea Mays
catacacatcacaagagcggggcacacgatgcgttgcattgcatggctccgccacacacaccccttgcatgtaccccacccaccacggcggcataagtatctccgccggctacgcgcgatccaggcccggccgcgtgcgtgcgtgcgtgcgacgactgcacccatacacacatatacgcgctctggctggctgcctgcctggcttgcggagctccgtttcggccggccatctctcgctacgctacgagcgcgcgcggcccccgcgcccgtgtcttcccgctgtcgaccgtcgtgttgatcgtacatgcagctgctagtagcgaactatagttgcagaccgcatcagtgcgtgacaagaggatatatattatcagacacgcacgcgatcgcgcggagatgaaccagtgcgtgccgagctgggatctggtggacgacccgacggcggcggtagctggcggcggaggcggcctaaaccatcaggtctcgacgaccgggggcgcgcaccggggcctgctcctgcaggcgtcagctggaggagcaggcggcgggggcgcgttcgctcccgtcgtcgtgcccatgtcgaaccagtactacgaggtggcggagctgacgtgggagaagggcaacatctcctcccacggcctgctcaaccgcccggcgcacaataagtacccgcccgccgcggcgccgtcgtcggctcagctgcatgccatagcaggaggaggcggccgcggcggcgggtcgccatccggggaccgcgagacgctcgaggcggtggtcggcgaggcggccgcgcggtcgcacttcctctcgcagccggcgccgccgtggctgatcggcgccgacgccgtggcgcgggccgcggcggacgcgctagtgccgtgcgccgcaagggcgggcgagtccgctgcagacggcggagaagcgggcgcctcgaggaggaagcggccgcgcgtggtcggcgacgacagtctggtggtgtgcgccagccaggggagcaccgcgcctcgccgccgcggcgagagcgcgctgctcacgcagctggacgcctgcggcaccgaggccgacgacgtgtgcggcttcagaacgaccacaaccaacaactccacgtccatggaccgtgacgacaaaggctccccggatactgagaacaccagcatcggcggaggggccagtgattcgcgctgtttcagccgtcgctcacagagagacggcttatgcgacgacgacgaggagaacgtggtgatcaacggggacgacggggcgatgaggtcgtcgatttccaccaagaggagccgggctgctgcgacccataacgaatctgagcgtaaacgaagggacaggatcaaccagaagatgaaaacgctgcagaagctcgtcccgaactcgaacaagacagacaaggcgtcgatgctggacgaggtgatcgactacctgaagcagctgcaggcgcaggtgcagctgatgagccggatgggaagcatgatgatgcccatggcgatgccgcagctccagatgtcgatgatggcccagatggcacagatggcgcagatggcgcagatggcccagatgaacatgggctccctcggccagccgggctacgcaggcctcacgccgcccatgatgcacccgccccccttcgtccccgtgtcctgggacaccaccgccaccgccaccacctccctcgccccgcaggccggcagcggcacggtgccagcggacgccttctccgccttcctagcttgccaagcgcagcagaacgggcagcagcaaccgggtagcatggaggcgtacaatagaatggtggcgctgtaccagaagatgaaccaaacgcagcagagcgcgcccagcaacccgtccaagcagtgagcatgacgtacgtacagctgctttcttgtacattgtttgttcagttttgtttagatttttttggctcattttatcgcatttgttcagattctttcctctcaattgatgaggcctggaactgtgtaacagagtctatgacagctggggcccgcgagcaggaggtggcgcatgcagtcttctgcagagaggagagagaaatcgtggaaaaagggagtgcagggaaccgtttgtctgcctagaatattgtcacacccggcttttagaagaaacacaatacatatgtatgtgttcccagtaaattactcacacatactacgacatcgttaatgataatattacactataccggcttactagagcatgcaaaacccacataaatgatatatatcttaagagatatcaagtgggtaagtgtaaaaaataccaaagacgtatcttggtgaaggaatgtctttat

SEQ ID NO: 220114 - DNA, 2218 bp, Zea Mays
acgatgcgttgcattgcatggctccgccacacacaccccttgcatgtaccccacccaccacggcggcataagtatctccgccggctacgcgcgatccaggcccggccgcgtgcgtgcgtgcgtgcgacgactgcacccatacacacatatacgcgctctggctggctgcctgcctggcttgcggagctccgtttcggccggccatctctcgctacgctacgagcgcgcgcggcccccgcgcccgtgtcttcccgctgtcgaccgtcgtgttgatcgtacatgcagctgctagtagcgaactatagttgcagaccgcatcagtgcgtgacaagaggatatatattatcagacacgcacgcgatcgcgcggagatgaaccagtgcgtgccgagctgggatctggtggacgacccgacggcggcggtagctggcggcggaggcggcctaaaccatcaggtctcgacgaccgggggcgcgcaccggggcctgctcctgcaggcgtcagctggaggagcaggcggcgggggcgcgttcgctcccgtcgtcgtgcccatgtcgaaccagtactacgaggtggcggagctgacgtgggagaagggcaacatctcctcccacggcctgctcaaccgcccggcgcacaataagtacccgcccgccgcggcgccgtcgtcggctcagctgcatgccatagcaggaggaggcggccgcggcggcgggtcgccatccggggaccgcgagacgctcgaggcggtggtcggcgaggcggccgcgcggtcgcacttcctctcgcagccggcgccgccgtggctgatcggcgccgacgccgtggcgcgggccgcggcggacgcgctagtgccgtgcgccgcaagggcgggcgagtccgctgcagacggcggagaagcgggcgcctcgaggaggaagcggccgcgcgtggtcggcgacgacagtctggtggtgtgcgccagccaggggagcaccgcgcctcgccgccgcggcgagagcgcgctgctcacgcagctggacgcctgcggcaccgaggccgacgacgtgtgcggcttcagaacgaccacaaccaacaactccacgtccatggaccgtgacgacaaaggctccccggatactgagaacaccagcatcggcggaggggccagtgattcgcgctgtttcagccgtcgctcacagagagacggcttatgcgacgacgacgaggagaacgtggtgatcaacggggacgacggggcgatgaggtcgtcgatttccaccaagaggagccgggctgctgcgacccataacgaatctgagcgtaaacgaagggacaggatcaaccagaagatgaaaacgctgcagaagctcgtcccgaactcgaacaagacagacaaggcgtcgatgctggacgaggtgatcgactacctgaagcagctgcaggcgcaggtgcagctgatgagccggatgggaagcatgatgatgcccatggcgatgccgcagctccagatgtcgatgatggcccagatggcacagatggcgcagatggcgcagatggcccagatgaacatgggctccctcggccagccgggctacgcaggcctcacgccgcccatgatgcacccgccccccttcgtccccgtgtcctgggacaccaccgccaccgccaccacctccctcgccccgcaggccggcagcggcacggtgccagcggacgccttctccgccttcctagcttgccaagcgcagcagaacgggcagcaaccgggtagcatggaggcgtacaatagaatggtggcgctgtaccagaagatgaaccaaacgcagcagagcgcgcccagcaacccgtccaagcagtgagcatgacattctttcctctcaattgatgaggcctggaactgtgtaacagagtctatgacagctggggcccgcgagcaggaggtggcgcatgcagtcttctgcagagaggagagagaaatcgtggaaaaagggagtgcagggaaccgtttgtctgcctagaatattgtcacacccggcttttagaagaaacacaatacatatgtatgtgttcccagtaaattactcacacatactacgacatcgttaatgataatattacactataccggcttactagagcatgcaaaacccacataaatgatatatatcttaagagatatcaagtgggtaagtgtaaaaaataccaaagacgtatcttggtgaaggaatgtctttat

SEQ ID NO: 220115 - DNA, 2738 bp, Zea Mays
catggctccgccacacacaccccttgcatgtaccccacccaccacggcggcataagtatctccgccggctacgcgcgatccaggcccggccgcgtgcgtgcgtgcgtgcgacgactgcacccatacacacatatacgcgctctggctggctgcctgcctggcttgcggagctccgtttcggccggccatctctcgctacgctacgagcgcgcgcggcccccgcgcccgtgtcttcccgctgtcgaccgtcgtgttgatcgtacatgcagctgctagtagcgaactatagttgcagaccgcatcagtgcgtgacaagaggatatatattatcagacacgcacgcgatcgcgcggagatgaaccagtgcgtgccgagctgggatctggtggacgacccgacggcggcggtagctggcggcggaggcggcctaaaccatcaggtctcgacgaccgggggcgcgcaccggggcctgctcctgcaggcgtcagctggaggagcaggcggcgggggcgcgttcgctcccgtcgtcgtgcccatgtcgaaccagtactacgaggtggcggagctgacgtgggagaagggcaacatctcctcccacggcctgctcaaccgcccggcgcacaataagtacccgcccgccgcggcgccgtcgtcggctcagctgcatgccatagcaggaggaggcggccgcggcggcgggtcgccatccggggaccgcgagacgctcgaggcggtggtcggcgaggcggccgcgcggtcgcacttcctctcgcagccggcgccgccgtggctgatcggcgccgacgccgtggcgcgggccgcggcggacgcgctagtgccgtgcgccgcaagggcgggcgagtccgctgcagacggcggagaagcgggcgcctcgaggaggaagcggccgcgcgtggtcggcgacgacagtctggtggtgtgcgccagccaggggagcaccgcgcctcgccgccgcggcgagagcgcgctgctcacgcagctggacgcctgcggcaccgaggccgacgacgtgtgcggcttcagaacgaccacaaccaacaactccacgtccatggaccgtgacgacaaaggctccccggatactgagaacaccagcatcggcggaggggccagtgattcgcgctgtttcagccgtcgctcacagagagacggcttatgcgacgacgacgaggagaacgtggtgatcaacggggacgacggggcgatgaggtcgtcgatttccaccaagaggagccgggctgctgcgacccataacgaatctgagcgtaaacgaagggacaggatcaaccagaagatgaaaacgctgcagaagctcgtcccgaactcgaacaagacagacaaggcgtcgatgctggacgaggtgatcgactacctgaagcagctgcaggcgcaggtgcagctgatgagccggatgggaagcatgatgatgcccatggcgatgccgcagctccagatgtcgatgatggcccagatggcacagatggcgcagatggcgcagatggcccagatgaacatgggctccctcggccagccgggctacgcaggcctcacgccgcccatgatgcacccgccccccttcgtccccgtgtcctgggacaccaccgccaccgccaccacctccctcgccccgcaggccggcagcggcacggtgccagcggacgccttctccgccttcctagcttgccaagcgcagcagaacgggcagcaaccgggtagcatggaggcgtacaatagaatggtggcgctgtaccagaagatgaaccaaacgcagcagagcgcgcccagcaacccgtccaagcagtgagcatgacattctttcctctcaattgatgaggcctggaactgtgtaacagaggtgtgaaacccgtcgacgcggtacctgtagcatcatgtatttgttttggttcttgaccactctatccttgtatataaggagaccagacgttgcgcaaccgttgagcggagaccaactccagcagactctctctccgtatccgtatttaggacggccaacagtttctctctcctctccgtatccgtctccgtttctagcagactccgtatttacactccgcatgcagtctatgacagctggggcccgcgagcaggaggtggcgcatgcagtcttctgcagagaggagagagaaatcgtggaaaaagggagtgcaggtacacggtgtctgttttgcggagacagatgtggaggctgctggagagcgaaatagtgactcagagcgtgtataatgcggatgcggagtgggatggggagtgtagctggagttggtcccagaagcaccggaagtcgaacaggtgatgaaggcgatgtcacgcaagtagtagtagtgtgtacggtactaaagactttatttatttctgctggcaaatgagtgcagattagataaatcaacccaagcacgattgaagaccattatctgattgcttaacttgtcaatcattaatcctacatctcaatttttagggaaccgtttgtctgcctagaatattgtcacacccggcttttagaagaaacacaatacatatgtatgtgttcccagtaaattactcacacatactacgacatcgttaatgataatattacactataccggcttactagagcatgcaaaacccacataaatgatatatatcttaagagatatcaagtgggtaagtgtaaaaaataccaaagacgtatcttggtgaaggaatgtctttat

SEQ ID NO: 220116 - DNA, 2352 bp, Zea Mays
ccacccaccacggcggcataagtatctccgccggctacgcgcgatccaggcccggccgcgtgcgtgcgtgcgtgcgacgactgcacccatacacacatatacgcgctctggctggctgcctgcctggcttgcggagctccgtttcggccggccatctctcgctacgctacgagcgcgcgcggcccccgcgcccgtgtcttcccgctgtcgaccgtcgtgttgatcgtacatgcagctgctagtagcgaactatagttgcagaccgcatcagtgcgtgacaagaggatatatattatcagacacgcacgcgatcgcgcggagatgaaccagtgcgtgccgagctgggatctggtggacgacccgacggcggcggtagctggcggcggaggcggcctaaaccatcaggtctcgacgaccgggggcgcgcaccggggcctgctcctgcaggcgtcagctggaggagcaggcggcgggggcgcgttcgctcccgtcgtcgtgcccatgtcgaaccagtactacgaggtggcggagctgacgtgggagaagggcaacatctcctcccacggcctgctcaaccgcccggcgcacaataagtacccgcccgccgcggcgccgtcgtcggctcagctgcatgccatagcaggaggaggcggccgcggcggcgggtcgccatccggggaccgcgagacgctcgaggcggtggtcggcgaggcggccgcgcggtcgcacttcctctcgcagccggcgccgccgtggctgatcggcgccgacgccgtggcgcgggccgcggcggacgcgctagtgccgtgcgccgcaagggcgggcgagtccgctgcagacggcggagaagcgggcgcctcgaggaggaagcggccgcgcgtggtcggcgacgacagtctggtggtgtgcgccagccaggggagcaccgcgcctcgccgccgcggcgagagcgcgctgctcacgcagctggacgcctgcggcaccgaggccgacgacgtgtgcggcttcagaacgaccacaaccaacaactccacgtccatggaccgtgacgacaaaggctccccggatactgagaacaccagcatcggcggaggggccagtgattcgcgctgtttcagccgtcgctcacagagagacggcttatgcgacgacgacgaggagaacgtggtgatcaacggggacgacggggcgatgaggtcgtcgatttccaccaagaggagccgggctgctgcgacccataacgaatctgagcgtaaacgaagggacaggatcaaccagaagatgaaaacgctgcagaagctcgtcccgaactcgaacaagacagacaaggcgtcgatgctggacgaggtgatcgactacctgaagcagctgcaggcgcaggtgcagctgatgagccggatgggaagcatgatgatgcccatggcgatgccgcagctccagatgtcgatgatggcccagatggcacagatggcgcagatggcgcagatggcccagatgaacatgggctccctcggccagccgggctacgcaggcctcacgccgcccatgatgcacccgccccccttcgtccccgtgtcctgggacaccaccgccaccgccaccacctccctcgccccgcaggccggcagcggcacggtgccagcggacgccttctccgccttcctagcttgccaagcgcagcagaacgggcagcaaccgggtagcatggaggcgtacaatagaatggtggcgctgtaccagaagatgaaccaaacgcagcagagcgcgcccagcaacccgtccaagcagtgagcatgacaggtgtgaaacccgtcgacgcggtacctgtagcatcatgtatttgttttggttcttgaccactctatccttgtatataaggagaccagacgttgcgcaaccgttgagcggagaccaactccagcagactctctctccgtatccgtatttaggacggccaacagtttctctctcctctccgtatccgtctccgtttctagcagactccgtatttacactccgcatgcagtctatgacagctggggcccgcgagcaggaggtggcgcatgcagtcttctgcagagaggagagagaaatcgtggaaaaagggagtgcagggaaccgtttgtctgcctagaatattgtcacacccggcttttagaagaaacacaatacatatgtatgtgttcccagtaaattactcacacatactacgacatcgttaatgataatattacactataccggcttactagagcatgcaaaacccacataaatgatatatatcttaagagatatcaagtgggtaagtgtaaaaaataccaaagacgtatcttggtgaaggaatgtctttat

SEQ ID NO: 220117 - DNA, 1166 bp, Zea Mays
ctccaaataagatgcaatactacaccaaacgaagggacaggatcaaccagaagatgaaaacgctgcagaagctcgtcccgaactcgaacaagacagacaaggcgtcgatgctggacgaggtgatcgactacctgaagcagctgcaggcgcaggtgcagctgatgagccggatgggaagcatgatgatgcccatggcgatgccgcagctccagatgtcgatgatggcccagatggcacagatggcgcagatggcgcagatggcccagatgaacatgggctccctcggccagccgggctacgcaggcctcacgccgcccatgatgcacccgccccccttcgtccccgtgtcctgggacaccaccgccaccgccaccacctccctcgccccgcaggccggcagcggcacggtgccagcggacgccttctccgccttcctagcttgccaagcgcagcagaacgggcagcaaccgggtagcatggaggcgtacaatagaatggtggcgctgtaccagaagatgaaccaaacgcagcagagcgcgcccagcaacccgtccaagcagtgagcatgacattctttcctctcaattgatgaggcctggaactgtgtaacagaggtgtgaaacccgtcgacgcggtacctgtagcatcatgtatttgttttggttcttgaccactctatccttgtatataaggagaccagacgttgcgcaaccgttgagcggagaccaactccagcagactctctctccgtatccgtatttaggacggccaacagtttctctctcctctccgtatccgtctccgtttctagcagactccgtatttacactccgcatgcagtctatgacagctggggcccgcgagcaggaggtggcgcatgcagtcttctgcagagaggagagagaaatcgtggaaaaagggagtgcagggaaccgtttgtctgcctagaatattgtcacacccggcttttagaagaaacacaatacatatgtatgtgttcccagtaaattactcacacatactacgacatcgttaatgataatattacactataccggcttactagagcatgcaaaacccacataaatgatatatatcttaagagatatcaagtgggtaagtgtaaaaaataccaaagacgtatcttggtgaaggaatgtctttat

SEQ ID NO: 220118 - DNA, 1230 bp, Zea Mays
agatgcaatactacaccgacgctccaactctcagcttggcatacggcttttatatgggccctatataggccggaaaccaatgcgccaaaacgaagggacaggatcaaccagaagatgaaaacgctgcagaagctcgtcccgaactcgaacaagcagacagacaaggcgtcgatgctggacgaggtgatcgactacctgaagcagctgcaggcgcaggtgcagctgatgagccggatgggaagcatgatgatgcccatggcgatgccgcagctccagatgtcgatgatggcccagatggcacagatggcgcagatggcgcagatggcccagatgaacatgggctccctcggccagccgggctacgcaggcctcacgccgcccatgatgcacccgccccccttcgtccccgtgtcctgggacaccaccgccaccgccaccacctccctcgccccgcaggccggcagcggcacggtgccagcggacgccttctccgccttcctagcttgccaagcgcagcagaacgggcagcaaccgggtagcatggaggcgtacaatagaatggtggcgctgtaccagaagatgaaccaaacgcagcagagcgcgcccagcaacccgtccaagcagtgagcatgacattctttcctctcaattgatgaggcctggaactgtgtaacagaggtgtgaaacccgtcgacgcggtacctgtagcatcatgtatttgttttggttcttgaccactctatccttgtatataaggagaccagacgttgcgcaaccgttgagcggagaccaactccagcagactctctctccgtatccgtatttaggacggccaacagtttctctctcctctccgtatccgtctccgtttctagcagactccgtatttacactccgcatgcagtctatgacagctggggcccgcgagcaggaggtggcgcatgcagtcttctgcagagaggagagagaaatcgtggaaaaagggagtgcagggaaccgtttgtctgcctagaatattgtcacacccggcttttagaagaaacacaatacatatgtatgtgttcccagtaaattactcacacatactacgacatcgttaatgataatattacactataccggcttactagagcatgcaaaacccacataaatgatatatatcttaagagatatcaagtgggtaagtgtaaaaaataccaaagacgtatcttggtgaaggaatgtctttat

SEQ ID NO: 220119 - DNA, 1537 bp, Zea Mays
ctcctctctacccagccccagcctctcccggtctcccctcctctcctctcctctcctctcctcctcttcctctgcttctctccccgatctctatttcccatttccgggcggctcccgttctccacctcaattattgcccacccatccccgctccctcctctcctctcctcccgtcccacccatcacctcgcaccagcgccgggggaatggcggccgcgctgtggacgctgctagtggcggtggccctgtcggcggcgctggcctcgaaccgccccgtggcggcgacggcgacggcggcggcggaggcggcgaacgaggtgctccgcgcgcaccagctgccggggggcctgctgccggcggggatcacggcgttccggcacgacgccgccacgggggcgttcgaggcccggctggacgcgccctgcacggcgcgcttcgaggtcggcctccgctacaacgccaccgtctccggggtcatcagccccggccagatcgccgacatctccggcgtcgccgcgcaggacctcttcatgtggttccccgtccacgacatcaaggtcgacatcccctcctccggcgtcatctacttcaacgtcggcgtcgtcaagaagcacctcccgctcgccgtcttcgacgcgccgccggcctgcacgcccgacccgctcctgcaggtcatttctcatcctagcctcactctctcgatggcacgagctctaattcatcgatcttgggaccagtgacctccttgacatcattcaatcctcaatgatcttgaatgttggcacaacctttatacccagtttctttactgaaagctgcaagtagcatgcgcgggagcttttcagcatgtcatattccacggggcagagagtcgtgaatacacaagaaacagggaaatattcccaactgagggcttgattagagggggatttaagagattgaattcttttctatttaattttgaatagcaagagatttaatccgctccaatctccttcaatctactcctaatcgaacaaggattaagggcttgttcgctttcctctcaatccatgtgaattggttggaattgagtgggtttaaatttcaaacaagtcaaaatcttttggacttgttcgttttgtacttaaaccatgtggatcttttggacttgttcgttttgtacttaaaccatgtggattgaggggtattggggtgtattaaggccttgttcggttatttccaatacatatggattggatgagattgaaaaaaattgagaagaagtttgacttgtttaggattcaaactcatctaatctcactcaatccacatggattgagagctaaccgatcaaggcgtaaggtaaattttgactagttgtggatttatttcctctcaatccacatggatttggaaaaaaatgaacatcataatatttttcaatcctatccaattgacttgggacagaaataaccgaactagagtctacagtgaggtgagacgtgttcgcctcttgttgagtgactgaaacaaataagagattgttagagctcgg

SEQ ID NO: 220120 - DNA, 858 bp, Zea Mays
cccaactcccccacacaataggctggcagtggcaggcaaccagctcgggcgtgtccttcctcctccgtctccatcttggcccaaccgagcccaaacctctccccttttctccgtcctctcctagtccacacggcagacgccgccgccgggggagaggaggggaggggatcggctccaagggaacaggcgagatggcaatcctgtacgcgctggtggcgcgcggcacggtggtgctggcggagcacagcgcggcagccaccaacgcgggcgccatcgcgcgccaggtcctcgagcgcctccccgacggcggcgccgacagccacgtctcctacacgcaggaccgctacgtcttccacgccaagcgcaccgacggcatcaccgcgctctgcatggccgacgacgccgccggaagacggattcccttcgcatttttggaggatattcatggaaggtttgtcaagacatatggccgggctgcgctaaccgctcttgcatatgcaatgaatgatgaattctcaagggtcttgagccagcaaatggattactattcaaatgaccctagtgcagatagaataaaccgcatgagaggtgaaatcaatcaggtccgtagtgttatgattgataacattgataaggttcttgaaagaggtgatcgtttggaactgctggttgacaagactgcaaatatgcaaggaaatacagttcgattcaagagacaagctcggcggttcagaaacactgtttggtggagaaatgtcaaactcacggccgcattgatacttctcctcctggtaataatatatgtcgttctagtcttcgtgtgccatggtttcaccctaccaacttgcataagttcac

SEQ ID NO: 220121 - DNA, 1372 bp, Zea Mays
gcgcttcacacctgtacctgcacgcgccggccaggccccaccgccaattaaacaagcctcccgtctcgtcccaactcccccacacaataggctggcagtggcaggcaaccagctcgggcgtgtccttcctcctccgtctccatcttggcccaaccgagcccaaacctctccccttttctccgtcctctcctagtccacacggcagacgccgccgccgggggagaggaggggaggggatcggctccaagggaacaggcgagatggcaatcctgtacgcgctggtggcgcgcggcacggtggtgctggcggagcacagcgcggcagccaccaacgcgggcgccatcgcgcgccaggtcctcgagcgcctccccgacggcggcgccgacagccacgtctcctacacgcaggaccgctacgtcttccacgccaagcgcaccgacggcatcaccgcgctctgcatggccgacgacgccgccggaagacggattcccttcgcatttttggaggatattcatggaaggtttgtcaagacatatggccgggctgcgctaaccgctcttgcatatgcaatgaatgatgaattctcaagggtcttgagccagcaaatggattactattcaaatgaccctagtgcagatagaataaaccgcatgagaggtgaaatcaatcaggtccgtagtgttatgattgataacattgataaggttcttgaaagaggtgatcgtttggaactgctggttgacaagactgcaaatatgcaaggaaatacagttcgattcaagagacaagctcggcggttcagaaacactgtttggtggagaaatgtcaaactcacggccgcattgatacttctcctcctggtaataatatatgtcgttctagtcttcgtgtgccatggtttcaccctaccaacttgcataagttcacatgatgcaaaaaggattggattgaggctttgaggatgcaacgcctcaaataagacctaaaagatgcctagaagatcaataaatgtcaaacacacgtctaagactcaagaccaaaagaagcccaaggaaatagtgaagaaatccaagaagtggggagtcagccagcgctctagtggcgcaccagactgtccggtgtgaggccaccggactgtctagtgtgcacggatagcctacgcagagagccctgcaagtggactctcgggagctatatgtcacacccgggtttcggggcaccaagacccgggcgcgaacataatcaccaggtgtgctgggaccaagtctcacacatatgatgaatcatggcacaggatcgaatgtcacatcttaactatataattggagttctgtacaaaataaataattactttataaggagacaaaggtcc

SEQ ID NO: 220122 - DNA, 2040 bp, Zea Mays
cctgtcgtctccaactttcccttggtttggcttcctgccttcctggcctggcctagctcctctcctctcctccggcttgattgatcgatcgatcgatcgatccagccagccatccacccatcccttccaagtttccaactgacattgccgcgccgcgcaggcgcagcgcacgacttccgccctcccccaccctccgcctcacgcatataaacgcgcgcgcctgcctcccctgcccccgcctgcctgcccacgcgctccgctcctcgccccctcctcttcccacgccgccgccgtacccacgggcagggggcacggctggtggctcatcgctcggcccgctccccctccgtcgcaaccggaacataccagcaccggcgctgcggtattattcagctccgtccgccggccggcgcggacggacgccaggcttccttcctgtctgcataacaaagccgccgccattatgatctccacatatgatgcttagcatttgtcgctcgcagctgtattgctcctctagctgcatccttgtactagagcatggcgaagctcgcatctattgctcgcagattcccaaacggaagcatgaggcttgttatggtaacggttattggagcagtccttggctttttcattgggatttcattcccttcggtcagcataacaaagcttcactttccagatagctttatttcgtacattgaagacaaagacgctggactcacgacccaagctatactcaatcatgcttggacttctgccagaaacgcaaggggaaatggtaccgaaccgacttcaaacagtaccttaaagatttatgtcccaacgaaccccaagggtgcagaggggctagcaccaggtatcgttgtatcagagtctgacttccatttgcgcaggttatggggagacccaagtgaggacctgcctttcaaaccaaagtaccttgttacctttactgttggagttgagcagaaagcaaatataaacagagctgtgaagaagttttctgacaattttgctattctgttattccactatgatggccgggtgagtgagtgggatgaatttgagtggtcccagcgagctatccatattagtgtcaggaaacaaactaaatggtggtatgccaagagattcctgcatcctgatattgtggcagcttatgagtacatattcatttgggatgaggaccttggggttgaacattttaatgcagaggagtacatcaaacttgttaagaagcataacttggacatctctcaacctggattagagcctgatcgggggttaacatggcagatgaccaaaagaagaggtgacagtgaggttcacaaggacacagaggagaggcctggctggtgctctgaccctcatcttccaccgtgtgctgcttttgttgaaataatggctccagtcttctcaagagatgcatggagatgtgtgtggcatatgattcagaacgacttggttcatggttggggcttggattttgcgctcaggaaatgtgtggagcctgctcatgaaaagattggagttgtcgattcgcagtggatcgttcaccaagtggttccttctctggggaaccaggggcagtcagaaaacggaagggcgcggtgcaggaaggaatggggcatgttccagaccaggatggcggaggcggagaaggcgtattacaagatgatgggcatcacccctccaaactccacgcgtgtctagccgcgcctctcttcttggttttccatccccgccaccctgacctttgtggtggcgggtgagctgatgatactatactatagcactacttgattatagggagttagagatggtgggtgtagctgcttttgatggagaggtccttctgtaagtaaatgcgaggcgaaactgtgatgagaaaacatgtacacgaggatgattacctgatgatgatgatgatgatctatctattataaaaaacatatataccgttaccgagcattgcgattgttctgcagcgcttttgtagcttgatccgaaacccactttgtttgctaatgctgggcg

SEQ ID NO: 220123 - DNA, 1642 bp, Zea Mays
gcgcaagttgctgcggttggcttccttcctgtctgcataacaaagccgccgccattatgatctccacatatgatgcttagcatttgtcgctcgcagctgtattgctcctctagctgcatccttgtactagagcatggcgaagctcgcatctattgctcgcagtatgcttagattcccaaacggaagcatgaggcttgttatggtaacggttattggagcagtccttggctttttcattgggatttcattcccttcggtcagcataacaaagcttcactttccagatagctttatttcgtacattgaagacaaagacgctggactcacgacccaagctatactcaatcatgcttggacttctgccagaaacgcaaggggaaatggtaccgaaccgacttcaaacagtaccttaaagatttatgtcccaacgaaccccaagggtgcagaggggctagcaccaggtatcgttgtatcagagtctgacttccatttgcgcaggttatggggagacccaagtgaggacctgcctttcaaaccaaagtaccttgttacctttactgttggagttgagcagaaagcaaatataaacagagctgtgaagaagttttctgacaattttgctattctgttattccactatgatggccgggtgagtgagtgggatgaatttgagtggtcccagcgagctatccatattagtgtcaggaaacaaactaaatggtggtatgccaagagattcctgcatcctgatattgtggcagcttatgagtacatattcatttgggatgaggaccttggggttgaacattttaatgcagaggagtacatcaaacttgttaagaagcataacttggacatctctcaacctggattagagcctgatcgggggttaacatggcagatgaccaaaagaagaggtgacagtgaggttcacaaggacacagaggagaggcctggctggtgctctgaccctcatcttccaccgtgtgctgcttttgttgaaataatggctccagtcttctcaagagatgcatggagatgtgtgtggcatatgattcagaacgacttggttcatggttggggcttggattttgcgctcaggaaatgtgtggagcctgctcatgaaaagattggagttgtcgattcgcagtggatcgttcaccaagtggttccttctctggggaaccaggggcagtcagaaaacggaagggcgcggtgcaggaaggaatggggcatgttccagaccaggatggcggaggcggagaaggcgtattacaagatgatgggcatcacccctccaaactccacgcgtgtctagccgcgcctctcttcttggttttccatccccgccaccctgacctttgtggtggcgggtgagctgatgatactatactatagcactacttgattatagggagttagagatggtgggtgtagctgcttttgatggagaggtccttctgtaagtaaatgcgaggcgaaactgtgatgagaaaacatgtacacgaggatgattacctgatgatgatgatgatgatctatctattataaaaaacatatataccgttaccgagcattgcgattgttctgcagcgcttttgtagcttgatccgaaacccactttgtttgctaatgctgggcg

SEQ ID NO: 220124 - DNA, 807 bp, Zea Mays
  misc_feature (807)..(807): n is a, c, g, or t
ctcgctcgcctcttcccgaggtctccacgatattacatccccgatcgtgcccggggcttcgttccggtacgtgagggggtcggcgatgttcttctcgggtgacccgtcggcgcggcggcgggtcgacctcggcggccggagcagcaaggagcgggaccgcaaggtgctgctcgagcagacgcgcgaggagcggcgtcggcgccagggcctccgactacagaacacctccgccacgaagatccagaaattcttcagagggaagaaggctttggaattggcacgctcagaggttcggaagaatttttgctcaacttttggggagcattgcgagcggatagagtgacaatgacatagctatactttgtcaaatctgcaacttgctgctgcaatatgttaaacaaggcggagatgttgtaactctctttactggtgtgaatggctcctcactgcaacctctcgttgctcacagagtaaaaaaaattactctcatctgtgtgcaagcagtctatcaaaagaggcatgattggggcagccaacttttgacaacacctggaagcacatcagtgccttctgtctcattactggaaactgtaggttgcttgataaatccaaaatttccttggaactgcaaagtagtaggttatcttcagcagagaaagatctattgcttattccgtggaattgtcatatctgtaccacaaaaggtcagaaattctgggcattttgatggtacatctgtgctggagcaagttctcatgcttgttgcttcacatgttggccatcatccctgttgttgtctgaaagtgn

SEQ ID NO: 220125 - DNA, 856 bp, Zea Mays
  misc_feature (856)..(856): n is a, c, g, or t
cgtctcgtctcgtctcgtcgccgcccgaccctcgctcgcctcttcccgaggtacgtgagggggtcggcgatgttcttctcgggtgacccgtcggcgcggcggcgggtcgacctcggcggccggagcagcaaggagcgggaccgcaaggtgctgctcgagcagacgcgcgaggagcggcgtcggcgccagggcctccgactacagaacacctccgccacgaagatccagaaattcttcagagggaagaaggctttggaattggcacgctcagaggttcggaagaatttttgctcaacttttggggagcattgcgagcggatagagtggaacaacttcggaactaattctgactttcttcgtcaattactgtttttctttaatgcaaatgaagacaatgacatagctatactttgtcaaatctgcaacttgctgctgcaatatgttaaacaaggcggagatgttgtaactctctttactggtgtgaatggctcctcactgcaacctctcgttgctcacagagtaaaaaaaattactctcatctgtgtgcaagcagtctatcaaaagaggcatgattggggcagccaacttttgacaacacctggaagcacatcagtgccttctgtctcattactggaaactgtaggttgcttgataaatccaaaatttccttggaactgcaaagtagtaggttatcttcagcagagaaagatctattgcttattccgtggaattgtcatatctgtaccacaaaaggtcagaaattctgggcattttgatggtacatctgtgctggagcaagttctcatgcttgttgcttcacatgttggccatcatccctgttgttgtctgaaagtgn

SEQ ID NO: 220126 - DNA, 906 bp, Zea Mays
  misc_feature (906)..(906): n is a, c, g, or t
ccgactccctctccgcgtctcgtctcgtctcgtcgccgcccgaccctcgctcgcctcttcccgaggtctccacgatattacatccccgatcgtgcccggggcttcgttccggtacgtgagggggtcggcgatgttcttctcgggtgacccgtcggcgcggcggcgggtcgacctcggcggccggagcagcaaggagcgggaccgcaaggtgctgctcgagcagacgcgcgaggagcggcgtcggcgccagggcctccgactacagaacacctccgccacgaagatccagagggaagaaggctttggaattggcacgctcagaggttcggaagaatttttgctcaacttttggggagcattgcgagcggatagagtggaacaacttcggaactaattctgactttcttcgtcaattactgtttttctttaatgcaaatgaagacaatgacatagctatactttgtcaaatctgcaacttgctgctgcaatatgttaaacaaggcggagatgttgtaactctctttactggtgtgaatggctcctcactgcaacctctcgttgctcacagagtaaaaaaaattactctcatctgtgtgcaagcagtctatcaaaagaggcatgattggggcagccaacttttgacaacacctggaagcacatcagtgccttctgtctcattactggaaactgtaggttgcttgataaatccaaaatttccttggaactgcaaagtagtaggttatcttcagcagagaaagatctattgcttattccgtggaattgtcatatctgtaccacaaaaggtcagaaattctgggcattttgatggtacatctgtgctggagcaagttctcatgcttgttgcttcacatgttggccatcatccctgttgttgtctgaaagtgn

SEQ ID NO: 220127 - DNA, 922 bp, Zea Mays
  misc_feature (922)..(922): n is a, c, g, or t
cctccccgactccctctccgcgtctcgtctcgtctcgtcgccgcccgaccctcgctcgcctcttcccgaggtctccacgatattacatccccgatcgtgcccggggcttcgttccggtacgtgagggggtcggcgatgttcttctcgggtgacccgtcggcgcggcggcgggtcgacctcggcggccggagcagcaaggagcgggaccgcaaggtgctgctcgagcagacgcgcgaggagcggcgtcggcgccagggcctccgactacagaacacctccgccacgaagatccagaaattcttcagagggaagaaggctttggaattggcacgctcagaggttcggaagaatttttgctcaacttttggggagcattgcgagcggatagagtggaacaacttcggaactaattctgactttcttcgtcaattactgtttttctttaatgcaaatgaagacaatgacatagctatactttgtcaaatctgcaacttgctgctgcaatatgttaaacaaggcggagatgttgtaactctctttactggtgtgaatggctcctcactgcaacctctcgttgctcacagagtaaaaaaaattactctcatctgtgtgcaagcagtctatcaaaagaggcatgattggggcagccaacttttgacaacacctggaagcacatcagtgccttctgtctcattactggaaactgtaggttgcttgataaatccaaaatttccttggaactgcaaagtagtaggttatcttcagcagagaaagatctattgcttattccgtggaattgtcatatctgtaccacaaaaggtcagaaattctgggcattttgatggtacatctgtgctggagcaagttctcatgcttgttgcttcacatgttggccatcatccctgttgttgtctgaaagtgn

SEQ ID NO: 220128 - DNA, 1953 bp, Zea Mays
cgagtactgagtactgactactgactacactcccaagtcaactccaccgtcggctgtgctgcgctgatcttctgtgagtagtgcgcgcggcgtggtctccgttcgaaccgatgcccatctgctgaatcggatcggatcgtgcgatcggccgccacgccacggcccgcgggtgaggcgtggtctccgggaggcagccaacctatcccgcccggtctagcctctagcgatcccggcgccggcagcgcgcacgagaggaatggacgcgtcgcacccggagggcgaggccacggcggggtggctgacggtcgaggagtggagcggctcgtcagcctccgcgctctcccgcaccgccgtcctcaccgcctccgcctcctctctcaccgcacacaggttcggcagccggtgggaacggatcgggagccgcatgctcggcgccttcgtgcctgagggctttcctgggagcgtgactccggattatgtcccgttccagatgtgggatacgttgcagggtctctccacatacatccgtgcaatgttgtctacacaagctcttctaggggcaatcggagtgggggaacagtccgcaactgtcataggtgctacttttcagtggtttctgagggacttgacaggaatgcttggagggatattgttcaccttttaccagggatctaatcttgatagcaatgctaaaatgtggcgtctagttgcagactttatgaatgaccttggaatgttgatggatcttttgagccctctgtttccttcatcgttgatagttataatgtgcttaggcagcctgtctaggtcattcactggtgttgctagtggagcaactagagcagcactaacgcagcattttgcacttgcaaataatgcagctgatatttctgcaaaggagggcagtcaggaaacacttgctacaatgttagggatggggttggggatgctgttagctcaaattaccagagggcatgctttgagtgtatgggcatcttttctttctcttacgatgttccatatgtatgcaaattacaaggcagtgcagtcactttcactcactacgctaaactatgagagagcttccatcttgctacaatacttcaaggaatgtggtgaagttcttgtgccacggaaggtttcccagcaggaacatattcttccttcttggtcaaactggaggaaactgaacagaattaaactgccacatgagcgtgtgcacttgggtgctaaagcctcgatgcttacacacagtgacatgttggtgattgcaaaaacaagataccactatgaaaacgcgaactactttttgctggataaacaaggcatcgtttacgttttcatccacaaggaggcaacaccagccgatgttttaaggtccttcgtacacgggctcgtgctagctagctcgacacagaacagcaaacctcagcacttagaggcccgtcgatggatggacgagatgtataccagttttatctcgaagctgcagactgaaggttactcgacggaacgccttctgtcgcattcgattctttggagggcacactggcttcacggccagctggatgagaagctcaagtaggaggaacactgcaagaccgcgtctgcttatccaaggacaggtcacagcgaggttacgacaaacttggagctcgaattggagaagtatctggagtttcaccaaaaaggtcaagagcaggtactgctggaggagaatcatgaaggcgagtttagagtggtctagaccgtcgtcttctagttaactttgattatggaggatcgtcgtcgtcatatgatgtattttacttagttattttgtacaaaagctcctattatgtaataaagatgtgatgttgctttctatactgaaagggaattaggcttacacctatttcctaattgattttggtggttgaattgcccaacacaaataattggactaactagttt

SEQ ID NO: 220129 - DNA, 2776 bp, Zea Mays
aggccatttgattctatcccatgtttggtgcatgtagtgtatcatgtttcgtttaccatctctattgtcatgatcagagctctggctatcttttcaagaccatgctgagtgtacagaacttggacaatctttggcggacttcggaaaggcgattaagcttttgggctcttgtgaaggagatttgatggaaaaggtgttttctgaagttggttcaaagtcagagatgttgtcaataaagctgcaaagagaggcaatcagagcagatggacagacacaattgagccatgaaatagctttggagctaagtcagaggagtgctgctgctggactaaggccgattggagcagtggtcttcatgcaacggggtgtcctgaaggtttgcttgaggactactgacagtacagttaatacatcagagattgcaaaggcatatggcggaggtggaaaacgaagttcgagttcattcactctaagaatggatgagttcaacatctggacttcagtgaactcatgaattgaactggagaggtcacatagtgttcatactgtgggaactcgcaaccagctcatctgggcatggattccctcagtggtgaacatgtgaagatggggtggtctttttgtgctccggtatgagaggaaggaaaacaaaatcttagtctaacctaccatgttgatatgagcttacaggagaataatctcttcgatatgaatgactggagagcaatttggaggcataatgcttaagccgttcaagagaagatttgatgcctttaaatgaaagtccgacgtccgagaggggctcgccattgggcttggcatgggcacagtcatgctgctcctcttctgcggctactcgctggtgatttgatatggctctaagctgatcctggagatggtgtacaccggagccaaggtcacaacatgatctttgtagtcctcactggttctcttttctcaaattgaccatggtgttgtaaatttgatcaatgaagaagattcaagaattaccgttttactggattgccatgggatttcgccattcagatttccaatgcaaatgatgaggtcgtttatcactgtggttcaagaaaactacccgaatcgtcttggggtattgtttgtcatccgccttcctccagttgtcagagttattgcacagacatttcttcaaattgcaatatcacatggtatccgtggagatgaggacgacattgcctccaagtctgctccaccggcatccatcgacggtgcaagatccagcagatagattgatggcaaagaggacgactccatgtccaggcgtactccccgccttgcatcgagattgctagctgcattctttagtaaaagacaaaggaagagttcgctctgctaataaatatttccaggaaggtgctagacactgaataagttggtggcatttttcatgaaaaaattgttgacttattattagccatctgtctatacaggtcataatcgaagggtttacagggaggagatctgaacatagctcttcaatcccaaagttaacatcgttggtaaaccccttctggtgttacctcacaaatatcactaaagtcattttagctttttgctgctccttatgtgcttcagattcagcaagaggtactttgcaagttttggaagactaatacctaacttttttactggtcgacatttgctttgtgtaggttaccataattcttactgcttgcaagcccttttagaatattactgctgcgaggttcttgcaagtccttgatgaagaagtcgaaggtgacgaacgccgaggccgtcatcctgatcgacgccaagaacctcacagcgcacctccttgtgatgctcttttctccaatgtcttctcttatctacatgcaggaaaaaatctacatgttgatggcgtggatcagaaaaatgtggaaggacaagatttaagatgcactgccatggttggcggtctatttactgcatctcgaagcggcttgcattcaaaggttctgcacctctaaatatttctggtcgtgaagctgtctatgaaaggaagatgaaaattcagcaagactatattgtacatgaccttgaaggagctgaccatgtgacagaccttgatcataaccatgttgcagagttgaagatattaggactatattaaacattgctgcatatagcatcagcaacaacttggtttccgtcgctgcccaaacttcagcagaggcgatctaagaagaagcaagcgtatcggctcatgttctgacggccgtgttcacgtggtgtaagatctgcattgtggaatccttcgcccggacaagagagattggatcctcccgtccagacaacctgatagaacgacagtgtataagaacagggctcttaggacgcctttttgtgcagttgggtcataactctaccctgagaattgagatagatgatcatgtggtgcaagatattgagtccctaatctttgatgacacacataacaaatggtaagcgtctccgtggatggagcctgaagtatattcaaattcaaggcatgccacaaagcatctcgcgtgtgggatgctccggcgtgtggaaagtagaaaagccaaataaatgggtacatgtacagcaggcgtgagttcttaaatactcagattccttgtccataggcaaatgcatagttcatacgaatcagagtacacgatgcacacaacttgatgtctctatcgttgttttcaacatgatgaacatgcgaatttcgtggtattaattgggaccgtctgatttctcatgg

SEQ ID NO: 220130 - DNA, 3394 bp, Zea Mays
tgacaataggccatttgattctatcccatgtttggtgcatgtagtgtatcatgtttcgtttaccatctctattgtcatgatcagagctctggctatcttttcaagaccatgctgagtgtacagaacttggacaatctttggcggacttcggaaaggcgattaagcttttgggctcttgtgaaggagatttgatggaaaaggtgttttctgaagttggttcaaagtcagagatgttgtcaataaagctgcaaagagaggcaatcagagcagatggacagacacaattgagccatgaaatagctttggagctaagtcagaggagtgctgctgctggactaaggccgattggagcagtggtcttcatgcaacggggtgtcctgaaggtttgcttgaggactactgacagtacagttaatacatcagagattgcaaaggcatatggcggaggtggaaaacgaagttcgagttcattcactctaagaatggatgagttcaacatctggacttcagtgaactcatgaattgaactggagaggtcacatagtgttcatactgtgggaactcgcaaccagctcatctgggcatggattccctcagtggtgaacatgtgaagatggggtggtctttttgtgctccggtatgagaggaaggaaaacaaaatcttagtctaacctaccatgttgatatgagcttacaggagaataatctcttcgatatgaatgactggagagcaatttggaggcataatgcttaagccgttcaagagaagatttgatgcctttaaatgaaaggtttgctggtacatcaaaagacgtattttatgctctttctaatctttctccagtagacctatgtgcttaattttagagatgataagggtggtgcgggccgaagatctgtcatactcctaggggccaattatagcttacacttatgttgttattagttttgaatgctgaacatacatggagatgggtagctcagctcagcttggatataacttggtttctatccaaactaatactttgctccatagggaatgcatctggcaacggaaattgttgtcaagctccagtagcagaaaggatcatcttcaattattgtaatcctgctccttaataatacattcttggatcttgctctgggcttaaaaaatctgcatcaccaaattgttcctcgttgcgaacatttatgtaatacagaaccttagaaactggaaatgtttattccattccggtaatttgggaatgatctgtgttaaaatcctttttaagtgtcataccacgcactatttttctgttcctcaactctatcgatcccataacctatttctgttaactggttactaaggacatgtacaatcccataaccaaattggtgggtatgcaatgcgtcaatgaaaaaaccatttcttcagtcctgtaatgttgttccgattgcgtcaatgaaaaaactgtaatttttgaccggggagatggtagcactagcatgtggggattaaagttcctaaatgttcagtactgtcctaaacacttgttttatcttttttgagtggaagtccgacgtccgagaggggctcgccattgggcttggcatgggcacagtcatgctgctcctcttctgcggctactcgctggtgatttgatatggctctaagctgatcctggagatggtgtacaccggagccaaggtcacaacatgatctttgtagtcctcactggttctcttttctcaaattgaccatggtgttgtaaatttgatcaatgaagaagattcaagaattaccgttttactggattgccatgggatttcgccattcagatttccaatgcaaatgatgaggtcgtttatcactgtggttcaagaaaactacccgaatcgtcttggggtattgtttgtcatccgccttcctccagttgtcagagttattgcacagacatttcttcaagatacaaaccaaccaaggctgactacaagttaaagatgctctgtaaaaaggaaggatcagtttgactatatctttttgctggtagattgcaatatcacatggtatccgtggagatgaggacgacattgcctccaagtctgctccaccggcatccatcgacggtgcaagatccagcagatagattgatggcaaagaggacgactccatgtccaggcgtactccccgccttgcatcgagattgctaggtcataatcgaagggtttacagggaggagatctgaacatagctcttcaatcccaaagttaacatcgttggttaccataattcttactgcttgcaagcccttttagaatattactgctgcgaggttcttgcaagtccttgatgaagaagtcgaaggtgacgaacgccgaggccgtcatcctgatcgacgccaagaacctcacagcgcacctccttgtgatgctcttttctccaatgtcttctcttatctacatgcaggaaaaaatctacatgttgatggcgtggatcagaaaaatgtggaaggacaagatttaagatgcactgccatggttggcggtctatttactgcatctcgaagcggcttgcattcaaaggttctgcacctctaaatatttctggtcgtgaagctgtctatgaaaggaagatgaaaattcagcaagttggattgatttatctttcccccctatggctgattcagcaacctgtattaattagtctatttgacatttgatatttcaatgctgttataggactatattgtacatgaccttgaaggagctgaccatgtgacagaccttgatcataaccatgttgcagagttgaagatattaggactatattaaacattgctgcatatagcatcagacttagaagtcaaacaacatcaaacttatcatcagttatatctgtgatccagcaacaacttggtttccgtcgctgcccaaacttcagcagaggcgatctaagaagaagcaagcgtatcggctcatgttctgacggccgtgttcacgtggtgtaagatctgcattgtggaatccttcgcccggacaagagagattggatcctcccgtccagacaacctgatagaacgacagtgtataagaacagggctcttaggacgccttttgtcaaggtaagcgtctccgtggatggagcctgaagtatattcaaattcaaggcatgccacaaagcatctcgcgtgtgggatgctccggcgtgtggaaagtagaaaagccaaataaatgggtacatgtacagcaggcgtgagttcttaaatactcagattccttgtccataggcaaatgcatagttcatacgaatcagagtacacgatgcacacaacttgatgtctctatcgttgttttcaacatgatgaacatgcgaatttcgtggtattaattgggaccgtctgatttctcatgg

SEQ ID NO: 220131 - DNA, 3302 bp, Zea Mays
ctgagttagctgacaataggccatttgattctatcccatgtttggtgcatgtagtgtatcatgtttcgtttaccatctctattgtcatgatcagagctctggctatcttttcaagaccatgctgagtgtacagaacttggacaatctttggcggacttcggaaaggcgattaagcttttgggctcttgtgaaggagatttgatggaaaaggtgttttctgaagttggttcaaagtcagagatgttgtcaataaagctgcaaagagaggcaatcagagcagatggacagacacaattgagccatgaaatagctttggagctaagtcagaggagtgctgctgctggactaaggccgattggagcagtggtcttcatgcaacggggtgtcctgaaggtttgcttgaggactactgacagtacagttaatacatcagagattgcaaaggcatatggcggaggtggaaaacgaagttcgagttcattcactctaagaatggatgagttcaacatctggacttcagtgaactcatgaattgaactggagaggtcacatagtgttcatactgtgggaactcgcaaccagctcatctgggcatggattccctcagtggtgaacatgtgaagatggggtggtctttttgtgctccggtatgagaggaaggaaaacaaaatcttagtctaacctaccatgttgatatgagcttacaggagaataatctcttcgatatgaatgactggagagcaatttggaggcataatgcttaagccgttcaagagaagatttgatgcctttaaatgaaaggtttgctggtacatcaaaagacgtattttatgctctttctaatctttctccagtagacctatgtgcttaattttagagatgataagggtggtgcgggccgaagatctgtcatactcctaggggccaattatagcttacacttatgttgttattagttttgaatgctgaacatacatggagatgggtagctcagctcagcttggatataacttggtttctatccaaactaatactttgctccatagggaatgcatctggcaacggaaattgttgtcaagctccagtagcagaaaggatcatcttcaattattgtaatcctgctccttaataatacattcttggatcttgctctgggcttaaaaaatctgcatcaccaaattgttcctcgttgcgaacatttatgtaatacagaaccttagaaactggaaatgtttattccattccggtaatttgggaatgatctgtgttaaaatcctttttaagtgtcataccacgcactatttttctgttcctcaactctatcgatcccataacctatttctgttaactggttactaaggacatgtacaatcccataaccaaattggtgggtatgcaatgcgtcaatgaaaaaaccatttcttcagtcctgtaatgttgttccgattgcgtcaatgaaaaaactgtaatttttgaccggggagatggtagcactagcatgtggggattaaagttcctaaatgttcagtactgtcctaaacacttgttttatcttttttgagtggaagtccgacgtccgagaggggctcgccattgggcttggcatgggcacagtcatgctgctcctcttctgcggctactcgctggtgatttgatatggctctaagctgatcctggagatggtgtacaccggagccaaggtcacaacatgatctttgtagtcctcactggttctcttttctcaaattgaccatggtgttgtaaatttgatcaatgaagaagattcaagaattaccgttttactggattgccatgggatttcgccattcagatttccaatgcaaatgatgaggtcgtttatcactgtggttcaagaaaactacccgaatcgtcttggggtattgtttgtcatccgccttcctccagttgtcagagttattgcacagacatttcttcaaattgcaatatcacatggtatccgtggagatgaggacgacattgcctccaagtctgctccaccggcatccatcgacggtgcaagatccagcagatagattgatggcaaagaggacgactccatgtccaggcgtactccccgccttgcatcgagattgctaggtcataatcgaagggtttacagggaggagatctgaacatagctcttcaatcccaaagttaacatcgttggttaccataattcttactgcttgcaagcccttttagaatattactgctgcgaggttcttgcaagtccttgatgaagaagtcgaaggtgacgaacgccgaggccgtcatcctgatcgacgccaagaacctcacagcgcacctccttgtgatgctcttttctccaatgtcttctcttatctacatgcaggaaaaaatctacatgttgatggcgtggatcagaaaaatgtggaaggacaagatttaagatgcactgccatggttggcggtctatttactgcatctcgaagcggcttgcattcaaaggttctgcacctctaaatatttctggtcgtgaagctgtctatgaaaggaagatgaaaattcagcaagttggattgatttatctttcccccctatggctgattcagcaacctgtattaattagtctatttgacatttgatatttcaatgctgttataggactatattgtacatgaccttgaaggagctgaccatgtgacagaccttgatcataaccatgttgcagagttgaagatattaggactatattaaacattgctgcatatagcatcagacttagaagtcaaacaacatcaaacttatcatcagcaacaacttggtttccgtcgctgcccaaacttcagcagaggcgatctaagaagaagcaagcgtatcggctcatgttctgacggccgtgttcacgtggtgtaagatctgcattgtggaatccttcgcccggacaagagagattggatcctcccgtccagacaacctgatagaacgacagtgtataagaacagggctcttaggacgccttttgtcaaggtaagcgtctccgtggatggagcctgaagtatattcaaattcaaggcatgccacaaagcatctcgcgtgtgggatgctccggcgtgtggaaagtagaaaagccaaataaatgggtacatgtacagcaggcgtgagttcttaaatactcagattccttgtccataggcaaatgcatagttcatacgaatcagagtacacgatgcacacaacttgatgtctctatcgttgttttcaacatgatgaacatgcgaatttcgtggtattaattgggaccgtctgatttctcatgg

SEQ ID NO: 220132 - DNA, 668 bp, Zea Mays
acttcctgttattgacaaccaatgcaacagatcttcgagacgacaagcagttctttgtggaccatcctggtgctgtccctatcactactgctcagggagaggagctaagaaagcaaataggcgctccatactacatcgaatgcagctcgaagacccaactaaacgtgaagggcgtcttcgatgcggcgataaaggttgtgctgcagccgcctaaggcgaagaagaagaaaaaggtgcagaggggggcgtgctccattttgtgatctaatcatcggtagatgaagaaacaagggcgaaggtgccatggctttatcatcgtcgcgtcttgcttcagtggaacagcatgaatggtccccaccccctctaggtttactggcggctcggctgcagcgagttctcatctctttgtcgaggcattgagcgatatgtttgtttcattttcctccttcctgccttgtgattatctggtgtgtgtgtgtgtgtgactgacgaagtcgcggcgattaggtaactcgcttagaaggtatttcccgtgtttgagcaaaagaaagtatccctgttatctctgttccataagttagacatgatgtaatcgtactaagtttatttttacttatttcacttgaatggaaaagtatgcttcccatttatatgctcgttgtcatggc

SEQ ID NO: 220133 - DNA, 923 bp, Zea Mays
ctggaagtcacgccttccgtatggactatgttccgacagtgtttgataacttcagtgccaacgttgtggttgatggtaatactgtcaacctcggcctctgggacactgcaggtcaagaggattacaacagactgagaccactgagctatcgtggagctgatgtttttcttctggctttctcactgatcagtaaggccagctatgagaatgtttcgaagaagtggatacctgaactgaagcattatgcacctggtgtgccaattattctcgtagggacaaagcttgatcttcgagacgacaagcagttctttgtggaccatcctggtgctgtccctatcactactgctcagggagaggagctaagaaagcaaataggcgctccatactacatcgaatgcagctcgaagacccaactaaacgtgaagggcgtcttcgatgcggcgataaaggttgtgctgcagccgcctaaggcgaagaagaagaaaaaggtgcagaggggggcgtgctccattttgtgatctaatcatcggtagatgaagaaacaagggcgaaggtgccatggctttatcatcgtcgcgtcttgcttcagtggaacagcatgaatggtccccaccccctctaggtttactggcggctcggctgcagcgagttctcatctctttgtcgaggcattgagcgatatgtttgtttcattttcctccttcctgccttgtgattatctggtgtgtgtgtgtgtgtgactgacgaagtcgcggcgattaggtaactcgcttagaaggtatttcccgtgtttgagcaaaagaaagtatccctgttatctctgttccataagttagacatgatgtaatcgtactaagtttatttttacttatttcacttgaatggaaaagtatgcttcccatttatatgctcgttgtcatggc

SEQ ID NO: 220134 - DNA, 837 bp, Zea Mays
tcaagatttggaatgtttaaatgttaccgtccccagaactgcaatgaaagccatatgtgataaacttgaagaagcaagtggaaaggtcgactgctctcacattttccctattaaagctatgctggctcttgttgtgtcagatataaaagttgatctcgactacaggatggcatatgggcacagagcatggagaaatgtggtgatacgtgaattgattccattcctcatactgagcaaagtattgcatagattaatagatgcacgacttgtggagatatttgatgtcgaagatgatgataaggttgtccgttgtttgcgtctactgaaaaattttgatccaaatgagtttcagccaaaaagtatagcttcaaattttaaatttgttaaaaaaggtcaggcaactgatcaaattttggaacttccattagagaactgtatatatgatatgatcagtagccaagggacaaaaggtattacacttgttgagatatgcaggggcttagtggttggtagtatggtgattctggatcatggccacatagctcaggcccaaattttctgtaaaacaacactattggcaaacatcttggactcaacaattcaaaaaaacttcataaacgagtatcatccatgctaaaaaaattcaacctaacatgggaagcagaagttccagacaagacatcgcagtaccgaatttggacttcaaaaaacttctcactctacaaagctggtactgctctgcaaaattttgaggcactctcagaagactgtgatgattgttcggatttgtggtccctagtttcatctaaagatttggaatcacctagttcacagggc

SEQ ID NO: 220135 - DNA, 1464 bp, Zea Mays
caggcgctggcaaagccactcatcttcggttttccggttcttcccagttcccattcggtcactcggaccggacatggcgatgagtttcttctcgcccactaccaccccttcatcctccgcatccctcctccccatccgccgccagtgtgccaccggcccctccgtgtccttccccctcaagccccaccgcttccgagttcatctcaaacctccgcgctcctcccgaacccgaatccacaccctctccacctcctccttgaagatccccaccgagagcattctctcttccgtggtctccacctcgacgaccctcctttttgtgctcgtcgcaggcctcctctccctctccggcgtccgctcactccccgccctcgcctgcgctccggcgccgacccagcaaccgcaagaaaccgaagaacaagaatccaaagagaagaagcagcaagaagaggctggtgagaggaaagaggacgtgttgccgcagctggatgaagaggacgcggaggatgacgaggtgcggatgtattcagcgattctgagccgcaactctggcgacgtggacgcgctcaagtgcgctctatacgctaagatgaggcgcgcggattggggcggggcgctgcggttcgcgcgactgctgcgcgacgccgagcccagcgagttggagtggcgcctgatggtggcgcagctgcacgagctcaagggggacctcgccgaggctgagcgtcacttcagggagctcctggcagaggagcccctcctcgttcgggctctccatggacttgcactgtgtatgcagaagaaacctgagggccctgctgtttttgaaatgcttgagaatgctttgcagcttgcaacttcagagagaagggtcccggaggagcgcaacataaagcttttgatcgcacaaatgcatgttgtcatgttagatgttgcgtctgagaaactacaaaatcttataaatgaggatcctcgggattttcggtctcatctttgccagggcattgtgtatgcacttttagacagaaaagaagacgcagatatgcaatttgatgtatacagaagccttgtgccggatgaattcccagataagagttttatcagtgatgttatactggcggctaggacggagtcacatgatcggctacaaaaggaatttgactctgagtttcaagcgaagaaatgatacattaagttttgtatagatgaggcccaaatactcctggtaggctaaatggttgcatggtaccaatcttacaaataaaacataacacagtaaaagcatagtgaaaagaggcgtctcttatcaggctatcaccaattttcctcatttcctctccctgttagtctctgcagacatttctcagtgaaatataatatagcgaagacaaaattctgcttgaagttaaaagctgtagtatccaaccagatggattgatttgttgatgttcaaatgtagaatttgtg

SEQ ID NO: 220136 - DNA, 336 bp, Zea Mays
gtaattttagggcacctgacaggatgctggcatcgctggccgtcatccacatcggcctcgcagtgacggtcagtcgccgttaagccttggtgtggttcttgatgttgctttgtagatcgatggaggctgcctccggtcatggtgatcccatgtttaaccttgatgacgaacattggaaaaagcattttgttttatggactggaatagtctgcaaacatcacgatagcaatattgttctgctgctcatcagctgaggatgctgccctgtcctgaactcctgattttgcttttgatctactatgtgatgatttgctctttgttgagcaccattttgag

SEQ ID NO: 220137 - DNA, 1424 bp, Zea Mays
atcctgtctgctgtctctcccgagtgacctcaaagtcagcgagcgccacatccgactccgagggccaccggtggccggttgcccgttgacgccgcggcacgcgattccgatcctgggttttacctaagaaataaacaactctgaatttcccaagacctgaagaccagccagcgcaagcctgtggctgccacggtgccaccatgtcccgcggcagtgccgcctccgtattcctcggcgtcgacgttggtactggcagcgctcgtgcaggactcttcgatgaaaacggcaaattgctggggtcagcaagcagccctatacagatatggaaagagaaagactgtatcgagcaatcatcaaccgatatctggcatgcggtctgtgctgcggtgaaatctgcgtgctcactggcaaatgttgctcctgaggacgttgctggccttggctttgccgccacttgctcccttgttgctgtcgatgctgatggttcccctgtttcggtttctttgagtggtgatacaaggaggaatatcattgtgtggatggaccatagagctgtgaatcaggcagagcgaatcaatgctaccaattcgccagtactgcaatactgcggtgggggtgtttccccagaaatgcaggctccaaaggtttgggtctcctatggatgaaggaaaatcttctagattcgtggtctatggtatgtaggtggatggacctaagtgactggttagcatatagagcaacaggtgacgacactcgcagcttatgcacaactgtctgcaaatggacatatcttggacatgcacacatgaaacagtggaaggaatctgattcacgtgatatggaggcatgcggatgggacaatgttttttgggaagaaatagggttgggagacctcctcgaaggaaattgtgcaaaaataggacgcagtgtcgcttttcctggtcatgctcttggttctggtttgacgcctactgctgcaaaggagttaggcttacttcctggtactcctgttggaacctcacttattgatgctcatgctggtggagttggagtcatggaaagcattcctgatgcaggatctaaagctgtgtctgatgaacatgcaatatgtcaccgtatggtattggtatgtgggacatcaacctgccacatggctgtttcaaaggacagattgtttatacctggtgtctgggggccgttttggtctgcgatgatccctgagttttggctcacagaaggtggccaaagtgcaactggcgctctgctcgattacattattgaaaaccatgttgcttctcctcttctttctaaccatgctgcttctcaaagtatatccatatttgagctactgaacaagatgttgctttctatgtcacaagagcagaatagtccgtttctttctgcattaactcaagacacccaga

SEQ ID NO: 220138 - DNA, 1329 bp, Zea Mays
ctttcttcttttccctcccaatctgggttttacctaagaaataaacaactctgaatttcccaagacctgaagaccagccagcgcaagcctgtggctgccacggtgccaccatgtcccgcggcagtgccgcctccgtattcctcggcgtcgacgttggtactggcagcgctcgtgcaggactcttcgatgaaaacggcaaattgctggggtcagcaagcagccctatacagatatggaaagagaaagactgtatcgagcaatcatcaaccgatatctggcatgcggtctgtgctgcggtgaaatctgcgtgctcactggcaaatgttgctcctgaggacgttgctggccttggctttgccgccacttgctcccttgttgctgtcgatgctgatggttcccctgtttcggtttctttgagtggtgatacaaggaggaatatcattgtgtggatggaccatagagctgtgaatcaggcagagcgaatcaatgctaccaattcgccagtactgcaatactgcggtgggggtgtttccccagaaatgcaggctccaaagctcctatggatgaaggaaaatcttctagattcgtggtctatggtatgtaggtggatggacctaagtgactggttagcatatagagcaacaggtgacgacactcgcagcttatgcacaactgtctgcaaatggacatatcttggacatgcacacatgaaacagtggaaggaatctgattcacgtgatatggaggcatgcggatgggacaatgttttttgggaagaaatagggttgggagacctcctcgaaggaaattgtgcaaaaataggacgcagtgtcgcttttcctggtcatgctcttggttctggtttgacgcctactgctgcaaaggagttaggcttacttcctggtactcctgttggaacctcacttattgatgctcatgctggtggagttggagtcatggaaagcattcctgatgcaggatctaaagctggtttgtctgatgaacatgcaatatgtcaccgtatggtattggtatgtgggacatcaacctgccacatggctgtttcaaaggacagattgtttatacctggtgtctgggggccgttttggtctgcgatgatccctgagttttggctcacagaaggtggccaaagtgcaactggcgctctgctcgattacattattgaaaaccatgttgcttctcctcttctttctaaccatgctgcttctcaaagtatatccatatttgagctactgaacaagatgttgctttctatgtcacaagagcagaatagtccgtttctttctgcattaactcaagacacccaga

SEQ ID NO: 220139 - DNA, 416 bp, Zea Mays
cacacaggtcggagcggcagccacccgtgatgagcaaagcaggcagcggccccgggtccgacggggcgacggctgcggcggcgtccgccgcggtgcagaagcagaagtcgctgatgtagaaggcgggcccagccgtctccagcctcgtcgacaatttctcctccctcatcaacatcgctcgagtcaacgatccgccagtgcacaactcacaggaggcctttcagatggagatgcgcgctgtccgcatgggggattgaagtgctgggtcagcaagctaagggaactgagagaatgctggaaaggattgggcaggaggtagcagcgagcctcaaggagctagaggcacactactactcatatgttgtgcgatcaccatcctatgattgagggtaagcaggagcaacggtgtcctgcta

SEQ ID NO: 220140 - DNA, 594 bp, Zea Mays
cacacaggtcggagcggcagccacccgtgatgagcaaagcaggcagcggccccgggtccgacggggcgacggctgcggcggcgtccgccgcggtgcagaagcagaagtcgctgatgtagaaggcgggcccagccgtctccagcctcgtcgacaatttctcctccctcatcaacatcgctcgagtcaacgatccgccagtgcacaactcacaggaggcctttcagatggagatgcgcgctgtccgcatgggggattgaagtgctgggtcagcaagctaagggaactgagagaatgctggaaaggattgggcaggaggtagcagcgagcctcaaggagctagaggcacactactactcatatgttgtgcgatcaccatcctatgattgaggttaatcttatcattccaggataaaatttcttgtgtttccaatatgcactcatttcacatatggtttaacagcgactgtttgttctatcattggagtatcactaagttgtagcagtgttaatgttatgtggaatgatttaatctcagtgctagttgtatcgtgctttacatatatatatatataggtgcatgatgcataattcata

SEQ ID NO: 220141 - DNA, 348 bp, Zea Mays
ctcttccagaagggcgagccaatggctctcaagcataatggctctttgtatgctcatgtttacttcgcccgttcgggttatcctgtggaccctacagatccaaaatatgagcagaaatcttcgtttgggaggacccatcctgttgtggcattcttgccaaaatcaaaagctggtaaaaagaagagcttgcttggagattcagaagagcctgaagagaaagcaccgcataataaggagaataaagaatatgaggataaagatgagggtctgactgaatatatatcttattttggaatggtggtatctatagtagagttgtggaggctaaggcccctatggcaattgtga

SEQ ID NO: 220142 - DNA, 2081 bp, Zea Mays
tataagcaggggcacgcttcgcaaagtggtactgatattctccaggactattgttagcatcccttgtggtccatctgcattagcagtgaagaaagtcgcatggggacttgcttgatatgttgttattgctcagacatggctgagaaggaggaaacaaagggccgctgccctgcctgccacacacgttatgacaaggatatgatcgtcaagatggccgccacttgtgacaggacagtggcagataaaaatgcggagaagaagcaaaaggcccaaagggttaagccaaaggcagcaccaacagcaacaacaacatcaaccgtagaatctaagaagcatcttgctactatcagggttatccagagaaatctggtgtacataattgggctacctgcgcatttatgcaatgagagcgtacttgagcgtagggagtactttggtcattatgggaaagttttgaaggttttagtttcccgtccgactgggcctccctctcagcaggcatcagcaaacagcagtattagtgtgtatgtctctctgaattatacggtgtacatgcatgatctgttcatacttcatatgaatttagatttatactttcagtactggtcaattagcctgatggaatatcaaataactatctactgattctatgcaattgcatgtttcaagtttctaatgctgccttgtaatactggaacattggtattataagaaagtaaattcaaacttcaatattgttatgtggttttctattgaacctggtgaaaatgtgataattatgtccatatccttgcaagcagttcagtcatttaagtttaatctaggctacttagcagtgtgattttcctgtagcctcttgatttgcatagccgcacagcccgtgcttgaaagtaacatttttatcctcattgctgacattaggatatgtattgtattattggtgtgaaattcaaagaatcagatagatgcaagatatctgtttgtgggataggatcagaacccaatcctgtgtgtgcagatatagataaaaatcatcttttaatgaaatgtctatttttttctcggtttgagtactttatattgttctcctgggatgtgttttttttctttatgggtgatttctcttggaaatcctaggatagtgtttcgatgtattctgaaactttgttgtgccagaaacatgcattgttttatcattaaccagaattgagttagggattatcattaaggcattaaccaaaatggagttaggatgtctttttttgtagtgtagaaaacgttgtgtatactgaaatgtgcatgcttgcaacatgtctaatatagattatatttgagtggtatctttgttgaagaacatgtgaaattagagttctggtggtcttctagaacacacactgctcctcatctttactttctctacataattcttcaatatgttggtatgttcccgtgactccttggtttagctatccttatacatgcatgttgttacataaatcaattagtttttccctgaaggacaggcctggtgcagtggtgagaggcctttccactgagccaaagggcctgggtttgacgcagcctctgcgcaaaaatgagatatacgtggagcgtcagaattatatgtgcatctacaagaacagttacaacaattctccatcaggttgatgttcatacatctcagatataaatgtgggggagacggtgcctcatcaatgatgagtaggttgattctcatctagcggcaccattgctcactacaactggtttgcttgagcaacttaatgtcactctcaagaggaccctcctttcgaccgacaccctgaagcaccacacaagctttagaaaagtcggaattgtacttcgtatacataaattacatgatattatatgttcatgtaattctatgttgattctttagaaataatatatatgatattgtaatgtgtgttcgacatcaatttattttatttgagttcgccgtgcgtacgtttggggttgtttctccctcgcttcttcctggcggcgaaagatagagaagggcgagtggccgcgcggaacatcgacaaccgagaaacccc

SEQ ID NO: 220143 - DNA, 1536 bp, Zea Mays
ctggtaggaaaaggataatctcatcaaagaggatggtcaagattaatttgagtagggtgacttcataatggacgacgaggaagaagtggaaggagaggaagaggaacaaaagagtgatgaccagaagcgaagaaacaaaactaaaaagaaaaggaagagaggagcaacggtaccaggacgcgtcaaggttgacaaagctatctgggaccacttttgtaattgccaactcttcactgattattttcctatatgttgctccagaataaatggatcatagtgcggtggtcatgggattgggatctgctccgtatttgcagggtgaagccttcgtgtctcctcgagggaaagtcactgacctttcttgggacgtggaccactgacggcccccgtcatcccccatgacggtgatcctagggtgaagccttcgtgtttcctcgagggaaatctaccagtgcgggattgatttagtcagcaccattggacacagggtttagttccattgcctggacccatcaatgaatcatggtgccaaggtcttgatggttcgacttcaaggtactgatattctccaggactattgttagcatcccttgtggtccatctgcattagcagtgaagaaagtcgcatggggacttgcttgatatgttgttattgctcagacatggctgagaaggaggaaacaaagggccgctgccctgcctgccacacacgttatgacaaggatatgatcgtcaagatggccgccacttgtgacaggacagtggcagataaaaatgcggagaagaagcaaaaggcccaaagggttaagccaaaggcagcaccaacagcaacaacaacatcaaccgtagaatctaagaagcatcttgctactatcagggttatccagagaaatctggtgtacataattgggctacctgcgcatttatgcaatgagagcgtacttgagcgtagggagtactttggtcattatgggaaagttttgaaggttttagtttcccgtccgactgggcctccctctcagcaggcatcagcaaacagcagtattagtgtgagatatacgtggagcgtcagaattatatgtgcatctacaagaacagttacaacaattctccatcaggttgatgttcatacatctcagatataaatgtgggggagacggtgcctcatcaatgatgagtaggttgattctcatctagcggcaccattgctcactacaactggtttgcttgagcaacttaatgtcactctcaagaggaccctcctttcgaccgacaccctgaagcaccacacaagctttagaaaagtcggaattgtacttcgtatacataaattacatgatattatatgttcatgtaattctatgttgattctttagaaataatatatatgatattgtaatgtgtgttcgacatcaatttattttatttgagttcgccgtgcgtacgtttggggttgtttctccctcgcttcttcctggcggcgaaagatagagaagggcgagtggccgcgcggaacatcgacaaccgagaaacccc

SEQ ID NO: 220144 - DNA, 1764 bp, Zea Mays
atttatttggttttttttcagtctatgacatgtctgatagtcaaatgaagctaaatgattttatttcaagccttgttcttgagaggatggtcaagattaatttgagtagggtgacttcataatggacgacgaggaagaagtggaaggagaggaagaggaacaaaagagtgatgaccagaagcgaagaaacaaaactaaaaagaaaaggaagagtgctatagaggagcaacggtaccaggacgcgtcaaggttgacaaagctatctgggaccacttttgtaattgccaactcttcactgattattttcctatatgttgctccagaataaatggtaagtgttgatcggtaattcttgtgaacgtaggtaatactgaatctctgactgtttgtgacctatatcccctgaaaacctgaatctcagattgctttagcttagcgcctacatggcagtcctcttgtcgtgaacattttgatctgtgttccgtatatgcttgtaggatcatagtgcggtggtcatgggattgggatctgctccgtatttgcagggtgaagccttcgtgtctcctcgagggaaagtcactgacctttcttgggacgtggaccactgacggcccccgtcatcccccatgacggtgatcctagggtgaagccttcgtgtttcctcgagggaaatctaccagtgcgggattgatttagtcagcaccattggacacagggtttagttccattgcctggacccatcaatgaatcatggtgccaaggtcttgatggttcgacttcaaggtactgatattctccaggactattgttagcatcccttgtggtccatctgcattagcagtgaagaaagtcgcatggggacttgcttgatatgttgttattgctcagacatggctgagaaggaggaaacaaagggccgctgccctgcctgccacacacgttatgacaaggatatgatcgtcaagatggccgccacttgtgacaggacagtggcagataaaaatgcggagaagaagcaaaaggcccaaagggttaagccaaaggcagcaccaacagcaacaacaacatcaaccgtagaatctaagaagcatcttgctactatcagggttatccagagaaatctggtgtacataattgggctacctgcgcatttatgcaatgagagcgtacttgagcgtagggagtactttggtcattatgggaaagttttgaaggttttagtttcccgtccgactgggcctccctctcagcaggcatcagcaaacagcagtattagtgtgagatatacgtggagcgtcagaattatatgtgcatctacaagaacagttacaacaattctccatcaggttgatgttcatacatctcagatataaatgtgggggagacggtgcctcatcaatgatgagtaggttgattctcatctagcggcaccattgctcactacaactggtttgcttgagcaacttaatgtcactctcaagaggaccctcctttcgaccgacaccctgaagcaccacacaagctttagaaaagtcggaattgtacttcgtatacataaattacatgatattatatgttcatgtaattctatgttgattctttagaaataatatatatgatattgtaatgtgtgttcgacatcaatttattttatttgagttcgccgtgcgtacgtttggggttgtttctccctcgcttcttcctggcggcgaaagatagagaagggcgagtggccgcgcggaacatcgacaaccgagaaacccc

SEQ ID NO: 220145 - DNA, 1713 bp, Zea Mays
agtgttcatgtctcatccagttcaaatgaagtgacaggaaccattccagagacgaatggaggcgatcatcatatacctggaagctcttttcatgtttagtgaaggtctatgacatgtctgatagtcaaatgaagctaaatgattttatttcaagccttgttcttgagaggatggtcaagattaatttgagtagggtgacttcataatggacgacgaggaagaagtggaaggagaggaagaggaacaaaagagtgatgaccagaagcgaagaaacaaaactaaaaagaaaaggaagagtgctatagaggagcaacggtaccaggacgcgtcaaggttgacaaagctatctgggaccacttttgtaattgccaactcttcactgattattttcctatatgttgctccagaataaatggatcatagtgcggtggtcatgggattgggatctgctccgtatttgcagggtgaagccttcgtgtctcctcgagggaaagtcactgacctttcttgggacgtggaccactgacggcccccgtcatcccccatgacggtgatcctagggtgaagccttcgtgtttcctcgagggaaatctaccagtgcgggattgatttagtcagcaccattggacacagggtttagttccattgcctggacccatcaatgaatcatggtgccaaggtcttgatggttcgacttcaaggtactgatattctccaggactattgttagcatcccttgtggtccatctgcattagcagtgaagaaagtcgcatggggacttgcttgatatgttgttattgctcagatttgtgtttcgtactggcaccacatcatagacatggctgagaaggaggaaacaaagggccgctgccctgcctgccacacacgttatgacaaggatatgatcgtcaagatggccgccacttgtgacaggacagtggcagataaaaatgcggagaagaagcaaaaggcccaaagggttaagccaaaggcagcaccaacagcaacaacaacatcaaccgtagaatctaagaagcatcttgctactatcagggttatccagagaaatctggtgtacataattgggctacctgcgcatttatgcaatgagagcgtacttgagcgtagggagtactttggtcattatgggaaagttttgaaggttttagtttcccgtccgactgggcctccctctcagcaggcatcagcaaacagcagtattagtgtgagatatacgtggagcgtcagaattatatgtgcatctacaagaacagttacaacaattctccatcaggttgatgttcatacatctcagatataaatgtgggggagacggtgcctcatcaatgatgagtaggttgattctcatctagcggcaccattgctcactacaactggtttgcttgagcaacttaatgtcactctcaagaggaccctcctttcgaccgacaccctgaagcaccacacaagctttagaaaagtcggaattgtacttcgtatacataaattacatgatattatatgttcatgtaattctatgttgattctttagaaataatatatatgatattgtaatgtgtgttcgacatcaatttattttatttgagttcgccgtgcgtacgtttggggttgtttctccctcgcttcttcctggcggcgaaagatagagaagggcgagtggccgcgcggaacatcgacaaccgagaaacccc

SEQ ID NO: 220146 - DNA, 3249 bp, Zea Mays
ggtctccccgatgtggatgggggaagtgccttgtcattgatgaagccgatcgcatacttgagcaaaactttgaggcagactgttcttttttctgctacacagactctagatgttgaaaaaattgctaaactgtcatttgagaaaaatgaagtaaaaaaagcctgattatgttggagttgatgatgataagtcaaaggctactgttgaaggcctgcagcagggttattgtgtcatttctagcgataaaaggttcttggttctgtatgctttcctaagaaagagaagataatggtgttcttctcatcatgtaattcagtaaagttccacgttgaacttctgaatttctttaggatagagtgttttgatatccatggaaaacagaagcaactgaagcgaactactacattctttagcttttgcaaggcaggaaagggcatcttattgtgtactaatgtggctgcccgtggacttgatactcctgacgtgaaggaaggcagtgttcatgtctcatccagttcaaatgaagtgacaggaaccattccagagacgaatggaggcgatcatcatatacctggaagctcttttcatgtttagtgaaggtctatgacatgtctgatagtcaaatgaagctaaatgattttatttcaagccttgttcttgagaggatggtcaagattaatttgagtagggtgacttcataatggacgacgaggaagaagtggaaggagaggaagaggaacaaaagagtgatgaccagaagcgaagaaacaaaactaaaaagaaaaggaagagtgctatagaggagcaacggtaccaggacgcgtcaaggttgacaaagctatctgggaccacttttgtaattgccaactcttcactgattattttcctatatgttgctccagaataaatggatcatagtgcggtggtcatgggattgggatctgctccgtatttgcagggtgaagccttcgtgtctcctcgagggaaagtcactgacctttcttgggacgtggaccactgacggcccccgtcatcccccatgacggtgatcctagggtgaagccttcgtgtttcctcgagggaaatctaccagtgcgggattgatttagtcagcaccattggacacagggtttagttccattgcctggacccatcaatgaatcatggtgccaaggtcttgatggttcgacttcaaggtactgatattctccaggactattgttagcatcccttgtggtccatctgcattagcagtgaagaaagtcgcatggggacttgcttgatatgttgttattgctcagacatggctgagaaggaggaaacaaagggccgctgccctgcctgccacacacgttatgacaaggatatgatcgtcaagatggccgccacttgtgacaggacagtggcagataaaaatgcggagaagaagcaaaaggcccaaagggttaagccaaaggcagcaccaacagcaacaacaacatcaaccgtagaatctaagaagcatcttgctactatcagggttatccagagaaatctggtgtacataattgggctacctgcgcatttatgcaatgagagcgtacttgagcgtagggagtactttggtcattatgggaaagttttgaaggttttagtttcccgtccgactgggcctccctctcagcaggcatcagcaaacagcagtattagtgtgtatgtctctctgaattatacggtgtacatgcatgatctgttcatacttcatatgaatttagatttatactttcagtactggtcaattagcctgatggaatatcaaataactatctactgattctatgcaattgcatgtttcaagtttctaatgctgccttgtaatactggaacattggtattataagaaagtaaattcaaacttcaatattgttatgtggttttctattgaacctggtgaaaatgtgataattatgtccatatccttgcaagcagttcagtcatttaagtttaatctaggctacttagcagtgtgattttcctgtagcctcttgatttgcatagccgcacagcccgtgcttgaaagtaacatttttatcctcattgctgacattaggatatgtattgtattattggtgtgaaattcaaagaatcagatagatgcaagatatctgtttgtgggataggatcagaacccaatcctgtgtgtgcagatatagataaaaatcatcttttaatgaaatgtctatttttttctcggtttgagtactttatattgttctcctgggatgtgttttttttctttatgggtgatttctcttggaaatcctaggatagtgtttcgatgtattctgaaactttgttgtgccagaaacatgcattgttttatcattaaccagaattgagttagggattatcattaaggcattaaccaaaatggagttaggatgtctttttttgtagtgtagaaaacgttgtgtatactgaaatgtgcatgcttgcaacatgtctaatatagattatatttgagtggtatctttgttgaagaacatgtgaaattagagttctggtggtcttctagaacacacactgctcctcatctttactttctctacataattcttcaatatgttggtatgttcccgtgactccttggtttagctatccttatacatgcatgttgttacataaatcaattagtttttccctgaaggacaggcctggtgcagtggtgagaggcctttccactgagccaaagggcctgggtttgacgcagcctctgcgcaaaaatgagatatacgtggagcgtcagaattatatgtgcatctacaagaacagttacaacaattctccatcaggttgatgttcatacatctcagatataaatgtgggggagacggtgcctcatcaatgatgagtaggttgattctcatctagcggcaccattgctcactacaactggtttgcttgagcaacttaatgtcactctcaagaggaccctcctttcgaccgacaccctgaagcaccacacaagctttagaaaagtcggaattgtacttcgtatacataaattacatgatattatatgttcatgtaattctatgttgattctttagaaataatatatatgatattgtaatgtgtgttcgacatcaatttattttatttgagttcgccgtgcgtacgtttggggttgtttctccctcgcttcttcctggcggcgaaagatagagaagggcgagtggccgcgcggaacatcgacaaccgagaaacccc

SEQ ID NO: 220147 - DNA, 3367 bp, Zea Mays
cacaggaccttgttctgcctccccgcgcatcggctgctgccgcgcacaaatccgccgcgccctcggtcccgcaaatccgccgtgccagctccgcccgctcgattcccctcctagcgcccgcattccccgccgccgtcctcgcggccgcagcgcccctggaccccacgccagcaacgcccgcagtccccgccgtggatctcgcccgaaggcgccgccatggacgccctagatctaccacctcctcctctccccatcactgcgccgcctgcccccgccgcacacctacagcgcgccccttcccccaccgtggatctcgcccatacgccagcggatctcgcactccttccttcgacggcgcggtggcgaggaggtcagcgacggcggcgtcgagtcgaggtcgggcacgaaggcgcggaggccgtgggagcggtcgtggcctacgcacgcacgacgccgctcccccagttcaaaccgaggtcagcgacgacgcacgcacgcaccaccccttcccccttcgtcttccattcccagctggaggtgcacgctgccgggcagagcgtcttgctggaggtgcgatagccatgtctggacctccgtcgccgccatagaaggttgaaaaaattgctaaactgtcatttgagaaaaatgaagtaaaaaaagcctgattatgttggagttgatgatgataagtcaaaggctactgttgaaggcctgcagcagggttattgtgtcatttctagcgataaaaggttcttggttctgtatgctttcctaagaaagagaagataatggtgttcttctcatcatgtaattcagtaaagttccacgttgaacttctgaatttctttaggatagagtgttttgatatccatggaaaacagaagcaactgaagcgaactactacattctttagcttttgcaaggcaggaaagggcatcttattgtgtactaatgtggctgcccgtggacttgatactcctgacgtgaaggaaggcagtgttcatgtctcatccagttcaaatgaagtgacaggaaccattccagagacgaatggaggcgatcatcatatacctggaagctcttttcatgtttagtgaaggtctatgacatgtctgatagtcaaatgaagctaaatgattttatttcaagccttgttcttgagaggatggtcaagattaatttgagtagggtgacttcataatggacgacgaggaagaagtggaaggagaggaagaggaacaaaagagtgatgaccagaagcgaagaaacaaaactaaaaagaaaaggaagaggtacctccctttgttcgtactaggaataaatgccaatgtactgtgtacacctatcctgaaatgaggatgactatatgttgctttaggataataacatcactgccatcactctcccaaagtcgctatgtttttctgtcatagtttgttgtcctgaccaaattttttaatttgttgtctatttctcttaggttgttctttcaataagctgtatctttctctcgtatgcaatgtaaatttcaggtatttgtgaaatatgagtgttgttttggtctcaaaataaatccacaaaagattttagcatctgtaagcactgttgcacattatccaattatatcagggtggtctagaactgttttgtgttgtttatttttagttgaggtgtgtatctttccccaccattgtatgttacaattttctaactacatctgttatgtttgggtgctcttgcattctcgcaaagtgctatagaggagcaacggtaccaggacgcgtcaaggttgacaaagctatctgggaccacttttgtaattgccaactcttcactgattattttcctatatgttgctccagaataaatggtaagtgttgatcggtaattcttgtgaacgtaggtaatactgaatctctgactgtttgtgacctatatcccctgaaaacctgaatctcagattgctttagcttagcgcctacatggcagtcctcttgtcgtgaacattttgatctgtgttccgtatatgcttgtaggatcatagtgcggtggtcatgggattgggatctgctccgtatttgcagggtgaagccttcgtgtctcctcgagggaaagtcactgacctttcttgggacgtggaccactgacggcccccgtcatcccccatgacggtgatcctagggtgaagccttcgtgtttcctcgagggaaatctaccagtgcgggattgatttagtcagcaccattggacacagggtttagttccattgcctggacccatcaatgaatcatggtgccaaggtcttgatggttcgacttcaaggtactgatattctccaggactattgttagcatcccttgtggtccatctgcattagcagtgaagaaagtcgcatggggacttgcttgatatgttgttattgctcagacatggctgagaaggaggaaacaaagggccgctgccctgcctgccacacacgttatgacaaggatatgatcgtcaagatggccgccacttgtgacaggacagtggcagataaaaatgcggagaagaagcaaaaggcccaaagggttaagccaaaggcagcaccaacagcaacaacaacatcaaccgtagaatctaagaagcatcttgctactatcagggttatccagagaaatctggtgtacataattgggctacctgcgcatttatgcaatgagagcgtacttgagcgtagggagtactttggtcattatgggaaagttttgaaggttttagtttcccgtccgactgggcctccctctcagcaggcatcagcaaacagcagtattagtgtggttaaggcttgccttggttattacttccccagacccgactcatgcgggagccgtcagcattgggagatatacgtggagcgtcagaattatatgtgcatctacaagaacagttacaacaattctccatcaggttgatgttcatacatctcagatataaatgtgggggagacggtgcctcatcaatgatgagtaggttgattctcatctagcggcaccattgctcactacaactggtttgcttgagcaacttaatgtcactctcaagaggaccctcctttcgaccgacaccctgaagcaccacacaagctttagaaaagtcggaattgtacttcgtatacataaattacatgatattatatgttcatgtaattctatgttgattctttagaaataatatatatgatattgtaatgtgtgttcgacatcaatttattttatttgagttcgccgtgcgtacgtttggggttgtttctccctcgcttcttcctggcggcgaaagatagagaagggcgagtggccgcgcggaacatcgacaaccgagaaacccc

SEQ ID NO: 220148 - DNA, 3089 bp, Zea Mays
cacaggaccttgttctgcctccccgcgcatcggctgctgccgcgcacaaatccgccgcgccctcggtcccgcaaatccgccgtgccagctccgcccgctcgattcccctcctagcgcccgcattccccgccgccgtcctcgcggccgcagcgcccctggaccccacgccagcaacgcccgcagtccccgccgtggatctcgcccgaaggcgccgccatggacgccctagatctaccacctcctcctctccccatcactgcgccgcctgcccccgccgcacacctacagcgcgccccttcccccaccgtggatctcgcccatacgccagcggatctcgcactccttccttcgacggcgcggtggcgaggaggtcagcgacggcggcgtcgagtcgaggtcgggcacgaaggcgcggaggccgtgggagcggtcgtggcctacgcacgcacgacgccgctcccccagttcaaaccgaggtcagcgacgacgcacgcacgcaccaccccttcccccttcgtcttccattcccagctggaggtgcacgctgccgggcagagcgtcttgctggaggtgcgatagccatgtctggacctccgtcgccgccatagaaggttgaaaaaattgctaaactgtcatttgagaaaaatgaagtaaaaaaagcctgattatgttggagttgatgatgataagtcaaaggctactgttgaaggcctgcagcagggttattgtgtcatttctagcgataaaaggttcttggttctgtatgctttcctaagaaagagaagataatggtgttcttctcatcatgtaattcagtaaagttccacgttgaacttctgaatttctttaggatagagtgttttgatatccatggaaaacagaagcaactgaagcgaactactacattctttagcttttgcaaggcaggaaagggcatcttattgtgtactaatgtggctgcccgtggacttgatactcctgacgtgaaggaaggcagtgttcatgtctcatccagttcaaatgaagtgacaggaaccattccagagacgaatggaggcgatcatcatatacctggaagctcttttcatgtttagtgaaggtctatgacatgtctgatagtcaaatgaagctaaatgattttatttcaagccttgttcttgagaggatggtcaagattaatttgagtagggtgacttcataatggacgacgaggaagaagtggaaggagaggaagaggaacaaaagagtgatgaccagaagcgaagaaacaaaactaaaaagaaaaggaagaggtacctccctttgttcgtactaggaataaatgccaatgtactgtgtacacctatcctgaaatgaggatgactatatgttgctttaggataataacatcactgccatcactctcccaaagtcgctatgtttttctgtcatagtttgttgtcctgaccaaattttttaatttgttgtctatttctcttaggttgttctttcaataagctgtatctttctctcgtatgcaatgtaaatttcaggtatttgtgaaatatgagtgttgttttggtctcaaaataaatccacaaaagattttagcatctgtaagcactgttgcacattatccaattatatcagggtggtctagaactgttttgtgttgtttatttttagttgaggtgtgtatctttccccaccattgtatgttacaattttctaactacatctgttatgtttgggtgctcttgcattctcgcaaagtgctatagaggagcaacggtaccaggacgcgtcaaggttgacaaagctatctgggaccacttttgtaattgccaactcttcactgattattttcctatatgttgctccagaataaatgggtgaagccttcgtgtctcctcgagggaaagtcactgacctttcttgggacgtggaccactgacggcccccgtcatcccccatgacggtgatcctagggtgaagccttcgtgtttcctcgagggaaatctaccagtgcgggattgatttagtcagcaccattggacacagggtttagttccattgcctggacccatcaatgaatcatggtgccaaggtcttgatggttcgacttcaaggtactgatattctccaggactattgttagcatcccttgtggtccatctgcattagcagtgaagaaagtcgcatggggacttgcttgatatgttgttattgctcagacatggctgagaaggaggaaacaaagggccgctgccctgcctgccacacacgttatgacaaggatatgatcgtcaagatggccgccacttgtgacaggacagtggcagataaaaatgcggagaagaagcaaaaggcccaaagggttaagccaaaggcagcaccaacagcaacaacaacatcaaccgtagaatctaagaagcatcttgctactatcagggttatccagagaaatctggtgtacataattgggctacctgcgcatttatgcaatgagagcgtacttgagcgtagggagtactttggtcattatgggaaagttttgaaggttttagtttcccgtccgactgggcctccctctcagcaggcatcagcaaacagcagtattagtgtgagatatacgtggagcgtcagaattatatgtgcatctacaagaacagttacaacaattctccatcaggttgatgttcatacatctcagatataaatgtgggggagacggtgcctcatcaatgatgagtaggttgattctcatctagcggcaccattgctcactacaactggtttgcttgagcaacttaatgtcactctcaagaggaccctcctttcgaccgacaccctgaagcaccacacaagctttagaaaagtcggaattgtacttcgtatacataaattacatgatattatatgttcatgtaattctatgttgattctttagaaataatatatatgatattgtaatgtgtgttcgacatcaatttattttatttgagttcgccgtgcgtacgtttggggttgtttctccctcgcttcttcctggcggcgaaagatagagaagggcgagtggccgcgcggaacatcgacaaccgagaaacccc

SEQ ID NO: 220149 - DNA, 2818 bp, Zea Mays
cacaggaccttgttctgcctccccgcgcatcggctgctgccgcgcacaaatccgccgcgccctcggtcccgcaaatccgccgtgccagctccgcccgctcgattcccctcctagcgcccgcattccccgccgccgtcctcgcggccgcagcgcccctggaccccacgccagcaacgcccgcagtccccgccgtggatctcgcccgaaggcgccgccatggacgccctagatctaccacctcctcctctccccatcactgcgccgcctgcccccgccgcacacctacagcgcgccccttcccccaccgtggatctcgcccatacgccagcggatctcgcactccttccttcgacggcgcggtggcgaggaggtcagcgacggcggcgtcgagtcgaggtcgggcacgaaggcgcggaggccgtgggagcggtcgtggcctacgcacgcacgacgccgctcccccagttcaaaccgaggtcagcgacgacgcacgcacgcaccaccccttcccccttcgtcttccattcccagctggaggtgcacgctgccgggcagagcgtcttgctggaggtgcgatagccatgtctggacctccgtcgccgccatagaagtgccttgtcattgatgaagccgatcgcatacttgagcaaaactttgaggcagactgttcttttttctgctacacagactctagatgttgaaaaaattgctaaactgtcatttgagaaaaatgaagtaaaaaaagcctgattatgttggagttgatgatgataagtcaaaggctactgttgaaggcctgcagcagggttattgtgtcatttctagcgataaaaggttcttggttctgtatgctttcctaagaaagagaagataatggtgttcttctcatcatgtaattcagtaaagttccacgttgaacttctgaatttctttaggatagagtgttttgatatccatggaaaacagaagcaactgaagcgaactactacattctttagcttttgcaaggcaggaaagggcatcttattgtgtactaatgtggctgcccgtggacttgatactcctgacgtgaaggaaggcagtgttcatgtctcatccagttcaaatgaagtgacaggaaccattccagagacgaatggaggcgatcatcatatacctggaagctcttttcatgtttagtgaaggtctatgacatgtctgatagtcaaatgaagctaaatgattttatttcaagccttgttcttgagaggatggtcaagattaatttgagtagggtgacttcataatggacgacgaggaagaagtggaaggagaggaagaggaacaaaagagtgatgaccagaagcgaagaaacaaaactaaaaagaaaaggaagagaggagcaacggtaccaggacgcgtcaaggttgacaaagctatctgggaccacttttgtaattgccaactcttcactgattattttcctatatgttgctccagaataaatggatcatagtgcggtggtcatgggattgggatctgctccgtatttgcagggtgaagccttcgtgtctcctcgagggaaagtcactgacctttcttgggacgtggaccactgacggcccccgtcatcccccatgacggtgatcctagggtgaagccttcgtgtttcctcgagggaaatctaccagtgcgggattgatttagtcagcaccattggacacagggtttagttccattgcctggacccatcaatgaatcatggtgccaaggtcttgatggttcgacttcaaggtactgatattctccaggactattgttagcatcccttgtggtccatctgcattagcagtgaagaaagtcgcatggggacttgcttgatatgttgttattgctcagacatggctgagaaggaggaaacaaagggccgctgccctgcctgccacacacgttatgacaaggatatgatcgtcaagatggccgccacttgtgacaggacagtggcagataaaaatgcggagaagaagcaaaaggcccaaagggttaagccaaaggcagcaccaacagcaacaacaacatcaaccgtagaatctaagaagcatcttgctactatcagggttatccagagaaatctggtgtacataattgggctacctgcgcatttatgcaatgagagcgtacttgagcgtagggagtactttggtcattatgggaaagttttgaaggttttagtttcccgtccgactgggcctccctctcagcaggcatcagcaaacagcagtattagtgtggttaaggcttgccttggttattacttccccagacccgactcatgcgggagccgtcagcattgggagatatacgtggagcgtcagaattatatgtgcatctacaagaacagttacaacaattctccatcaggttgatgttcatacatctcagatataaatgtgggggagacggtgcctcatcaatgatgagtaggttgattctcatctagcggcaccattgctcactacaactggtttgcttgagcaacttaatgtcactctcaagaggaccctcctttcgaccgacaccctgaagcaccacacaagctttagaaaagtcggaattgtacttcgtatacataaattacatgatattatatgttcatgtaattctatgttgattctttagaaataatatatatgatattgtaatgtgtgttcgacatcaatttattttatttgagttcgccgtgcgtacgtttggggttgtttctccctcgcttcttcctggcggcgaaagatagagaagggcgagtggccgcgcggaacatcgacaaccgagaaacccc

SEQ ID NO: 220150 - DNA, 4375 bp, Zea Mays
cacaggaccttgttctgcctccccgcgcatcggctgctgccgcgcacaaatccgccgcgccctcggtcccgcaaatccgccgtgccagctccgcccgctcgattcccctcctagcgcccgcattccccgccgccgtcctcgcggccgcagcgcccctggaccccacgccagcaacgcccgcagtccccgccgtggatctcgcccgaaggcgccgccatggacgccctagatctaccacctcctcctctccccatcactgcgccgcctgcccccgccgcacacctacagcgcgccccttcccccaccgtggatctcgcccatacgccagcggatctcgcactccttccttcgacggcgcggtggcgaggaggtcagcgacggcggcgtcgagtcgaggtcgggcacgaaggcgcggaggccgtgggagcggtcgtggcctacgcacgcacgacgccgctcccccagttcaaaccgaggtcagcgacgacgcacgcacgcaccaccccttcccccttcgtcttccattcccagctggaggtgcacgctgccgggcagagcgtcttgctggaggtgcgatagccatgtctggacctccgtcgccgccatagaaggttgaaaaaattgctaaactgtcatttgagaaaaatgaagtaaaaaaagcctgattatgttggagttgatgatgataagtcaaaggctactgttgaaggcctgcagcagggttattgtgtcatttctagcgataaaaggttcttggttctgtatgctttcctaagaaagagaagataatggtgttcttctcatcatgtaattcagtaaagttccacgttgaacttctgaatttctttaggatagagtgttttgatatccatggaaaacagaagcaactgaagcgaactactacattctttagcttttgcaaggcaggaaagggcatcttattgtgtactaatgtggctgcccgtggacttgatactcctgacgtgaaggaaggcagtgttcatgtctcatccagttcaaatgaagtgacaggaaccattccagagacgaatggaggcgatcatcatatacctggaagctcttttcatgtttagtgaaggtctatgacatgtctgatagtcaaatgaagctaaatgattttatttcaagccttgttcttgagaggatggtcaagattaatttgagtagggtgacttcataatggacgacgaggaagaagtggaaggagaggaagaggaacaaaagagtgatgaccagaagcgaagaaacaaaactaaaaagaaaaggaagaggtacctccctttgttcgtactaggaataaatgccaatgtactgtgtacacctatcctgaaatgaggatgactatatgttgctttaggataataacatcactgccatcactctcccaaagtcgctatgtttttctgtcatagtttgttgtcctgaccaaattttttaatttgttgtctatttctcttaggttgttctttcaataagctgtatctttctctcgtatgcaatgtaaatttcaggtatttgtgaaatatgagtgttgttttggtctcaaaataaatccacaaaagattttagcatctgtaagcactgttgcacattatccaattatatcagggtggtctagaactgttttgtgttgtttatttttagttgaggtgtgtatctttccccaccattgtatgttacaattttctaactacatctgttatgtttgggtgctcttgcattctcgcaaagtgctatagaggagcaacggtaccaggacgcgtcaaggttgacaaagctatctgggaccacttttgtaattgccaactcttcactgattattttcctatatgttgctccagaataaatggtaagtgttgatcggtaattcttgtgaacgtaggtaatactgaatctctgactgtttgtgacctatatcccctgaaaacctgaatctcagattgctttagcttagcgcctacatggcagtcctcttgtcgtgaacattttgatctgtgttccgtatatgcttgtaggatcatagtgcggtggtcatgggattgggatctgctccgtatttgcagggtgaagccttcgtgtctcctcgagggaaagtcactgacctttcttgggacgtggaccactgacggcccccgtcatcccccatgacggtgatcctagggtgaagccttcgtgtttcctcgagggaaatctaccagtgcgggattgatttagtcagcaccattggacacagggtttagttccattgcctggacccatcaatgaatcatggtgccaaggtcttgatggttcgacttcaaggtactgatattctccaggactattgttagcatcccttgtggtccatctgcattagcagtgaagaaagtcgcatggggacttgcttgatatgttgttattgctcagacatggctgagaaggaggaaacaaagggccgctgccctgcctgccacacacgttatgacaaggatatgatcgtcaagatggccgccacttgtgacaggacagtggcagataaaaatgcggagaagaagcaaaaggcccaaagggttaagccaaaggcagcaccaacagcaacaacaacatcaaccgtagaatctaagaagcatcttgctactatcagggttatccagagaaatctggtgtacataattgggctacctgcgcatttatgcaatgagagcgtacttgagcgtagggagtactttggtcattatgggaaagttttgaaggttttagtttcccgtccgactgggcctccctctcagcaggcatcagcaaacagcagtattagtgtgtatgtctctctgaattatacggtgtacatgcatgatctgttcatacttcatatgaatttagatttatactttcagtactggtcaattagcctgatggaatatcaaataactatctactgattctatgcaattgcatgtttcaagtttctaatgctgccttgtaatactggaacattggtattataagaaagtaaattcaaacttcaatattgttatgtggttttctattgaacctggtgaaaatgtgataattatgtccatatccttgcaagcagttcagtcatttaagtttaatctaggctacttagcagtgtgattttcctgtagcctcttgatttgcatagccgcacagcccgtgcttgaaagtaacatttttatcctcattgctgacattaggatatgtattgtattattggtgtgaaattcaaagaatcagatagatgcaagatatctgtttgtgggataggatcagaacccaatcctgtgtgtgcagatatagataaaaatcatcttttaatgaaatgtctatttttttctcggtttgagtactttatattgttctcctgggatgtgttttttttctttatgggtgatttctcttggaaatcctaggatagtgtttcgatgtattctgaaactttgttgtgccagaaacatgcattgttttatcattaaccagaattgagttagggattatcattaaggcattaaccaaaatggagttaggatgtctttttttgtagtgtagaaaacgttgtgtatactgaaatgtgcatgcttgcaacatgtctaatatagattatatttgagtggtatctttgttgaagaacatgtgaaattagagttctggtggtcttctagaacacacactgctcctcatctttactttctctacataattcttcaatatgttggtatgttcccgtgactccttggtttagctatccttatacatgcatgttgttacataaatcaattagtttttccctgaaggacaggcctggtgcagtggtgagaggcctttccactgagccaaagggcctgggtttgacgcagcctctgcgcaaaaatgagatatacgtggagcgtcagaattatatgtgcatctacaagaacagttacaacaattctccatcaggttgatgttcatacatctcagatataaatgtgggggagacggtgcctcatcaatgatgagtaggttgattctcatctagcggcaccattgctcactacaactggtttgcttgagcaacttaatgtcactctcaagaggaccctcctttcgaccgacaccctgaagcaccacacaagctttagaaaagtcggaattgtacttcgtatacataaattacatgatattatatgttcatgtaattctatgttgattctttagaaataatatatatgatattgtaatgtgtgttcgacatcaatttattttatttgagttcgccgtgcgtacgtttggggttgtttctccctcgcttcttcctggcggcgaaagatagagaagggcgagtggccgcgcggaacatcgacaaccgagaaacccc

SEQ ID NO: 220151 - DNA, 3575 bp, Zea Mays
cacaggaccttgttctgcctccccgcgcatcggctgctgccgcgcacaaatccgccgcgccctcggtcccgcaaatccgccgtgccagctccgcccgctcgattcccctcctagcgcccgcattccccgccgccgtcctcgcggccgcagcgcccctggaccccacgccagcaacgcccgcagtccccgccgtggatctcgcccgaaggcgccgccatggacgccctagatctaccacctcctcctctccccatcactgcgccgcctgcccccgccgcacacctacagcgcgccccttcccccaccgtggatctcgcccatacgccagcggatctcgcactccttccttcgacggcgcggtggcgaggaggtcagcgacggcggcgtcgagtcgaggtcgggcacgaaggcgcggaggccgtgggagcggtcgtggcctacgcacgcacgacgccgctcccccagttcaaaccgaggtcagcgacgacgcacgcacgcaccaccccttcccccttcgtcttccattcccagctggaggtgcacgctgccgggcagagcgtcttgctggaggtgcgatagccatgtctggacctccgtcgccgccatagaaggtaatggccctccgattgatgctgtttgattccttctcctttttgtttgggacgtcgccaaattccatcccatttctcagcgtcgtggtctccccgatgtggatgggggaaggtaatttgcttttttcttcgttaacaattgctagactcttgcctccggaggtaatcaactctgtcagggtaaccttggcatgtttatgaatgccaacacaccatggctgattgatcccctctccaacttactttgtgcatctatgtaattatgcagtgccttgtcattgatgaagccgatcgcatacttgagcaaaactttgaggcagactgttcttttttctgctacacagactctagatgttagtagatcttttatgctgcttgtagtcaacttttcattcatgatttatataatttgctcttcttatgcggtgatgcccacaggttgaaaaaattgctaaactgtcatttgagaaaaatgaagtaaaaaaagcctgattatgttggagttgatgatgataagtcaaaggctactgttgaaggcctgcagcagggttattgtgtcatttctagcgataaaaggttcttggttctgtatgctttcctaagaaagagaagataatggtgttcttctcatcatgtaattcagtaaagttccacgttgaacttctgaatttctttaggatagagtgttttgatatccatggaaaacagaagcaactgaagcgaactactacattctttagcttttgcaaggcaggaaagggcatcttattgtgtactaatgtggctgcccgtggacttgatactcctgacgtgaaggaaggcagtgttcatgtctcatccagttcaaatgaagtgacaggaaccattccagagacgaatggaggcgatcatcatatacctggaagctcttttcatgtttagtgaaggtctatgacatgtctgatagtcaaatgaagctaaatgattttatttcaagccttgttcttgagaggatggtcaagattaatttgagtagggtgacttcataatggacgacgaggaagaagtggaaggagaggaagaggaacaaaagagtgatgaccagaagcgaagaaacaaaactaaaaagaaaaggaagaggtacctccctttgttcgtactaggaataaatgccaatgtactgtgtacacctatcctgaaatgaggatgactatatgttgctttaggataataacatcactgccatcactctcccaaagtcgctatgtttttctgtcatagtttgttgtcctgaccaaattttttaatttgttgtctatttctcttaggttgttctttcaataagctgtatctttctctcgtatgcaatgtaaatttcaggtatttgtgaaatatgagtgttgttttggtctcaaaataaatccacaaaagattttagcatctgtaagcactgttgcacattatccaattatatcagggtggtctagaactgttttgtgttgtttatttttagttgaggtgtgtatctttccccaccattgtatgttacaattttctaactacatctgttatgtttgggtgctcttgcattctcgcaaagtgctatagaggagcaacggtaccaggacgcgtcaaggttgacaaagctatctgggaccacttttgtaattgccaactcttcactgattattttcctatatgttgctccagaataaatggatcatagtgcggtggtcatgggattgggatctgctccgtatttgcagggtgaagccttcgtgtctcctcgagggaaagtcactgacctttcttgggacgtggaccactgacggcccccgtcatcccccatgacggtgatcctagggtgaagccttcgtgtttcctcgagggaaatctaccagtgcgggattgatttagtcagcaccattggacacagggtttagttccattgcctggacccatcaatgaatcatggtgccaaggtcttgatggttcgacttcaaggtactgatattctccaggactattgttagcatcccttgtggtccatctgcattagcagtgaagaaagtcgcatggggacttgcttgatatgttgttattgctcagacatggctgagaaggaggaaacaaagggccgctgccctgcctgccacacacgttatgacaaggatatgatcgtcaagatggccgccacttgtgacaggacagtggcagataaaaatgcggagaagaagcaaaaggcccaaagggttaagccaaaggcagcaccaacagcaacaacaacatcaaccgtagaatctaagaagcatcttgctactatcagggttatccagagaaatctggtgtacataattgggctacctgcgcatttatgcaatgagagcgtacttgagcgtagggagtactttggtcattatgggaaagttttgaaggttttagtttcccgtccgactgggcctccctctcagcaggcatcagcaaacagcagtattagtgtgagatatacgtggagcgtcagaattatatgtgcatctacaagaacagttacaacaattctccatcaggttgatgttcatacatctcagatataaatgtgggggagacggtgcctcatcaatgatgagtaggttgattctcatctagcggcaccattgctcactacaactggtttgcttgagcaacttaatgtcactctcaagaggaccctcctttcgaccgacaccctgaagcaccacacaagctttagaaaagtcggaattgtacttcgtatacataaattacatgatattatatgttcatgtaattctatgttgattctttagaaataatatatatgatattgtaatgtgtgttcgacatcaatttattttatttgagttcgccgtgcgtacgtttggggttgtttctccctcgcttcttcctggcggcgaaagatagagaagggcgagtggccgcgcggaacatcgacaaccgagaaacccc

SEQ ID NO: 220152 - DNA, 2896 bp, Zea Mays
cacaggaccttgttctgcctccccgcgcatcggctgctgccgcgcacaaatccgccgcgccctcggtcccgcaaatccgccgtgccagctccgcccgctcgattcccctcctagcgcccgcattccccgccgccgtcctcgcggccgcagcgcccctggaccccacgccagcaacgcccgcagtccccgccgtggatctcgcccgaaggcgccgccatggacgccctagatctaccacctcctcctctccccatcactgcgccgcctgcccccgccgcacacctacagcgcgccccttcccccaccgtggatctcgcccatacgccagcggatctcgcactccttccttcgacggcgcggtggcgaggaggtcagcgacggcggcgtcgagtcgaggtcgggcacgaaggcgcggaggccgtgggagcggtcgtggcctacgcacgcacgacgccgctcccccagttcaaaccgaggttgaaaaaattgctaaactgtcatttgagaaaaatgaagtaaaaaaagcctgattatgttggagttgatgatgataagtcaaaggctactgttgaaggcctgcagcagggttattgtgtcatttctagcgataaaaggttcttggttctgtatgctttcctaagaaagagaagataatggtgttcttctcatcatcttttgcaaggcaggaaagggcatcttattgtgtactaatgtggctgcccgtggacttgatactcctgacgtgaaggaaggcagtgttcatgtctcatccagttcaaatgaagtgacaggaaccattccagagacgaatggaggcgatcatcatatacctggaagctcttttcatgtttagtgaaggtctatgacatgtctgatagtcaaatgaagctaaatgattttatttcaagccttgttcttgagaggatggtcaagattaatttgagtagggtgacttcataatggacgacgaggaagaagtggaaggagaggaagaggaacaaaagagtgatgaccagaagcgaagaaacaaaactaaaaagaaaaggaagaggtacctccctttgttcgtactaggaataaatgccaatgtactgtgtacacctatcctgaaatgaggatgactatatgttgctttaggataataacatcactgccatcactctcccaaagtcgctatgtttttctgtcatagtttgttgtcctgaccaaattttttaatttgttgtctatttctcttaggttgttctttcaataagctgtatctttctctcgtatgcaatgtaaatttcaggtatttgtgaaatatgagtgttgttttggtctcaaaataaatccacaaaagattttagcatctgtaagcactgttgcacattatccaattatatcagggtggtctagaactgttttgtgttgtttatttttagttgaggtgtgtatctttccccaccattgtatgttacaattttctaactacatctgttatgtttgggtgctcttgcattctcgcaaagtgctatagaggagcaacggtaccaggacgcgtcaaggttgacaaagctatctgggaccacttttgtaattgccaactcttcactgattattttcctatatgttgctccagaataaatggatcatagtgcggtggtcatgggattgggatctgctccgtatttgcagggtgaagccttcgtgtctcctcgagggaaagtcactgacctttcttgggacgtggaccactgacggcccccgtcatcccccatgacggtgatcctagggtgaagccttcgtgtttcctcgagggaaatctaccagtgcgggattgatttagtcagcaccattggacacagggtttagttccattgcctggacccatcaatgaatcatggtgccaaggtcttgatggttcgacttcaaggtactgatattctccaggactattgttagcatcccttgtggtccatctgcattagcagtgaagaaagtcgcatggggacttgcttgatatgttgttattgctcagacatggctgagaaggaggaaacaaagggccgctgccctgcctgccacacacgttatgacaaggatatgatcgtcaagatggccgccacttgtgacaggacagtggcagataaaaatgcggagaagaagcaaaaggcccaaagggttaagccaaaggcagcaccaacagcaacaacaacatcaaccgtagaatctaagaagcatcttgctactatcagggttatccagagaaatctggtgtacataattgggctacctgcgcatttatgcaatgagagcgtacttgagcgtagggagtactttggtcattatgggaaagttttgaaggttttagtttcccgtccgactgggcctccctctcagcaggcatcagcaaacagcagtattagtgtgagatatacgtggagcgtcagaattatatgtgcatctacaagaacagttacaacaattctccatcaggttgatgttcatacatctcagatataaatgtgggggagacggtgcctcatcaatgatgagtaggttgattctcatctagcggcaccattgctcactacaactggtttgcttgagcaacttaatgtcactctcaagaggaccctcctttcgaccgacaccctgaagcaccacacaagctttagaaaagtcggaattgtacttcgtatacataaattacatgatattatatgttcatgtaattctatgttgattctttagaaataatatatatgatattgtaatgtgtgttcgacatcaatttattttatttgagttcgccgtgcgtacgtttggggttgtttctccctcgcttcttcctggcggcgaaagatagagaagggcgagtggccgcgcggaacatcgacaaccgagaaacccc

SEQ ID NO: 220153 - DNA, 3116 bp, Zea Mays
cacaggaccttgttctgcctccccgcgcatcggctgctgccgcgcacaaatccgccgcgccctcggtcccgcaaatccgccgtgccagctccgcccgctcgattcccctcctagcgcccgcattccccgccgccgtcctcgcggccgcagcgcccctggaccccacgccagcaacgcccgcagtccccgccgtggatctcgcccgaaggcgccgccatggacgccctagatctaccacctcctcctctccccatcactgcgccgcctgcccccgccgcacacctacagcgcgccccttcccccaccgtggatctcgcccatacgccagcggatctcgcactccttccttcgacggcgcggtggcgaggaggtcagcgacggcggcgtcgagtcgaggtcgggcacgaaggcgcggaggccgtgggagcggtcgtggcctacgcacgcacgacgccgctcccccagttcaaaccgaggtcagcgacgacgcacgcacgcaccaccccttcccccttcgtcttccattcccagctggaggtgcacgctgccgggcagagcgtcttgctggaggtgcgatagccatgtctggacctccgtcgccgccatagaagtgccttgtcattgatgaagccgatcgcatacttgagcaaaactttgaggcagactgttcttttttctgctacacagactctagatgttgaaaaaattgctaaactgtcatttgagaaaaatgaagtaaaaaaagcctgattatgttggagttgatgatgataagtcaaaggctactgttgaaggcctgcagcagggttattgtgtcatttctagcgataaaaggttcttggttctgtatgctttcctaagaaagagaagataatggtgttcttctcatcatcttttgcaaggcaggaaagggcatcttattgtgtactaatgtggctgcccgtggacttgatactcctgacgtgaaggaaggcagtgttcatgtctcatccagttcaaatgaagtgacaggaaccattccagagacgaatggaggcgatcatcatatacctggaagctcttttcatgtttagtgaaggtctatgacatgtctgatagtcaaatgaagctaaatgattttatttcaagccttgttcttgagaggatggtcaagattaatttgagtagggtgacttcataatggacgacgaggaagaagtggaaggagaggaagaggaacaaaagagtgatgaccagaagcgaagaaacaaaactaaaaagaaaaggaagaggtacctccctttgttcgtactaggaataaatgccaatgtactgtgtacacctatcctgaaatgaggatgactatatgttgctttaggataataacatcactgccatcactctcccaaagtcgctatgtttttctgtcatagtttgttgtcctgaccaaattttttaatttgttgtctatttctcttaggttgttctttcaataagctgtatctttctctcgtatgcaatgtaaatttcaggtatttgtgaaatatgagtgttgttttggtctcaaaataaatccacaaaagattttagcatctgtaagcactgttgcacattatccaattatatcagggtggtctagaactgttttgtgttgtttatttttagttgaggtgtgtatctttccccaccattgtatgttacaattttctaactacatctgttatgtttgggtgctcttgcattctcgcaaagtgctatagaggagcaacggtaccaggacgcgtcaaggttgacaaagctatctgggaccacttttgtaattgccaactcttcactgattattttcctatatgttgctccagaataaatggatcatagtgcggtggtcatgggattgggatctgctccgtatttgcagggtgaagccttcgtgtctcctcgagggaaagtcactgacctttcttgggacgtggaccactgacggcccccgtcatcccccatgacggtgatcctagggtgaagccttcgtgtttcctcgagggaaatctaccagtgcgggattgatttagtcagcaccattggacacagggtttagttccattgcctggacccatcaatgaatcatggtgccaaggtcttgatggttcgacttcaaggtactgatattctccaggactattgttagcatcccttgtggtccatctgcattagcagtgaagaaagtcgcatggggacttgcttgatatgttgttattgctcagacatggctgagaaggaggaaacaaagggccgctgccctgcctgccacacacgttatgacaaggatatgatcgtcaagatggccgccacttgtgacaggacagtggcagataaaaatgcggagaagaagcaaaaggcccaaagggttaagccaaaggcagcaccaacagcaacaacaacatcaaccgtagaatctaagaagcatcttgctactatcagggttatccagagaaatctggtgtacataattgggctacctgcgcatttatgcaatgagagcgtacttgagcgtagggagtactttggtcattatgggaaagttttgaaggttttagtttcccgtccgactgggcctccctctcagcaggcatcagcaaacagcagtattagtgtgagatatacgtggagcgtcagaattatatgtgcatctacaagaacagttacaacaattctccatcaggttgatgttcatacatctcagatataaatgtgggggagacggtgcctcatcaatgatgagtaggttgattctcatctagcggcaccattgctcactacaactggtttgcttgagcaacttaatgtcactctcaagaggaccctcctttcgaccgacaccctgaagcaccacacaagctttagaaaagtcggaattgtacttcgtatacataaattacatgatattatatgttcatgtaattctatgttgattctttagaaataatatatatgatattgtaatgtgtgttcgacatcaatttattttatttgagttcgccgtgcgtacgtttggggttgtttctccctcgcttcttcctggcggcgaaagatagagaagggcgagtggccgcgcggaacatcgacaaccgagaaacccc

SEQ ID NO: 220154 - DNA, 4746 bp, Zea Mays
cacaggaccttgttctgcctccccgcgcatcggctgctgccgcgcacaaatccgccgcgccctcggtcccgcaaatccgccgtgccagctccgcccgctcgattcccctcctagcgcccgcattccccgccgccgtcctcgcggccgcagcgcccctggaccccacgccagcaacgcccgcagtccccgccgtggatctcgcccgaaggcgccgccatggacgccctagatctaccacctcctcctctccccatcactgcgccgcctgcccccgccgcacacctacagcgcgccccttcccccaccgtggatctcgcccatacgccagcggatctcgcactccttccttcgacggcgcggtggcgaggaggtcagcgacggcggcgtcgagtcgaggtcgggcacgaaggcgcggaggccgtgggagcggtcgtggcctacgcacgcacgacgccgctcccccagttcaaaccgaggtcagcgacgacgcacgcacgcaccaccccttcccccttcgtcttccattcccagctggaggtgcacgctgccgggcagagcgtcttgctggaggtgcgatagccatgtctggacctccgtcgccgccatagaaggtaatggccctccgattgatgctgtttgattccttctcctttttgtttgggacgtcgccaaattccatcccatttctcagcgtcgtggtctccccgatgtggatgggggaaggtaatttgcttttttcttcgttaacaattgctagactcttgcctccggaggtaatcaactctgtcagggtaaccttggcatgtttatgaatgccaacacaccatggctgattgatcccctctccaacttactttgtgcatctatgtaattatgcagtgccttgtcattgatgaagccgatcgcatacttgagcaaaactttgaggcagactgttcttttttctgctacacagactctagatgttagtagatcttttatgctgcttgtagtcaacttttcattcatgatttatataatttgctcttcttatgcggtgatgcccacaggttgaaaaaattgctaaactgtcatttgagaaaaatgaagtaaaaaaagcctgattatgttggagttgatgatgataagtcaaaggctactgttgaaggcctgcagcagggttattgtgtcatttctagcgataaaaggttcttggttctgtatgctttcctaagaaagagaagataatggtgttcttctcatcatgtaattcagtaaagttccacgttgaacttctgaatttctttaggatagagtgttttgatatccatggaaaacagaagcaactgaagcgaactactacattctttagcttttgcaaggcaggaaagggcatcttattgtgtactaatgtggctgcccgtggacttgatactcctgacgtgaaggaaggcagtgttcatgtctcatccagttcaaatgaagtgacaggaaccattccagagacgaatggaggcgatcatcatatacctggaagctcttttcatgtttagtgaaggtctatgacatgtctgatagtcaaatgaagctaaatgattttatttcaagccttgttcttgagaggatggtcaagattaatttgagtagggtgacttcataatggacgacgaggaagaagtggaaggagaggaagaggaacaaaagagtgatgaccagaagcgaagaaacaaaactaaaaagaaaaggaagaggtacctccctttgttcgtactaggaataaatgccaatgtactgtgtacacctatcctgaaatgaggatgactatatgttgctttaggataataacatcactgccatcactctcccaaagtcgctatgtttttctgtcatagtttgttgtcctgaccaaattttttaatttgttgtctatttctcttaggttgttctttcaataagctgtatctttctctcgtatgcaatgtaaatttcaggtatttgtgaaatatgagtgttgttttggtctcaaaataaatccacaaaagattttagcatctgtaagcactgttgcacattatccaattatatcagggtggtctagaactgttttgtgttgtttatttttagttgaggtgtgtatctttccccaccattgtatgttacaattttctaactacatctgttatgtttgggtgctcttgcattctcgcaaagtgctatagaggagcaacggtaccaggacgcgtcaaggttgacaaagctatctgggaccacttttgtaattgccaactcttcactgattattttcctatatgttgctccagaataaatggatcatagtgcggtggtcatgggattgggatctgctccgtatttgcagggtgaagccttcgtgtctcctcgagggaaagtcactgacctttcttgggacgtggaccactgacggcccccgtcatcccccatgacggtgatcctagggtgaagccttcgtgtttcctcgagggaaatctaccagtgcgggattgatttagtcagcaccattggacacagggtttagttccattgcctggacccatcaatgaatcatggtgccaaggtcttgatggttcgacttcaaggtactgatattctccaggactattgttagcatcccttgtggtccatctgcattagcagtgaagaaagtcgcatggggacttgcttgatatgttgttattgctcagatttgtgtttcgtactggcaccacatcatagacatggctgagaaggaggaaacaaagggccgctgccctgcctgccacacacgttatgacaaggatatgatcgtcaagatggccgccacttgtgacaggacagtggcagataaaaatgcggagaagaagcaaaaggcccaaagggttaagccaaaggcagcaccaacagcaacaacaacatcaaccgtagaatctaagaagcatcttgctactatcagggttatccagagaaatctggtgtacataattgggctacctgcgcatttatgcaatgagagcgtacttgagcgtagggagtactttggtcattatgggaaagttttgaaggttttagtttcccgtccgactgggcctccctctcagcaggcatcagcaaacagcagtattagtgtgtatgtctctctgaattatacggtgtacatgcatgatctgttcatacttcatatgaatttagatttatactttcagtactggtcaattagcctgatggaatatcaaataactatctactgattctatgcaattgcatgtttcaagtttctaatgctgccttgtaatactggaacattggtattataagaaagtaaattcaaacttcaatattgttatgtggttttctattgaacctggtgaaaatgtgataattatgtccatatccttgcaagcagttcagtcatttaagtttaatctaggctacttagcagtgtgattttcctgtagcctcttgatttgcatagccgcacagcccgtgcttgaaagtaacatttttatcctcattgctgacattaggatatgtattgtattattggtgtgaaattcaaagaatcagatagatgcaagatatctgtttgtgggataggatcagaacccaatcctgtgtgtgcagatatagataaaaatcatcttttaatgaaatgtctatttttttctcggtttgagtactttatattgttctcctgggatgtgttttttttctttatgggtgatttctcttggaaatcctaggatagtgtttcgatgtattctgaaactttgttgtgccagaaacatgcattgttttatcattaaccagaattgagttagggattatcattaaggcattaaccaaaatggagttaggatgtctttttttgtagtgtagaaaacgttgtgtatactgaaatgtgcatgcttgcaacatgtctaatatagattatatttgagtggtatctttgttgaagaacatgtgaaattagagttctggtggtcttctagaacacacactgctcctcatctttactttctctacataattcttcaatatgttggtatgttcccgtgactccttggtttagctatccttatacatgcatgttgttacataaatcaattagtttttccctgaaggacaggcctggtgcagtggtgagaggcctttccactgagccaaagggcctgggtttgacgcagcctctgcgcaaaaatgtagggttaaggcttgccttggttattacttccccagacccgactcatgcgggagccgtcagcattgggagatatacgtggagcgtcagaattatatgtgcatctacaagaacagttacaacaattctccatcaggttgatgttcatacatctcagatataaatgtgggggagacggtgcctcatcaatgatgagtaggttgattctcatctagcggcaccattgctcactacaactggtttgcttgagcaacttaatgtcactctcaagaggaccctcctttcgaccgacaccctgaagcaccacacaagctttagaaaagtcggaattgtacttcgtatacataaattacatgatattatatgttcatgtaattctatgttgattctttagaaataatatatatgatattgtaatgtgtgttcgacatcaatttattttatttgagttcgccgtgcgtacgtttggggttgtttctccctcgcttcttcctggcggcgaaagatagagaagggcgagtggccgcgcggaacatcgacaaccgagaaacccc

SEQ ID NO: 220155 - DNA, 4528 bp, Zea Mays
cacaggaccttgttctgcctccccgcgcatcggctgctgccgcgcacaaatccgccgcgccctcggtcccgcaaatccgccgtgccagctccgcccgctcgattcccctcctagcgcccgcattccccgccgccgtcctcgcggccgcagcgcccctggaccccacgccagcaacgcccgcagtccccgccgtggatctcgcccgaaggcgccgccatggacgccctagatctaccacctcctcctctccccatcactgcgccgcctgcccccgccgcacacctacagcgcgccccttcccccaccgtggatctcgcccatacgccagcggatctcgcactccttccttcgacggcgcggtggcgaggaggtcagcgacggcggcgtcgagtcgaggtcgggcacgaaggcgcggaggccgtgggagcggtcgtggcctacgcacgcacgacgccgctcccccagttcaaaccgaggtcagcgacgacgcacgcacgcaccaccccttcccccttcgtcttccattcccagctggaggtgcacgctgccgggcagagcgtcttgctggaggtgcgatagccatgtctggacctccgtcgccgccatagaagtgccttgtcattgatgaagccgatcgcatacttgagcaaaactttgaggcagactgttcttttttctgctacacagactctagatgttgaaaaaattgctaaactgtcatttgagaaaaatgaagtaaaaaaagcctgattatgttggagttgatgatgataagtcaaaggctactgttgaaggcctgcagcagggttattgtgtcatttctagcgataaaaggttcttggttctgtatgctttcctaagaaagagaagataatggtgttcttctcatcatgtaattcagtaaagttccacgttgaacttctgaatttctttaggatagagtgttttgatatccatggaaaacagaagcaactgaagcgaactactacattctttagcttttgcaaggcaggaaagggcatcttattgtgtactaatgtggctgcccgtggacttgatactcctgacgtgaaggaaggcagtgttcatgtctcatccagttcaaatgaagtgacaggaaccattccagagacgaatggaggcgatcatcatatacctggaagctcttttcatgtttagtgaaggtctatgacatgtctgatagtcaaatgaagctaaatgattttatttcaagccttgttcttgagaggatggtcaagattaatttgagtagggtgacttcataatggacgacgaggaagaagtggaaggagaggaagaggaacaaaagagtgatgaccagaagcgaagaaacaaaactaaaaagaaaaggaagaggtacctccctttgttcgtactaggaataaatgccaatgtactgtgtacacctatcctgaaatgaggatgactatatgttgctttaggataataacatcactgccatcactctcccaaagtcgctatgtttttctgtcatagtttgttgtcctgaccaaattttttaatttgttgtctatttctcttaggttgttctttcaataagctgtatctttctctcgtatgcaatgtaaatttcaggtatttgtgaaatatgagtgttgttttggtctcaaaataaatccacaaaagattttagcatctgtaagcactgttgcacattatccaattatatcagggtggtctagaactgttttgtgttgtttatttttagttgaggtgtgtatctttccccaccattgtatgttacaattttctaactacatctgttatgtttgggtgctcttgcattctcgcaaagtgctatagaggagcaacggtaccaggacgcgtcaaggttgacaaagctatctgggaccacttttgtaattgccaactcttcactgattattttcctatatgttgctccagaataaatggtaagtgttgatcggtaattcttgtgaacgtaggtaatactgaatctctgactgtttgtgacctatatcccctgaaaacctgaatctcagattgctttagcttagcgcctacatggcagtcctcttgtcgtgaacattttgatctgtgttccgtatatgcttgtaggatcatagtgcggtggtcatgggattgggatctgctccgtatttgcagggtgaagccttcgtgtctcctcgagggaaagtcactgacctttcttgggacgtggaccactgacggcccccgtcatcccccatgacggtgatcctagggtgaagccttcgtgtttcctcgagggaaatctaccagtgcgggattgatttagtcagcaccattggacacagggtttagttccattgcctggacccatcaatgaatcatggtgccaaggtcttgatggttcgacttcaaggtactgatattctccaggactattgttagcatcccttgtggtccatctgcattagcagtgaagaaagtcgcatggggacttgcttgatatgttgttattgctcagacatggctgagaaggaggaaacaaagggccgctgccctgcctgccacacacgttatgacaaggatatgatcgtcaagatggccgccacttgtgacaggacagtggcagataaaaatgcggagaagaagcaaaaggcccaaagggttaagccaaaggcagcaccaacagcaacaacaacatcaaccgtagaatctaagaagcatcttgctactatcagggttatccagagaaatctggtgtacataattgggctacctgcgcatttatgcaatgagagcgtacttgagcgtagggagtactttggtcattatgggaaagttttgaaggttttagtttcccgtccgactgggcctccctctcagcaggcatcagcaaacagcagtattagtgtgtatgtctctctgaattatacggtgtacatgcatgatctgttcatacttcatatgaatttagatttatactttcagtactggtcaattagcctgatggaatatcaaataactatctactgattctatgcaattgcatgtttcaagtttctaatgctgccttgtaatactggaacattggtattataagaaagtaaattcaaacttcaatattgttatgtggttttctattgaacctggtgaaaatgtgataattatgtccatatccttgcaagcagttcagtcatttaagtttaatctaggctacttagcagtgtgattttcctgtagcctcttgatttgcatagccgcacagcccgtgcttgaaagtaacatttttatcctcattgctgacattaggatatgtattgtattattggtgtgaaattcaaagaatcagatagatgcaagatatctgtttgtgggataggatcagaacccaatcctgtgtgtgcagatatagataaaaatcatcttttaatgaaatgtctatttttttctcggtttgagtactttatattgttctcctgggatgtgttttttttctttatgggtgatttctcttggaaatcctaggatagtgtttcgatgtattctgaaactttgttgtgccagaaacatgcattgttttatcattaaccagaattgagttagggattatcattaaggcattaaccaaaatggagttaggatgtctttttttgtagtgtagaaaacgttgtgtatactgaaatgtgcatgcttgcaacatgtctaatatagattatatttgagtggtatctttgttgaagaacatgtgaaattagagttctggtggtcttctagaacacacactgctcctcatctttactttctctacataattcttcaatatgttggtatgttcccgtgactccttggtttagctatccttatacatgcatgttgttacataaatcaattagtttttccctgaaggacaggcctggtgcagtggtgagaggcctttccactgagccaaagggcctgggtttgacgcagcctctgcgcaaaaatgtagggttaaggcttgccttggttattacttccccagacccgactcatgcgggagccgtcagcattgggagatatacgtggagcgtcagaattatatgtgcatctacaagaacagttacaacaattctccatcaggttgatgttcatacatctcagatataaatgtgggggagacggtgcctcatcaatgatgagtaggttgattctcatctagcggcaccattgctcactacaactggtttgcttgagcaacttaatgtcactctcaagaggaccctcctttcgaccgacaccctgaagcaccacacaagctttagaaaagtcggaattgtacttcgtatacataaattacatgatattatatgttcatgtaattctatgttgattctttagaaataatatatatgatattgtaatgtgtgttcgacatcaatttattttatttgagttcgccgtgcgtacgtttggggttgtttctccctcgcttcttcctggcggcgaaagatagagaagggcgagtggccgcgcggaacatcgacaaccgagaaacccc

SEQ ID NO: 220156 - DNA, 3058 bp, Zea Mays
cacaggaccttgttctgcctccccgcgcatcggctgctgccgcgcacaaatccgccgcgccctcggtcccgcaaatccgccgtgccagctccgcccgctcgattcccctcctagcgcccgcattccccgccgccgtcctcgcggccgcagcgcccctggaccccacgccagcaacgcccgcagtccccgccgtggatctcgcccgaaggcgccgccatggacgccctagatctaccacctcctcctctccccatcactgcgccgcctgcccccgccgcacacctacagcgcgccccttcccccaccgtggatctcgcccatacgccagcggatctcgcactccttccttcgacggcgcggtggcgaggaggtcagcgacggcggcgtcgagtcgaggtcgggcacgaaggcgcggaggccgtgggagcggtcgtggcctacgcacgcacgacgccgctcccccagttcaaaccgaggtcagcgacgacgcacgcacgcaccaccccttcccccttcgtcttccattcccagctggaggtgcacgctgccgggcagagcgtcttgctggaggtgcgatagccatgtctggacctccgtcgccgccatagaagtgccttgtcattgatgaagccgatcgcatacttgagcaaaactttgaggcagactgttcttttttctgctacacagactctagatgttgaaaaaattgctaaactgtcatttgagaaaaatgaagtaaaaaaagcctgattatgttggagttgatgatgataagtcaaaggctactgttgaaggcctgcagcagggttattgtgtcatttctagcgataaaaggttcttggttctgtatgctttcctaagaaagagaagataatggtgttcttctcatcatgtaattcagtaaagttccacgttgaacttctgaatttctttaggatagagtgttttgatatccatggaaaacagaagcaactgaagcgaactactacattctttagcttttgcaaggcaggaaagggcatcttattgtgtactaatgtggctgcccgtggacttgatactcctgacgtgaaggaaggcagtgttcatgtctcatccagttcaaatgaagtgacaggaaccattccagagacgaatggaggcgatcatcatatacctggaagctcttttcatgtttagtgaaggtctatgacatgtctgatagtcaaatgaagctaaatgattttatttcaagccttgttcttgagaggatggtcaagattaatttgagtagggtgacttcataatggacgacgaggaagaagtggaaggagaggaagaggaacaaaagagtgatgaccagaagcgaagaaacaaaactaaaaagaaaaggaagagtgctatagaggagcaacggtaccaggacgcgtcaaggttgacaaagctatctgggaccacttttgtaattgccaactcttcactgattattttcctatatgttgctccagaataaatggtaagtgttgatcggtaattcttgtgaacgtaggtaatactgaatctctgactgtttgtgacctatatcccctgaaaacctgaatctcagattgctttagcttagcgcctacatggcagtcctcttgtcgtgaacattttgatctgtgttccgtatatgcttgtaggatcatagtgcggtggtcatgggattgggatctgctccgtatttgcagggtgaagccttcgtgtctcctcgagggaaagtcactgacctttcttgggacgtggaccactgacggcccccgtcatcccccatgacggtgatcctagggtgaagccttcgtgtttcctcgagggaaatctaccagtgcgggattgatttagtcagcaccattggacacagggtttagttccattgcctggacccatcaatgaatcatggtgccaaggtcttgatggttcgacttcaaggtactgatattctccaggactattgttagcatcccttgtggtccatctgcattagcagtgaagaaagtcgcatggggacttgcttgatatgttgttattgctcagacatggctgagaaggaggaaacaaagggccgctgccctgcctgccacacacgttatgacaaggatatgatcgtcaagatggccgccacttgtgacaggacagtggcagataaaaatgcggagaagaagcaaaaggcccaaagggttaagccaaaggcagcaccaacagcaacaacaacatcaaccgtagaatctaagaagcatcttgctactatcagggttatccagagaaatctggtgtacataattgggctacctgcgcatttatgcaatgagagcgtacttgagcgtagggagtactttggtcattatgggaaagttttgaaggttttagtttcccgtccgactgggcctccctctcagcaggcatcagcaaacagcagtattagtgtggttaaggcttgccttggttattacttccccagacccgactcatgcgggagccgtcagcattgggtctgttcttttactgatttgttgcgggtctagacaaatatgagctcataatgtattatctttcaggagatatacgtggagcgtcagaattatatgtgcatctacaagaacagttacaacaattctccatcaggttgatgttcatacatctcagatataaatgtgggggagacggtgcctcatcaatgatgagtaggttgattctcatctagcggcaccattgctcactacaactggtttgcttgagcaacttaatgtcactctcaagaggaccctcctttcgaccgacaccctgaagcaccacacaagctttagaaaagtcggaattgtacttcgtatacataaattacatgatattatatgttcatgtaattctatgttgattctttagaaataatatatatgatattgtaatgtgtgttcgacatcaatttattttatttgagttcgccgtgcgtacgtttggggttgtttctccctcgcttcttcctggcggcgaaagatagagaagggcgagtggccgcgcggaacatcgacaaccgagaaacccc

SEQ ID NO: 220157 - DNA, 2725 bp, Zea Mays
cacaggaccttgttctgcctccccgcgcatcggctgctgccgcgcacaaatccgccgcgccctcggtcccgcaaatccgccgtgccagctccgcccgctcgattcccctcctagcgcccgcattccccgccgccgtcctcgcggccgcagcgcccctggaccccacgccagcaacgcccgcagtccccgccgtggatctcgcccgaaggcgccgccatggacgccctagatctaccacctcctcctctccccatcactgcgccgcctgcccccgccgcacacctacagcgcgccccttcccccaccgtggatctcgcccatacgccagcggatctcgcactccttccttcgacggcgcggtggcgaggaggtcagcgacggcggcgtcgagtcgaggtcgggcacgaaggcgcggaggccgtgggagcggtcgtggcctacgcacgcacgacgccgctcccccagttcaaaccgaggtcagcgacgacgcacgcacgcaccaccccttcccccttcgtcttccattcccagctggaggtgcacgctgccgggcagagcgtcttgctggaggtgcgatagccatgtctggacctccgtcgccgccatagaaggttgaaaaaattgctaaactgtcatttgagaaaaatgaagtaaaaaaagcctgattatgttggagttgatgatgataagtcaaaggctactgttgaaggcctgcagcagggttattgtgtcatttctagcgataaaaggttcttggttctgtatgctttcctaagaaagagaagataatggtgttcttctcatcatgtaattcagtaaagttccacgttgaacttctgaatttctttaggatagagtgttttgatatccatggaaaacagaagcaactgaagcgaactactacattctttagcttttgcaaggcaggaaagggcatcttattgtgtactaatgtggctgcccgtggacttgatactcctgacgtgaaggaaggcagtgttcatgtctcatccagttcaaatgaagtgacaggaaccattccagagacgaatggaggcgatcatcatatacctggaagctcttttcatgtttagtgaaggtctatgacatgtctgatagtcaaatgaagctaaatgattttatttcaagccttgttcttgagaggatggtcaagattaatttgagtagggtgacttcataatggacgacgaggaagaagtggaaggagaggaagaggaacaaaagagtgatgaccagaagcgaagaaacaaaactaaaaagaaaaggaagaggtacctccctttgttcgtactaggaataaatgccaatgtactgtgtacacctatcctgaaatgaggatgactatatgttgctttaggataataacatcactgccatcactctcccaaagtcgctatgtttttctgtcatagtttgttgtcctgaccaaattttttaatttgttgtctatttctcttaggttgttctttcaataagctgtatctttctctcgtatgcaatgtaaatttcaggtatttgtgaaatatgagtgttgttttggtctcaaaataaatccacaaaagattttagcatctgtaagcactgttgcacattatccaattatatcagggtggtctagaactgttttgtgttgtttatttttagttgaggtgtgtatctttccccaccattgtatgttacaattttctaactacatctgttatgtttgggtgctcttgcattctcgcaaagtgctatagaggagcaacggtaccaggacgcgtcaaggttgacaaagctatctgggaccacttttgtaattgccaactcttcactgattattttcctatatgttgctccagaataaatgggtgaagccttcgtgtctcctcgagggaaagtcactgacctttcttgggacgtggaccactgacggcccccgtcatcccccatgacggtgatcctagggtgaagccttcgtgtttcctcgagggaaatctaccagtgcgggattgatttagtcagcaccattggacacagggtttagttccattgcctggacccatcaatgaatcatggtgccaaggtcttgatggttcgacttcaaggtactgatattctccaggactattgttagcatcccttgtggtccatctgcattagcagtgaagaaagtcgcatggggacttgcttgatatgttgttattgctcagacatggctgagaaggaggaaacaaagggccgctgccctgcctgccacacacgttatgacaaggatatgatcgtcaagatggccgccacttgtgacaggacagtggcagataaaaatgcggagaagaagcaaaaggcccaaagggttaagccaaaggcagcaccaacagcaacaacaacatcaaccgtagaatctaagaagcatcttgctactatcagggttatccagagaaatctggtgtacataattgggctacctgcgcatttatgcaatgagagcgtacttgagcgtagggagtactttggtcattatgggaaagttttgaaggttttagtttcccgtccgactgggcctccctctcagcaggcatcagcaaacagcagtattagtgtggttaaggcttgccttggttattacttccccagacccgactcatgcgggagccgtcagcattgggtctgttcttttactgatttgttgcgggtctagacaaatatgagctcataatgtatt

SEQ ID NO: 220158 - DNA, 2216 bp, Zea Mays
atggcggcagccgttgccgttcttcgcgccgccctccgccggggccgtccggcagctgcgtcgctactgcaccgccttcccaacccctctgctcggagcctcccgccaccgcctcctctcggtcgagcgcttcgtcccctctcgcggcttggtttctccgccggattcgggcactcctcctccaccgaggattttggcttcggctactcccccgccaccgaggattcagcggccgccgcgaagcccaagaccaagaccaaggccaggaagcaccccatgaagcagtcgcgcttcgacttcaccaaggtggacgccgcgcttctccccaccgtcatcctcgtcggccgccccaacgtcggcaagtcagccctcttcaacagatttatacggaggagggaggcgttggtgtacaatactcctggggaccatgtcactcgtgacatccgtgaaggagttgccaagcttggggatctccgtttccgtgtgcttgactcagctggacttgagactgcagcaacatctgggagcattctcgctcggacagcagacatgacagggaatgtattggctaggtctcaatttgccattttcttgattgatgtgagggatggtcttcagccgctggatcttgaggttgggcaatggctgcgcaagcatgcatctggtatacatacgcttgttgcaatgaacaagtccgagtcacttgatgagcatggatttctgactgctgctgctggagaagcacacaagttggggtttggtgaccctgttgcaatatccgcagagacaggcctggggatggcagaactctatgagatactcaggccattgtttgaagaatacatgtttcagcttcgaaatagtggatactgctggttggatggaaagatcagggaaggagaaagggccagcatctttgagtgttgtgcagtctaggaagaacttaatgagagctcacattgttgctcttgtgctggatgctgaaaagattgctaagtccaaaagtagcatgaatcatccagaaatcgtgatagcacggcaagcaatagaagagggccgtggactagttgtgattgtcaataaaatggatctccttagagataaccaaacactgtttaacaaggttatggacgctgttcctagagaaatccagacagtcattcctcaggtgacaggaataccagctgttttcgtgtcagcgctggaggggagggggcggattgctgtgatgcgccaggttatagatacctatgagaagtggtgtttaagattgtcaacatcacggctcaaccgttggttgcgtaaggttatgagcagacattcctggaaagattcagctactcagccaaaagtcaagtacttcactcaagtgaaggcacgaccaccaacatttgttgccttcatgagtgggaagactcagctttctgatacagatactaggttcttgacaaagtccctcaaggaagatttcgacatcgggggaataccgatacggatcatacaacgttctgttccaagaaaagcttatgctaagcgcaacaacacaaggaacactggccctagggttgtcaggatgaaaacagacaaacggacagcggtatctgacccagccctgtcatagagggtgagcaccagtatcagccgcctaacctgaagaagggaggtcatgtttcgcgtttgagctatatatatatgcttctcatggggaaacgggaagtgaatgtttttctgactcgggaagttatacaaagctatgagctagccggtccggctgcctgcaccgcatgctcaagaagaagaatgactgtaagaaacaagcccagcaattcgaaggacagcatcacttctcaacattgggtgcaaggtggtattgatgagcgtcaagcactcaagttcaccccagaactccagatcagatgaagaggtgttttttttttcttgcatccctcatgtttatacattttttttacgaaaaatatattagaatgatctctggtggtagtgttggagttggaggcttactgatcatcgtgcacccgtcaggtcagagagcaactgcaagcctacacgacacaggagcccctttatttttctttcctcttaaggcaaggcaactcctgtttgtaggggaatcgttatggttctgcttctgattgctcctagttcttccatcattttcgtgttcaaagagaaggctcccagaaaataaaataacg

SEQ ID NO: 220159 - DNA, 2433 bp, Zea Mays
atggcggcagccgttgccgttcttcgcgccgccctccgccggggccgtccggcagctgcgtcgctactgcaccgccttcccaacccctctgctcggagcctcccgccaccgcctcctctcggtcgagcgcttcgtcccctctcgcggcttggtttctccgccggattcgggcactcctcctccaccgaggattttggcttcggctactcccccgccaccgaggattcagcggccgccgcgaagcccaagaccaagaccaaggccaggaagcaccccatgaagcagtcgcgcttcgacttcaccaaggtggacgccgcgcttctccccaccgtcatcctcgtcggccgccccaacgtcggcaagtcagccctcttcaacagatttatacggaggagggaggcgttggtgtacaatactcctggggaccatgtcactcgtgacatccgtgaaggagttgccaagcttggggatctccgtttccgtgtgcttgactcagctggacttgagactgcagcaacatctgggagcattctcgctcggacagcagacatgacagggaatgtattggctaggtctcaatttgccattttcttgattgatgtgagccgctggatcttgaggttgggcaatggctgcgcaagcatgcatctggtatacatacgcttgttgcaatgaacaagtccgagtcacttgatgagcatggatttctgactgctgctgctggagaagcacacaagttggggtttggtgaccctgttgcaatatccgcagagacaggcctggggatggcagaactctatgagatactcaggccattgtttgaagaatacatgtttcagcttcgaaataatgacctcaaccaagatgatcctatctcggaggttgaaactgaggcccatgatggtgatgagagcaagttacctttgcagttggcaattgtgggacgtcctaatgttgggaagtccacccttttaaataccttgttgcaagaacagagagttcttgttggtccagaggcaggcctaacaagggactcgattcgggctcagtttcaatttgatagtcgaaccgtgtatttagtggatactgctggttggatggaaagatcagggaaggagaaagggccagcatctttgagtgttgtgcagtctaggaagaacttaatgagagctcacattgttgctcttgtgctggatgctgaaaagattgctaagtccaaaagtagcatgaatcatccagaaatcgtgatagcacggcaagcaatagaagagggccgtggactagttgtgattgtcaataaaatggatctccttagagataaccaaacactgtttaacaaggttatggacgctgttcctagagaaatccagacagtcattcctcaggtgacaggaataccagctgttttcgtgtcagcgctggaggggagggggcggattgctgtgatgcgccaggttatagatacctatgagaagtggtgtttaagattgtcaacatcacggctcaaccgttggttgcgtaaggttatgagcagacattcctggaaagattcagctactcagccaaaagtcaagtacttcactcaagtgaaggcacgaccaccaacatttgttgccttcatgagtgggaagactcagctttctgatacagatactaggttcttgacaaagtccctcaaggaagatttcgacatcgggggaataccgatacggatcatacaacgttctgttccaagaaaagcttatgctaagcgcaacaacacaaggaacactggccctagggttgtcaggatgaaaacagacaaacggacagcggtatctgacccagccctgtcatagagggtgagcaccagtatcagccgcctaacctgaagaagggaggtcatgtttcgcgtttgagctatatatatatgcttctcatggggaaacgggaagtgaatgtttttctgactcgggaagttatacaaagctatgagctagccggtccggctgcctgcaccgcatgctcaagaagaagaatgactgtaagaaacaagcccagcaattcgaaggacagcatcacttctcaacattgggtgcaaggtggtattgatgagcgtcaagcactcaagttcaccccagaactccagatcagatgaagaggtgttttttttttcttgcatccctcatgtttatacattttttttacgaaaaatatattagaatgatctctggtggtagtgttggagttggaggcttactgatcatcgtgcacccgtcaggtcagagagcaactgcaagcctacacgacacaggagcccctttatttttctttcctcttaaggcaaggcaactcctgtttgtaggggaatcgttatggttctgcttctgattgctcctagttcttccatcattttcgtgttcaaagagaaggctcccagaaaataaaataacg

SEQ ID NO: 220160 - DNA, 2366 bp, Zea Mays
atggcggcagccgttgccgttcttcgcgccgccctccgccggggccgtccggcagctgcgtcgctactgcaccgccttcccaacccctctgctcggagcctcccgccaccgcctcctctcggtcgagcgcttcgtcccctctcgcggcttggtttctccgccggattcgggcactcctcctccaccgaggattttggcttcggctactcccccgccaccgaggattcagcggccgccgcgaagcccaagaccaagaccaaggccaggaagcaccccatgaagcagtcgcgcttcgacttcaccaaggtggacgccgcgcttctccccaccgtcatcctcgtcggccgccccaacgtcggcaagtcagccctcttcaacagatttatacggaggagggaggcgttggtgtacaatactcctggggaccatgtcactcgtgacatccgtgaaggagttgccaagcttggggatctccgtttccgtgtgcttgactcagctggacttgagactgcagcaacatctgggagcattctcgctcggacagcagacatgacagggaatgtattggctaggtctcaatttgccattttcttgattgatgtgagggatggtcttcagccgctggatcttgaggttgggcaatggctgcgcaagcatgcatctggtatacatacgcttgttgcaatgaacaagtccgagtcacttgatgagcatggatttctgactgctgctgctggagaagcacacaagttggggtttggtgaccctgttgcaatatccgcagagacaggcctggggatggcagaactctatgagatactcaggccattgtttgaagaatacatgtttcagcttcgaaatattggcaattgtgggacgtcctaatgttgggaagtccacccttttaaataccttgttgcaagaacagagagttcttgttggtccagaggcaggcctaacaagggactcgattcgggctcagtttcaatttgatagtcgaaccgtgtatttagtggatactgctggttggatggaaagatcagggaaggagaaagggccagcatctttgagtgttgtgcagtctaggaagaacttaatgagagctcacattgttgctcttgtgctggatgctgaaaagattgctaagtccaaaagtagcatgaatcatccagaaatcgtgatagcacggcaagcaatagaagagggccgtggactagttgtgattgtcaataaaatggatctccttagagataaccaaacactgtttaacaaggttatggacgctgttcctagagaaatccagacagtcattcctcaggtgacaggaataccagctgttttcgtgtcagcgctggaggggagggggcggattgctgtgatgcgccaggttatagatacctatgagaagtggtgtttaagattgtcaacatcacggctcaaccgttggttgcgtaaggttatgagcagacattcctggaaagattcagctactcagccaaaagtcaagtacttcactcaagtgaaggcacgaccaccaacatttgttgccttcatgagtgggaagactcagctttctgatacagatactaggttcttgacaaagtccctcaaggaagatttcgacatcgggggaataccgatacggatcatacaacgttctgttccaagaaaagcttatgctaagcgcaacaacacaaggaacactggccctagggttgtcaggatgaaaacagacaaacggacagcggtatctgacccagccctgtcatagagggtgagcaccagtatcagccgcctaacctgaagaagggaggtcatgtttcgcgtttgagctatatatatatgcttctcatggggaaacgggaagtgaatgtttttctgactcgggaagttatacaaagctatgagctagccggtccggctgcctgcaccgcatgctcaagaagaagaatgactgtaagaaacaagcccagcaattcgaaggacagcatcacttctcaacattgggtgcaaggtggtattgatgagcgtcaagcactcaagttcaccccagaactccagatcagatgaagaggtgttttttttttcttgcatccctcatgtttatacattttttttacgaaaaatatattagaatgatctctggtggtagtgttggagttggaggcttactgatcatcgtgcacccgtcaggtcagagagcaactgcaagcctacacgacacaggagcccctttatttttctttcctcttaaggcaaggcaactcctgtttgtaggggaatcgttatggttctgcttctgattgctcctagttcttccatcattttcgtgttcaaagagaaggctcccagaaaataaaataacg

SEQ ID NO: 220161 - DNA, 823 bp, Zea Mays
gatttattcaaaggaagcatatgtactgctgggccaatggcacattgcagatgagtatgatggccaggtgagggaacttaattgtaaatcaatatgccatagtccaatgtgccctccttattcagcgatgacagagtggcagcatatagttctttcagctgacaaaatggatctggtatttgagacagtacagcaagtacatgatgttccatttggttccttctttgaggtgcattgtaggtggtctgtgaaaactatcagttctagcctgtgcagtcttaacataagcgctggtgcacatttcaagaaatggtgcataatgcagtctaagataaagagcggtgctgtggatgagttgaagaaagaagtcaaggaaatgttagactttgcacaggggtatattctcaaagttaggtctccggaccaagagaacagtaatctcgcccaacaagacaacatggcaccggatgcagtgtctggcgatcaatgattatttcaggttgtgcctcctgatttagggtggggtgacagctgccatgacaacgaattatgatgttatacacagaagggcaggtggacctgtaactagtccacatgaaccacatctaacatgttaagctgacttccaaaagatggttggaccgtgtattgtgtgtgtaaacttctttttcctgtcattccgctatccattctggcagtttggctgatgtatatagttgtaaaaacaagtatagtgttgactgcggacggttcagtggtgcgttgttcgaagataaacaaagaaagaaacaaaagagaaatatttgcaccagaaccatcagaa

SEQ ID NO: 220162 - DNA, 682 bp, Zea Mays
cagaatgttccattatgacagataatagttcttggtatttgagacagtacagcaagtacatgatgttccatttggttccttctttgaggtgcattgtaggtggtctgtgaaaactatcagttctagcctgtgcagtcttaacataagcgctggtgcacatttcaagaaatggtgcataatgcagtctaagataaagagcggtgctgtggatgagttgaagaaagaagtcaaggaaatgttagactttgcacaggggtatattctcaaagttaggtctccggaccaagagaacagtaatctcgcccaacaagacaacatggcaccggatgcagtgtctggcgatcaatgattatttcaggttgtgcctcctgatttagggtggggtgacagctgccatgacaacgaattatgatgttatacacagaagggcaggtggacctgtaactagtccacatgaaccacatctaacatgttaagctgacttccaaaagatggttggaccgtgtattgtgtgtgtaaacttctttttcctgtcattccgctatccattctggcagtttggctgatgtatatagttgtaaaaacaagtatagtgttgactgcggacggttcagtggtgcgttgttcgaagataaacaaagaaagaaacaaaagagaaatatttgcaccagaaccatcagaa

SEQ ID NO: 220163 - DNA, 1261 bp, Zea Mays
agagaagaatgggaatccaaaatcctataagaccctcctcccttcatgcacagctctgccgcttgcctccgccggcgagggaagggacgaggcgccgagccggcaaccgttttcggggttgctggcggcgattggctgcggttccgcatcaaggctggtcgaacgctgcccctcctgattggtaggtagctcgagatggatctgattcttccatataaggttggggacctcgcggagtccaaatccttggtgagcggttacagaggtgcatggtttcgctgtaagatacataatatgcgtgtcaggcttggatacctggagtgttacttggaatacattgattatccaggagaaaatagagctgccggcacctcccataggtgaaggaaaatgttataaagctaaatgtagtgatctgaggcctactctcgagtggtctctagcaagaggttggatggtccctctttcacagaatcagatgatgataatgacgacaacgatagctgggatgcccggcaaacggtgtgcagagcttcaaacacgcctgaggaagctccaggccccatggtccctgcacctccgtcagccacaaacaacgctcccagccacatgtatcagaaggatgctgctgtcacatccacagaggacctgctgaagcccagctcaacatccaagtcgccagaccccaggcacgacgcccaagctagcactcaacctgcaggtacgggggtctccatgaagccggaaccggttattggagtctcaacaatcaagaaagaggactcctccttgacagaaggtgaggttgatggcggcacggaagagtgcctggagaagctgggcgcgatcaaagccaggctcaaatacctcatgcagggcacgcggctggaacatgagcgcagcgccaccttccgtgggtagtcaggcagatgaagctgcatcaaaggtgcaacttcacgcaggggtttagggtttagggccatctaacgcctgttgtggttgctgaattttgtgtcctgtggttacaggtattattgtcctgaataatgacgttgtgaataagtggtttgtttttttgagtgcggcaatttgtaggagctaagaggaatgtgttgctgagttaagttatgaattagaccgtgtccagcagttcactcatatggtcatcctaaacaccgtgcagtagagtttgaatattagtatgaggatggataaactggtgcagatagccttatgttgtgaatgaatatgttgctgagta

SEQ ID NO: 220164 - DNA, 1662 bp, Zea Mays
accgtctcgtacatgcccttatccctctcgccccgcatcccatcacccgcaggccggaacagcagccgtcagccatgcccgcggcggccttcttctccgccgcgctgccccctccctcgcgtacgctgtcccgccgcctcgtcgtgtcccgcgcggctgcggccgcggcctcagcatcagcatcctcgtcctccgggtggcaaggtggcgggggagtggagttccagggcaaggtggggttcctggggctcgggatcatgggcgcgcccatggcatccaacctcatcaaggcaggctgcgacgtcacggtttggaacaggaccaagagcaagtgcgatcccctcctcagtctcggtgccaactatgtcgatgtgtcgacggttgatggtgctacatccaagctgattggtgaacgcattacaagtactggagcatctttccttgaggctccagtttcaggctcgaaaaaaccagcagaagatgggctgctcatctttcttactgcaggtgatgagtccttgtacaagagagtggcgcccctccttgatgtcatggggaagtcaaggttttatcttggcgatgtaggcaatggtgctgcaatgaagctcgtggttaacatggtcatggggagcatgatggtttccttctcagaagggttgctcctgagtgaaaaagtcggtttagacccgaatactctcgtcgaggttatttcccagggtgctatcagtgcccccatgttctctctcaagggcccatccatggttaaagctgcatatcctcctgcatttcctctgaagcatcaacagaaggacttgaggctcgcattggccctggcggaatcggtgtcccagtccattcctacagttgcagctgcgaacgagctgtacaaggctgcaaaatcgctcggccttagtgaccacgacttctcggcggttattgaagcgctgaaagccaaagtgcagagccagagctcacaatagtagttgcctgttcagcagagctcacagtagttgttgcctcttcagcagctaccattgaggcagcattttgtctcgatggatgaagttgacacttaggaaaatttctcaagatcgctacagaaaagtctcagaacaatacaatttctgtattcgtaaatattttctcaaacatcacaacgacgacatttccttaaggaagaaaaaaaactttcattaaaggctagttggggaacttaaatcttcttctggattcccggagattgaataaaagattagttcatttttccactcaatactcaggaattctagaggagatttaggggtatgggtgtttggtttgaaaaattaattcattctaaatgagatgttatatcatgatccattgcacaaatttagtagaatgaattcatgtcttatattattactaactattagcctataagaaatgaaatggtaatgaaacaactcattctattctacaaactaaacaataaagtgagaagtgagaagataatgaactatatcatttctcaaacaaaaggttgtttgggaactcaaaacgcctctgaattactggtgtttgagtaggaaaatgagctaattttctactcaatcttcgggagtcttataggaaatttaagtttctaaactagtcctaagtttcaaggtaaccctaaaaaag

SEQ ID NO: 220165 - DNA, 2215 bp, Zea Mays
accgtctcgtacatgcccttatccctctcgccccgcatcccatcacccgcaggccggaacagcagccgtcagccatgcccgcggcggccttcttctccgccgcgctgccccctccctcgcgtacgctgtcccgccgcctcgtcgtgtcccgcgcggctgcggccgcggcctcagcatcagcatcctcgtcctccgggtggcaaggtggcgggggagtggagttccagggcaaggtggggttcctggggctcgggatcatgggcgcgcccatggcatccaacctcatcaaggcaggctgcgacgtcacggtttggaacaggaccaagagcaagtgcgatcccctcctcagtctcggtgccaagtatgccacccttttcgttttcaacttcgtctttacatacccaatttgcgacccattttactcaatgcatagtagtagcactccgtaagaataagtgcgtgcaaattcctgaaatgtggcagacctcgttgctggtaattgagtctggagccataggcccaacccaatttcgttgttcagcatgaatggttcttcctcagtgtggtgttcactcttagtttacttgaaagattcttatgttctgctgaaattccactaaaaacactccagatcaaggaaccaagccctttacagccaggatgaatttacttccagtgctgcgtagacaacgttatttccttattcatgttgacccacagcaaaaccagtgttctattgaaaataaaaaaagatgtacaccatgcattcctgcttcctccaggtacgagcctacaccggcccaagtcgcttcatcttgtgacgtgacattcgcgatgctcgctgatccacaaagcgcggctgaggttgcatgtgggtccagtggagctgctgaagggttggcccctgggaaaggctatgtcgatgtgtcgacggttgatggtgctacatccaagctgattggtgaacgcattacaagtactggagcatctttccttgaggctccagtttcaggctcgaaaaaaccagcagaagatgggctgctcatctttcttactgcaggtgatgagtccttgtacaagagagtggcgcccctccttgatgtcatggggaagtcaaggttttatcttggcgatgtaggcaatggtgctgcaatgaagctcgtggttaacatggtcatggggagcatgatggtttccttctcagaagggttgctcctgagtgaaaaagtcggtttagacccgaatactctcgtcgaggttatttcccagggtgctatcagtgcccccatgttctctctcaagggcccatccatggttaaagctgcatatcctcctgcatttcctctgaagcatcaacagaaggacttgaggctcgcattggccctggcggaatcggtgtcccagtccattcctacagttgcagctgcgaacgagctgtacaaggctgcaaaatcgctcggccttagtgaccacgacttctcggcggttattgaagcgctgaaagccaaagtgcagagccagagctcacaatagtagttgcctgttcagcagagctcacagtagttgttgcctcttcagcagctaccattgaggcagcattttgtctcgatggatgaagttgacacttaggaaaatttctcaagatcgctacagaaaagtctcagaacaatacaatttctgtattcgtaaatattttctcaaacatcacaacgacgacatttccttaaggaagaaaaaaaactttcattaaaggctagttggggaacttaaatcttcttctggattcccggagattgaataaaagattagttcatttttccactcaatactcaggaattctagaggagatttaggggtatgggtgtttggtttgaaaaattaattcattctaaatgagatgttatatcatgatccattgcacaaatttagtagaatgaattcatgtcttatattattactaactattagcctataagaaatgaaatggtaatgaaacaactcattctattctacaaactaaacaataaagtgagaagtgagaagataatgaactatatcatttctcaaacaaaaggttgtttgggaactcaaaacgcctctgaattactggtgtttgagtaggaaaatgagctaattttctactcaatcttcgggagtcttataggaaatttaagtttctaaactagtcctaagtttcaaggtaaccctaaaaaag

SEQ ID NO: 220166 - DNA, 1855 bp, Zea Mays
ccaccatccaccaacacaggccgccccgtcgtcagattattcattcattcattcctccttgctctcgtccttaactcgaaagctcacagctcaggcgtcgtccctgcttctcagacagaggatgagaaccttgtccgcgtgatgacacagccggcatacgtactgtggatggcatgattagcgccatcagtggcatcatggaggacgtcgtcaggatcgggagcttcgacttggacgccgtcagcggcgcgtacccgacgacgctgcccagcccgaggatggtcgccgcaggacgagagctccagctcatccactcgccacgccagccgtcgtcggggttcagggagagcctcaacccgatctacaccgaccacgacaccacgacgacgaccacgacgacggcaaccacggattcgtcaccgttggccgccgcggcaaaccacgctgcgacggcggcagcggcagcggcacgggccgacggcggcggcagctcggtgcccgcgcgtcgccacactgccagcgccgccgggaacgggcgctgggaggccatccgcgtggccgagccaccgctcagcctgggccacttccgcctcctcaggcgccttggctacggcgacatcggcagcgtctacctcgtcgagctccgcggcggccgcggcgcgctcttcgccatgaaggtcatggacaagggctctctggccgggcggaacaagctgccccgcgcgcacacggagcgggagatcctgggcctgctcgaccaccccttcctgcccacgctctactcccacttcgagaccgacaagttctgctgcttgctcatggagtactgctgcggcggcaacctccacgcgctccgccagaagcagcccaacaagcgattcaccgaggacgcagccaggttctacgcctctgaagtcctgcttgcgctggagtacctgcacatgctgggcgtggtgtaccgggacctcaagcccgagaacgtgctcgtcagggaggaaggccacatcatgctctccgacttcgacctctccctgcgctgctccgtcagcccggcgcttgtccgctccccgtccggccgggtcagcggaggcggcggcctcgcccacggctgcatgctcccgcgcatcctccaggtgaagaagaagaagaagggagacaaggctaataaggccaataagctggacaacgagacggtgactagcaagaagccgtcgtcgctggagttcacagccgagccgacaagcgcgcggtccatgtcgttcgtgggcacgcacgagtacctggcgccggagatcatccgcggcgagggccacggcagcgccgtcgactggtggacttttggtatcttcctctacgagctcctgcacggcgccacgccgttcaagggctccgggaaccgcgccacgctcttcaacgtcgtcgcgcagccgctcaggttccccgacgcgccggtggtcagcgccgccgcaagggaccttgtccggggactgctggcaaaagagccgcacaaccggctcgcgtcccggcgcggcgccgcggaggtgaagcagcacccctttttcgaaggcgtcaactgggcgctcgtcaggagcgcccagccgccctacatccccgacgccgccgttgatcactgttcccacttcgcctgcgacggagcggcgcaaggtgccacgcccaagagctccgcacggaaaaccggctcgcgtcgcactgattcctcgcatgtcgatattgagtatttttaggatcataggatgtgatcacacgttttaatttgagatctccatttgtatcttatccttggatgtcctcctggatcatgatgtgtttgtttccttggtgaagtatatatata

SEQ ID NO: 220167 - DNA, 2514 bp, Zea Mays
cttatccggaagcggtggatagggacacatgcgcccgcccgggtcgcatcccgacccgcgccaccggtccgaccagaccgccgaccggctcagccggttcaccacttctcacttcacctgcctgccgcttcctgctttcccgttcctgaaagagagagaagcatatcctcactctagtctctctcgccccatccccttccccgtccctcctccagctccctctcctccggctgctgcccctccaccgtccgcccctcctccccgctgccggccacttccggacttccccgccgcgttacctcctcctcctggcgcttcccgcttggcggttgcctgggatttacccccgctctgttcccctttcggggaacgccttcagaggcaggacgggtacttggtccgggaggcgcggcgacggcgacagcggcgagtgattttcggtcgccagagggagagttttttttaacggggttttggtgggaaggaaggaggcggccgcgagtaggcgagacgttcatgggttagatctggcggtccggcggcgcggatctgagcgaggtttcggtggagagatcgggtggtggtcactatcttcgcctcatttcgagtagatggagcgtctcatggccaaatcgggcatgctcctgagggagttagatttgcaggaaaatgatgtggaggaccgtgggcccagatggctttccttccctgattcctgcacttcgctggtctccttgaatttcgcttgcatcaaaggggaggtgaattctggtgcgttggagagacttgttgctaggtctccaaatctacgcagtttgaggttgaatcgttctgtttcagtagacacactctcaaagatactattgcgagccccaaatttggaagacttggggacaggtaatctgacagatgagttccaagctgagtcctattccaggcttactagtgctctggagaaatgcaaaaagctgagaagtctgtctggattttgggatgcttctcctatttgtgttccgtatatctatcccctctgtcatcaactaacaggcctaaacttgagttatactcccacactggattattctgatctagctaaaatggtcagccgctgtgtgaaactccagcgtctctgggtgagttcccttctctttgtgttggcttgatatttctgtacgttgagagaaccacataatgaatttgatcctccacaggtactggattgcatttcagataagggtttgcaagtggtggcctccagttgcaaggacctacaagaactcagggtgtttccatcagaattttatgttcctggtgcttctgcagtgacagaggagggacttgttgcaatatcgtcaggctgcccaaaactgacctctttgctgtatttctgtcaccagatgaccaatgaagcgctaattactgtagctaataactgcccaaatttcatcagatttagactctgtatccttgagccaaagaagccagatgccatgacaggccagccgttagatgaaggttttggtgcgattgtccgtgaatgcaaagggctaagacgtctgtcaatatcaggtcttctcacagacaaggttttcatgtatattggaaaacatgcaaaatacctcgaaatgctttctatagcatttgctggagatagtgataaggggatgatggacgtgatgaacgggtgcaagaatctgaggaagcttgagatcagagacagtccatttggcgatgttgcactcttgggaaatgttgccaagtatgagacaatgcgatccctttggatgtcttcatgcaatgtcacattaaaggggtgccaggtccttgcatcgaagatgccgatgctcaatgtggagatcatgaatgaactagatggaagtagtgaaatggagaaccatggagacctctctaaagtggacaagttatatgtttaccgcacaactgctggagcgagggatgatgcaccaaattttgttaagatcctacagagctagccgcgactacccttatatcttcccaccttgagagggtcaggaaaagccacactggcctgcgcccttatcgtggagcaacacgaccgggaatccatcatcatcctctgtaccaccgcccccctccctttcagtgtctggtcatatggccacccaggcccccctttattacctgtgaattctcccactcgagaggaggggaccgaacggataactttttctagccatgtaacatctctagtgtacttgtctccatttgcttttgacattggcacggtggattgtgttgctggcgtcgctgttgtagtgttttgtttcgcaaacctgagaattatcgggacattccggggacgacgctctgtttcttgctcctgtgaatgcatggactgcatgtaatatttgatggccttgcaggatttatcgtacacacttttcgcccttgcatatttctcgtctcagcccacgtaagcttggttgatattgcatggctaagtgattgttggtcacctggtaaatattgtta

SEQ ID NO: 220168 - DNA, 3074 bp, Zea Mays
cctcactctagtctctctcgccccatccccttccccgtccctcctccagctccctctcctccggctgctgcccctccaccgtccgcccctcctccccgctgccggccacttccggacttccccgccgcgttacctcctcctcctggcgcttcccgcttggcggttgcctgggatttacccccgctctgttcccctttcggggaacgccttcagaggcaggacgggtacttggtccgggaggcgcggcgacggcgacagcggcgagtgattttcggtcgccagagggagagttttttttaacggggttttggtgggaaggaaggaggcggccgcgagtaggcgagacgttcatgggttagatctggcggtccggcggcgcggatctgagcgaggtttcggtggagagatcgggtggtggtcactatcttcgcctcatttcgagtagatggagcgtctcatggccaaatcgggcatgtatggcggattctgctactgtctgaagcagcgttgcctgcagatctgaaagtcacttggtctccttgcccagttgaccttactgaatgacattgctttccgcggtttgactgtcattacatccttttcggtgtctgatcaaaaatttttagcacgagatgacgtgcttctagttgttgttgatatcttgtcctgagttgagtaaacctgaagctggaaaggagcggatcacattcgtgctcttgctcttgttgacttctaggtctatcttagatacctagaggctggaaggggtcagatccagttcctgtggtcctagtaacaaggtcctcttgggggaaggcgccatgacctacttccccgaggaggtggtagagcacatcttcagcttcttgccatcgcacagcgaccggaacacggtctcccttgtgtgcaaggtgtggtatgaggtcgagaggctgagccgacgagcggtgttcgtagggaactgctacgctgtgcgccctgagcgtgtggtgctgcggttccccaatataaaggccctcacggtgaaggggaagcctcactttgcagacttcaaccttgtgccgcctgattggggtggctacgcagggccatggattgatgcagcagcaaggagctgtgttggtctcgaggagttgcgcatgaagcggatggttgtgtttgatgagaaccttgagctgctagctcggtcattcctgagattcaaagtccttgtccttatcagctgcgaggggtttagcaccgatggtctagctgctattgcgagtcactgcaagctcctgagggagttagatttgcaggaaaatgatgtggaggaccgtgggcccagatggctttccttccctgattcctgcacttcgctggtctccttgaatttcgcttgcatcaaaggggaggtgaattctgtagacacactctcaaagatactattgcgagccccaaatttggaagacttggggacaggtaatctgacagatgagttccaagctgagtcctattccaggcttactagtgctctggagaaatgcaaaaagctgagaagtctgtctggattttgggatgcttctcctatttgtgttccgtatatctatcccctctgtcatcaactaacaggcctaaacttgagttatactcccacactggattattctgatctagctaaaatggtcagccgctgtgtgaaactccagcgtctctgggtactggattgcatttcagataagggtttgcaagtggtggcctccagttgcaaggacctacaagaactcagggtgtttccatcagaattttatgttcctggtgcttctgcagtgacagaggagggacttgttgcaatatcgtcaggctgcccaaaactgacctctttgctgtatttctgtcaccagatgaccaatgaagcgctaattactgtagctaataactgcccaaatttcatcagatttagactctgtatccttgagccaaagaagccagatgccatgacaggccagccgttagatgaaggttttggtgcgattgtccgtgaatgcaaagggctaagacgtctgtcaatatcaggtcttctcacagacaaggttttcatgtatattggaaaacatgcaaaatacctcgaaatgctttctatagcatttgctggagatagtgataaggggatgatggacgtgatgaacgggtgcaagaatctgaggaagcttgagatcagagacagtccatttggcgatgttgcactcttgggaaatgttgccaagtatgagacaatgcgatccctttggatgtcttcatgcaatgtcacattaaaggggtgccaggtccttgcatcgaagatgccgatgctcaatgtggagatcatgaatgaactagatggaagtagtgaaatggagaaccatggagacctctctaaagtggacaagttatatgtttaccgcacaactgctggagcgagggatgatgcaccaaattttgttaagatcctacagagctagccgcgactacccttatatcttcccaccttgagagatggtcggtggaatccggcatgcctggggccagggcaacagtggtaagttcttgaatcgtctccccttttgcagggtcaggaaaagccacactggcctgcgcccttatcgtggagcaacacgaccgggaatccatcatcatcctctgtaccaccgcccccctccctttcagtgtctggtcatatggccacccaggcccccctttattacctgtgaattctcccactcgagaggaggggaccgaacggataactttttctagccatgtaacatctctagtgtacttgtctccatttgcttttgacattggcacggtggattgtgttgctggcgtcgctgttgtagtgttttgtttcgcaaacctgagaattatcgggacattccggggacgacgctctgtttcttgctcctgtgaatgcatggactgcatgtaatatttgatggccttgcaggatttatcgtacacacttttcgcccttgcatatttctcgtctcagcccacgtaagcttggttgatattgcatggctaagtgattgttggtcacctggtaaatattgtta

SEQ ID NO: 220169 - DNA, 337 bp, Zea Mays
acaaccagtcgcctacccactgcctcgcatcggcatcggcgtgccggtgctgccaagctaaaattccccaactcgcgtcgcgtcgtcagtgtgcgtgccagtcctccggcccaaaccccccgcacccaacccccagccccggcaaccgatggcggggtccgcggccgacgcggagcaggagcaaaagcgggcagcggcggcggcgtacgactacgagggcgacgcgcgctgggccgagtactggtccaacgtactcgtcccgccgaacctcgcctcccgccccgacgtcgtcgaccacttgaagcgcaagttctaccagcgctacatcgaccagggt

SEQ ID NO: 220170 - DNA, 1771 bp, Zea Mays
agccttttagtttccttctcccaccgcggccccggaaaatttcccccttccccgtagcgaaaccctagccgccgcgccaaaaccaaatcccgccacgcccgaaaatttccggtggtttccttgccgcgaatcgatcgattccgagcgattcggttgatttgatcgatttcgggtgcttcgcgattgattaggccggcaaagccgccaatccttgtgatctctcgaaggggtagagcgcggtcgaccgtcggtcatgtcgagaaagaaagggaaagggctcacaagaagaaagataaaaggagtgacaagaaagctccccaactgggtgagacgtccaaacattcaaagcacaaccataagaagagaaagctcgaagatgtcagcacaggtgatcaggagcccaaaaaagtattcaaagaatcagctgagctattggagaagagtggactctcagaagagcatggagctccttgttttgtacagatgtttcgtgactctcctgagagctcgcaggacagcagcaagagaagaaaggctgtcctgcccagtcccagccaagctaagaatggtaacatcattcgcatcaagctaaaaagtaaccaagatccccaatcagttcttttggagaaaccaagggttctggagcaaccactggtccaacaaatgagttcggtttcatccctgtcgagcaaacaaaattcaatcaatcgtaaggtgaatgtgagatctacagctggccagcagtgggtcaatggtgactcccaagcagtacaaaaatctttggttacagaaaccctgtcaagggcaatgcagagaactgtcccccagcctgcagtgaaggtcacacgtcgggctgatccccagctatctgttaaggcgccggttggaagatctgacctacctccaaagttttcgggaagtgtgggcccttcacctgctagagtgaccggaagattttgtcctgcacctgttaagacgcaacagagaattgagcatccaccttccatggtgtcacagagagttgatcctcaggcgaaggtgtcacagaaggaaatgggatctgctgtttgcctgccacaagctccacatcctcctgttttgcagaaacccaaggacttgcctgttcctaaacagcgggagcctatcaactctttgccaaaagaagagccttgtttctctggaaggactgtggaagcagatcaagggaaggaagctaagctctcccgttcagatcggaagaaaatccacaaaactgagaagaaaaataagaagttcagagatctgtttgttacctggaatccgctattgatggagaatgaaggttcagatttgggtggtcaagactggctgttcagcagtacaagaagctctgatggtagcatggctcaacccacagtacctgatggtttagggccgattcatccgatggtgcagcagcagccttatttgcaacccagggcaacttttttgccggaccttcatatctatcagctgccttatgttgtaccgttttaagtctgttcgtagatgagaagtagatgagatgttgtgaaggagctgtgtggatgtgggatataatggttccctgccgcaattttccagctttgttagcaagattgtaatgtaatgttggttaattattttgctcatttatgtaagcagttgaactgcaaaatcttctttctaggcagttactgtaatacgacacgcaatatttgtttttatccataataatagccttgccacaatataaatggattaattgcagcaa

SEQ ID NO: 220171 - DNA, 1711 bp, Zea Mays
ccggcgacggcgaatcgacgagctcgccatgtcggccttagcggcgggcggtggcgccgccgccgatggtgccccggaggcgacagcggcgccgacaaggagggagaagcggagggagcggaagaaggagcgccgccggagggcgcggaggcaggccgcggcgcgcgctcgtgcggcggtcgaggcggaggcacccgcggtcgaccccgaggaggagcgccgactccttgagatccaggaggccgaggcggctgctgagtccgagcgtgcgctccgcgccttcgaggacgccgagcgccggtggctcgaggccgccgctgcccgcgccgcagagaaggccgcggctgctgcggccgaagaggatgcaagggctgcggaggcttccgctcgaaacaagcctaaagatggccaaggaaaccagtcagaagaagatagtgaatgggaatatgttgaagatggtccagcagaaattatatggaaaggaaatgagatcattgtgaagaagaaaaaggttaaagtaccaaaggggtccaaggaaaagctgcaaattcaggaggataaggcccattgtccatttcatctcaagacaggggcttgtcgctttggattgcgctgcagcagagttcacttttaccctgataaatcaatcacattgctaatgaaaaacatgtataacggtccaggccttgctttggagcaagatgaagggcttgaggtttgttagaggaaattctctaatgcataactttattgcatgttctttcgtgttatcttcagaacttcgacttgaggcatacagtgatcagaccagttgatttcacttgattgaggacgtcttgaactttgatctgctaatgtatcctaaattatcatggtcttgctgatgttgctgagctttttgatgttttctattgctattagaaatgtgcccaatatttgaaatcggtacatgtattgggtatcatttatcaagtagatccttgacaattttgataatattcgggaaattttaaatgttgaaccgttgaggagtatttcttttattggacgtctttggtgaccattagggtgacagttcacagatgaagagattgaacaaagctatgaagaattttatgaagatgtacatacagaatttctgaaatttggtgaacttgtgaatttcaaggtatgtagaaatgggtctttccatcttcgagggaatgtttatgtgcactataaatcgttggattcagctcttcttgcctacagcagcatgaatggacgctattttgctggaaaacaggtaatcactctatttccttcctcaagtattatgtgaggataattgttatagcttaagggagaaagtacaaattactactctgaaatttgtctggctggataaaccccctagaatattatattttatttcccaagctatttcagttggttcaatctactcctttataaagtttgtgtactaagttgagttttaagttatgttaaaaaagttacgtccggtatcaccccacaaaattgcactccctcctttaaaaattataagacattttagctttttctatatatgtagttttcactatgcatttagctatacattatatttaaatacatagtaaaaacaatgtatctagagaagccaaaatgccttataatttggaagagggaataagttgtaagtcagcttgtacatggagaaacaaaaaaaatg

SEQ ID NO: 220172 - DNA, 1966 bp, Zea Mays
gagaagcccaggcccacttgtacgcgactcgccaacgccttttcccccgggccgctgcgatcgcgccctaccgggagaccggcgacggcgaatcgacgagctcgccatgtcggccttagcggcgggcggtggcgccgccgccgatggtgccccggaggcgacagcggcgccgacaaggagggagaagcggagggagcggaagaaggagcgccgccggagggcgcggaggcaggccgcggcgcgcgctcgtgcggcggtcgaggcggaggcacccgcggtcgaccccgaggaggagcgccgactccttgagatccaggaggccgaggcggctgctgagtccgagcgtgcgctccgcgccttcgaggacgccgagcgccggtggctcgaggccgccgctgcccgcgccgcagagaaggccgcggctgctgcggccgaagaggatgcaagggctgcggaggcttccgctcgaaacaagcctaaagatggccaaggaaaccagtcagaagaagatagtgaatgggaatatgttgaagatggtccagcagaaattatatggaaaggaaatgagatcattgtgaagaagaaaaaggttaaagtaccaaaggggtccaaggaaaagctgcaaattcaggaggaagatagacctacatcaaatccgctcccaccacagtctgttgctttggctgctcataggagagaaccttctttgtctgctcaagaagtacttgacaaagttgctcaagagactccgaattttggaacagaacaggataaggcccattgtccatttcatctcaagacaggggcttgtcgctttggattgcgctgcagcagagttcacttttaccctgataaatcaatcacattgctaatgaaaaacatgtataacggtccaggccttgctttggagcaagatgaagggcttgaggtttgttagaggaaattctctaatgcataactttgtatccttaaactactgtttatttacgtttaaggatgctcaattttggtttcatgggcagtgccattttaagttgtgatagtttaatactaaagcaagctcatgtcaaaataacaagtattccactttaagcttgtaagcctttataagaagacatgagtataaataactgactacttggaactatttgaatttttttaatctactgctcaagataactcttaccccaagttttccttggctactatcagactcgcgacagattgcatgttctttcgtgttatcttcagaacttcgacttgaggcatacagtgatcagaccagttgatttcacttgattgaggacgtcttgaactttgatctgctaatttcacagatgaagagattgaacaaagctatgaagaattttatgaagatgtacatacagaatttctgaaatttggtgaacttgtgaatttcaaggtatgtagaaatgggtctttccatcttcgagggaatgtttatgtgcactataaatcgttggattcagctcttcttgcctacagcagcatgaatggacgctattttgctggaaaacaggtaatcactctatttccttcctcaagtattatgtgaggataattgttatagcttaagggagaaagtacaaattactactctgaaatttgtctggctggataaaccccctagaatattatattttatttcccaagctatttcagttggttcaatctactcctttataaagtttgtgtactaagttgagttttaagttatgttaaaaaagttacgtccggtatcaccccacaaaattgcactccctcctttaaaaattataagacattttagctttttctatatatgtagttttcactatgcatttagctatacattatatttaaatacatagtaaaaacaatgtatctagagaagccaaaatgccttataatttggaagagggaataagttgtaagtcagcttgtacatggagaaacaaaaaaaatg

SEQ ID NO: 220173 - DNA, 2185 bp, Zea Mays
gagaagcccaggcccacttgtacgcgactcgccaacgccttttcccccgggccgctgcgatcgcgccctaccgggagaccggcgacggcgaatcgacgagctcgccatgtcggccttagcggcgggcggtggcgccgccgccgatggtgccccggaggcgacagcggcgccgacaaggagggagaagcggagggagcggaagaaggagcgccgccggagggcgcggaggcaggccgcggcgcgcgctcgtgcggcggtcgaggcggaggcacccgcggtcgaccccgaggaggagcgccgactccttgagatccaggaggccgaggcggctgctgagtccgagcgtgcgctccgcgccttcgaggacgccgagcgccggtggctcgaggccgccgctgcccgcgccgcagagaaggccgcggctgctgcggccgaagaggatgcaagggctgcggaggcttccgctcgaaacaagcctaaagatggccaaggaaaccagtcagaagaagatagtgaatgggaatatgttgaagatggtccagcagaaattatatggaaaggaaatgagatcattgtgaagaagaaaaaggttaaagtaccaaaggggtccaaggaaaagctgcaaattcaggaggaagatagacctacatcaaatccgctcccaccacagtctgttgctttggctgctcataggagagaaccttctttgtctgctcaagaagtacttgacaaagttgctcaagagactccgaattttggaacagaacaggataaggcccattgtccatttcatctcaagacaggggcttgtcgctttggattgcgctgcagcagagttcacttttaccctgataaatcaatcacattgctaatgaaaaacatgtataacggtccaggccttgctttggagcaagatgaagggcttgaggtttgttagaggaaattctctaatgcataactttgtatccttaaactactgtttatttacgtttaaggatgctcaattttggtttcatgggcagtgccattttaagttgtgatagtttaatactaaagcaagctcatgtcaaaataacaagtattccactttaagcttgtaagcctttataagaagacatgagtataaataactgactacttggaactatttgaatttttttaatctactgctcaagataactcttaccccaagttttccttggctactatcagactcgcgacagattgcatgttctttcgtgttatcttcagaacttcgacttgaggcatacagtgatcagaccagttgatttcacttgattgaggacgtcttgaactttgatctgctaatgtatcctaaattatcatggtcttgctgatgttgctgagctttttgatgttttctattgctattagaaatgtgcccaatatttgaaatcggtacatgtattgggtatcatttatcaagtagatccttgacaattttgataatattcgggaaattttaaatgttgaaccgttgaggagtatttcttttattggacgtctttggtgaccattagggtgacagttcacagatgaagagattgaacaaagctatgaagaattttatgaagatgtacatacagaatttctgaaatttggtgaacttgtgaatttcaaggtatgtagaaatgggtctttccatcttcgagggaatgtttatgtgcactataaatcgttggattcagctcttcttgcctacagcagcatgaatggacgctattttgctggaaaacaggtaatcactctatttccttcctcaagtattatgtgaggataattgttatagcttaagggagaaagtacaaattactactctgaaatttgtctggctggataaaccccctagaatattatattttatttcccaagctatttcagttggttcaatctactcctttataaagtttgtgtactaagttgagttttaagttatgttaaaaaagttacgtccggtatcaccccacaaaattgcactccctcctttaaaaattataagacattttagctttttctatatatgtagttttcactatgcatttagctatacattatatttaaatacatagtaaaaacaatgtatctagagaagccaaaatgccttataatttggaagagggaataagttgtaagtcagcttgtacatggagaaacaaaaaaaatg

SEQ ID NO: 220174 - DNA, 1564 bp, Zea Mays
gagaagcccaggcccacttgtacgcgactcgccaacgccttttcccccgggccgctgcgatcgcgccctaccgggagaccggcgacggcgaatcgacgagctcgccatgtcggccttagcggcgggcggtggcgccgccgccgatggtgccccggaggcgacagcggcgccgacaaggagggagaagcggagggagcggaagaaggagcgccgccggagggcgcggaggcaggccgcggcgcgcgctcgtgcggcggtcgaggcggaggcacccgcggtcgaccccgaggaggagcgccgactccttgagatccaggaggccgaggcggctgctgagtccgagcgtgcgctccgcgccttcgaggacgccgagcgccggtggctcgaggccgccgctgcccgcgccgcagagaaggccgcggctgctgcggccgaagaggatgcaagggctgcggaggcttccgctcgaaacaagcctaaagatggccaaggaaaccagtcagaagaagatagtgaatgggaatatgttgaagatggtccagcagaaattatatggaaaggaaatgagatcattgtgaagaagaaaaaggttaaagtaccaaaggggtccaaggaaaagctgcaaattcaggaggaagatagacctacatcaaatccgctcccaccacagtctgttgctttggctgctcataggagagaaccttctttgtctgctcaagaagtacttgacaaagttgctcaagagactccgaattttggaacagaacaggataaggcccattgtccatttcatctcaagacaggggcttgtcgctttggattgcgctgcagcagagttcacttttaccctgataaatcaatcacattgctaatgaaaaacatgtataacggtccaggccttgctttggagcaagatgaagggcttgagttcacagatgaagagattgaacaaagctatgaagaattttatgaagatgtacatacagaatttctgaaatttggtgaacttgtgaatttcaaggtatgtagaaatgggtctttccatcttcgagggaatgtttatgtgcactataaatcgttggattcagctcttcttgcctacagcagcatgaatggacgctattttgctggaaaacaggtaatcactctatttccttcctcaagtattatgtgaggataattgttatagcttaagggagaaagtacaaattactactctgaaatttgtctggctggataaaccccctagaatattatattttatttcccaagctatttcagttggttcaatctactcctttataaagtttgtgtactaagttgagttttaagttatgttaaaaaagttacgtccggtatcaccccacaaaattgcactccctcctttaaaaattataagacattttagctttttctatatatgtagttttcactatgcatttagctatacattatatttaaatacatagtaaaaacaatgtatctagagaagccaaaatgccttataatttggaagagggaataagttgtaagtcagcttgtacatggagaaacaaaaaaaatg

SEQ ID NO: 220175 - DNA, 1682 bp, Zea Mays
gagaagcccaggcccacttgtacgcgactcgccaacgccttttcccccgggccgctgcgatcgcgccctaccgggagaccggcgacggcgaatcgacgagctcgccatgtcggccttagcggcgggcggtggcgccgccgccgatggtgccccggaggcgacagcggcgccgacaaggagggagaagcggagggagcggaagaaggagcgccgccggagggcgcggaggcaggccgcggcgcgcgctcgtgcggcggtcgaggcggaggcacccgcggtcgaccccgaggaggagcgccgactccttgagatccaggaggccgaggcggctgctgagtccgagcgtgcgctccgcgccttcgaggacgccgagcgccggtggctcgaggccgccgctgcccgcgccgcagagaaggccgcggctgctgcggccgaagaggatgcaagggctgcggaggcttccgctcgaaacaagcctaaagatggccaaggaaaccagtcagaagaagatagtgaatgggaatatgttgaagatggtccagcagaaattatatggaaaggaaatgagatcattgtgaagaagaaaaaggttaaagtaccaaaggggtccaaggaaaagctgcaaattcaggaggaagatagacctacatcaaatccgctcccaccacagtctgttgctttggctgctcataggagagaaccttctttgtctgctcaagaagtacttgacaaagttgctcaagagactccgaattttggaacagaacaggataaggcccattgtccatttcatctcaagacaggggcttgtcgctttggattgcgctgcagcagagttcacttttaccctgataaatcaatcacattgctaatgaaaaacatgtataacggtccaggccttgctttggagcaagatgaagggcttgagactcgcgacagattgcatgttctttcgtgttatcttcagaacttcgacttgaggcatacagtgatcagaccagttgatttcacttgattgaggacgtcttgaactttgatctgctaatttcacagatgaagagattgaacaaagctatgaagaattttatgaagatgtacatacagaatttctgaaatttggtgaacttgtgaatttcaaggtatgtagaaatgggtctttccatcttcgagggaatgtttatgtgcactataaatcgttggattcagctcttcttgcctacagcagcatgaatggacgctattttgctggaaaacaggtaatcactctatttccttcctcaagtattatgtgaggataattgttatagcttaagggagaaagtacaaattactactctgaaatttgtctggctggataaaccccctagaatattatattttatttcccaagctatttcagttggttcaatctactcctttataaagtttgtgtactaagttgagttttaagttatgttaaaaaagttacgtccggtatcaccccacaaaattgcactccctcctttaaaaattataagacattttagctttttctatatatgtagttttcactatgcatttagctatacattatatttaaatacatagtaaaaacaatgtatctagagaagccaaaatgccttataatttggaagagggaataagttgtaagtcagcttgtacatggagaaacaaaaaaaatg

SEQ ID NO: 220176 - DNA, 1544 bp, Zea Mays
gagaagcccaggcccacttgtacgcgactcgccaacgccttttcccccgggccgctgcgatcgcgccctaccgggagaccggcgacggcgaatcgacgagctcgccatgtcggccttagcggcgggcggtggcgccgccgccgatggtgccccggaggcgacagcggcgccgacaaggagggagaagcggagggagcggaagaaggagcgccgccggagggcgcggaggcaggccgcggcgcgcgctcgtgcggcggtcgaggcggaggcacccgcggtcgaccccgaggaggagcgccgactccttgagatccaggaggccgaggcggctgctgagtccgagcgtgcgctccgcgccttcgaggacgccgagcgccggtggctcgaggccgccgctgcccgcgccgcagagaaggccgcggctgctgcggccgaagaggatgcaagggctgcggaggcttccgctcgaaacaagcctaaagatggccaaggaaaccagtcagaagaagatagtgaatgggaatatgttgaagatggtccagcagaaattatatggaaaggaaatgagatcattgtgaagaagaaaaaggttaaagtaccaaaggggtccaaggaaaagctgcaaattcaggaggaagatagacctacatcaaatccgctcccaccacagtctgttgctttggctgctcataggagagaaccttctttgtctgctcaagaagtacttgacaaagttgctcaagagactccgaattttggaacagaacaggataaggcccattgtccatttcatctcaagacaggggcttgtcgctttggattgcgctgcagcagagttcacttttaccctgataaatcaatcacattgctaatgaaaaacatgtataacggtccaggccttgctttggagcaagatgaagggcttgagttcacagatgaagagattgaacaaagctatgaagaattttatgaagatgtacatacagaatttctgaaatttggtgaacttgtgaatttcaagggtcgtggttgccttagtgagagagagttggagaattagcttacaattaaattgatcatggtttatcggtatttcttaagctctacatgaggagactggttcactttagtagtccactgctattgcatactagaatatgtccaaacttctgaagacttagggggcatttggttccctagctagttttccttaccttgctatgctaggctagagaacctttgctaggcaaggtgagcagattttgctttctgaccacagcacggtaaatccttggcagcacagacctcaagataggcttaccaactattcaaatgcatgtccctgttctgcattgtctctcagcaaggctaaacagtccctggtaaagaattcaaacgcaaacttagtcttagctaagcattttaacctcacctcgctattcgcatatatgattgactgttagacctctttctatttttatctttctacttactagaatgcacaccacttgttactatgggcgaagttaaattttgacacaaat

SEQ ID NO: 220177 - DNA, 1881 bp, Zea Mays
gagaagcccaggcccacttgtacgcgactcgccaacgccttttcccccgggccgctgcgatcgcgccctaccgggagaccggcgacggcgaatcgacgagctcgccatgtcggccttagcggcgggcggtggcgccgccgccgatggtgccccggaggcgacagcggcgccgacaaggagggagaagcggagggagcggaagaaggagcgccgccggagggcgcggaggcaggccgcggcgcgcgctcgtgcggcggtcgaggcggaggcacccgcggtcgaccccgaggaggagcgccgactccttgagatccaggaggccgaggcggctgctgagtccgagcgtgcgctccgcgccttcgaggacgccgagcgccggtggctcgaggccgccgctgcccgcgccgcagagaaggccgcggctgctgcggccgaagaggatgcaagggctgcggaggcttccgctcgaaacaagcctaaagatggccaaggaaaccagtcagaagaagatagtgaatgggaatatgttgaagatggtccagcagaaattatatggaaaggaaatgagatcattgtgaagaagaaaaaggttaaagtaccaaaggggtccaaggaaaagctgcaaattcaggaggaagatagacctacatcaaatccgctcccaccacagtctgttgctttggctgctcataggagagaaccttctttgtctgctcaagaagtacttgacaaagttgctcaagagactccgaattttggaacagaacaggataaggcccattgtccatttcatctcaagacaggggcttgtcgctttggattgcgctgcagcagagttcacttttaccctgataaatcaatcacattgctaatgaaaaacatgtataacggtccaggccttgctttggagcaagatgaagggcttgagactcgcgacagattgcatgttctttcgtgttatcttcagaacttcgacttgaggcatacagtgatcagaccagttgatttcacttgattgaggacgtcttgaactttgatctgctaatgtatcctaaattatcatggtcttgctgatgttgctgagctttttgatgttttctattgctattagaaatgtgcccaatatttgaaatcggtacatgtattgggtatcatttatcaagtagatccttgacaattttgataatattcgggaaattttaaatgttgaaccgttgaggagtatttcttttattggacgtctttggtgaccattagggtgacagttcacagatgaagagattgaacaaagctatgaagaattttatgaagatgtacatacagaatttctgaaatttggtgaacttgtgaatttcaagggtcgtggttgccttagtgagagagagttggagaattagcttacaattaaattgatcatggtttatcggtatttcttaagctctacatgaggagactggttcactttagtagtccactgctattgcatactagaatatgtccaaacttctgaagacttagggggcatttggttccctagctagttttccttaccttgctatgctaggctagagaacctttgctaggcaaggtgagcagattttgctttctgaccacagcacggtaaatccttggcagcacagacctcaagataggcttaccaactattcaaatgcatgtccctgttctgcattgtctctcagcaaggctaaacagtccctggtaaagaattcaaacgcaaacttagtcttagctaagcattttaacctcacctcgctattcgcatatatgattgactgttagacctctttctatttttatctttctacttactagaatgcacaccacttgttactatgggcgaagttaaattttgacacaaat

SEQ ID NO: 220178 - DNA, 3889 bp, Zea Mays
ggggaagagaggggacgaagagggagaaggaactgggacttgccgcccccgcctccgaattccccactcctccaccaccgccaccactcaccccttgctccgctcggcctcctgaatccggcgtcgtcaagcaaccccactccttctgccgttatcagaaccctaaccgatcaatccgtccgattcccagctgccggtttcgcgttgggagcgccggagcaggggaggggcggagggtcggatcggcagccgcaggagcattgagcgatggctgccgtgtaggatgcagctggactccgccggccgccgcctagctgctgctgttgttgctgaagttccgatgcttcagcaaccgcgatcttaataggagcggagggtggagtaccggtggagtgggccggacggctggttgatctccgtgagctccagcgcctacgcactgggaggtggggaggtgattgccggaggcgtatggaggaacctgggagggagggggattcccccgggccgccgtgggcgccaagtgagtcctcagctttccgggcgttcgttacggcggtgggggagcgggcggtggcgtcgccttcaggctcggacaatggggattccgtctgctcaagcaacctccgcgccgtcaggaagagaccttttgttgcaagattaaccacatatatcatccaaacttttgaaaaatgcaatcctgagtttaagtactcagagtcactaaaccccaagcgctttctcaccaatcccgcagttcctgttcacaaccatggtcttgacaatgcaaactctgatctcatattgtatgtcaacctggaactgcttaataaaaagtcaagccggaggtatgttgtccaagaaatgcttggccaaggtacctttggacaggttgcgaaatgctgggatgcagaaactaacagttatgttgcagtgaaggttataaagaatcagcctgccttttaccagcaggctatcatggaggtctctttattaagattgttaaatgagaaatttgatcctgatgatgaacatcacattgtccggatgctggattttttcctctaccaaaaccatttgtgtatagcctttgaaatgcttggtaacaacctgtatgagctgttgaaaaggaatagtttaagaggtttgcaaatgaaatatgttcgaactttctcaagacagatactggatgccctgattatcatgaaagatgctggcattattcattgtgatctaaaaccagaaaacatccttatagctccaactgtaaaaacagcagttggagtgaaagtaattgattttggatcagtgtgcatggagggtaaaaccatttattcatatattcagagccgttattacaggtctccagaagtacttcttggttatccatatactactgccattgatatgtggtcattcggttgcatcgttgctgagctatatatagggctgcctttatttcctggtgcatcagaatatgatgttctttgccgtatgattgagattattggtgggcaaccaccagatgatctgctacgtgaggctaaaaacactgggaaattttttaagcatgttggaagtatctatcctagtagtgaggctcggaatggcgctagcagtgcatacagaattttaagtgaagatgagatcgaagcaagggactccaagaaaccgaaggttgggagatggtatttccctcgtggaaggcttgacagactcatatatacatacccctggaagaatttgagcgagggaaacttgccagagacagaaaaggctgattgcttggcattagttgatttcttgagaggacttgttgagtttgatcctaataagaggtggtcaccgctgcagaatcattatatgttcttcacaaatgtgaaaacctattttaggcctcgtatcatccattcatcactggtgaagccttcactggtccttacgagcctgttcaggagaccccacgaattcctgttggacgtgctgcagtagttgaccacaatccaggaggaggtcacttgctgggtgctggtctttctcctcaggttggaagcattaacagatgcttacgatttaacaacgctttgcaaccaaatatgcctttttcatatggaagcagttgtggcagttttgggagccatggtagctttaacgataatgctggctttagctatggaagctatgattttaacagtgtcgacatatataattcaccaatggatccttctgggtttaatttacgttcacaacttggaggatcgtttctcggatctagcccacatattcgacgaagacctcatctctcacatggtggtggcattcggttaagccctggtggtccagggcatatgtctcttggggccagtccatcacaatttacaccgccaaattcccagatgcaaatcccaacaggtcctaatggaaggtatggtgcctctccttcaagaggtggacatggctcttcgttgggaaaggttgctgttgtaggccaatacaataggaggaggaatcagggttatccacctatgccaatgccaccacatgaacacacatctcaactgatccaggggcaccaaggagatggtgtcagtactgctcgctttggtgcatatgcccaaggaaattctacctacctacataatgcactccctaattctagtcattatagttggagatcgcaaaggggatctggcagtggtttacctttggacccttcttctagccgtggttcttttccacccaccaattactatggctttcctttacactccgatgcgtcagcagatacattgccctccacctcatcagtatcagatccagccgattgggatctcaactctagtgacaagtcactcctgcaagaggaccgaacactgtcagctgggttaagtgatcttcgcttgatagacgcaagtggccaaacaaacagatctagcagattggctcctttccaaagtcatgatattttaagttcaaacccttcgactatgaatcaaagaaatggacacctatttcatgcatcatctctgggagagagtacacatactccaggtcatgtcacattggatggatacgaacacacaacttattctcagcgaagtttcccaatctatcgtgggcaaccatttcagcagtacaacaacatgacttccagttacatccgaccgatgagggctcatcacaatggtcagcctgtctggtctaattataggctgacagaacctccaccaactacaatgggtgacggaatgctctggggggtggccattcgtttgcagcgagcggactgccacctacacttaggaaagattttgggagaatcttttagtcctgaatccggaggaatgccgaatgccaccaaattgatggcatcagttgtttgcatctgcaattccgggttggattatttgctgggggtgcctactggtattgcaatttgttgtgttcctccgatgtctcccaggatgttcggttcaaatgattatatggtacgggatatgattacagtgctcgttctttgctatacctgcacgatctagtagaaaaatgtcagttgtgctacttgatgcgaatcttgctagttcgaggtttgggagagtttttctgtctcggttattgtcttcctttctctattctatttttgacagagggttaagttcctgaaccttaacatggctaagactgaagtgaaggccacgtggtcgtggtgacatgatttcgttttcgtgatacttgaggagccgactatctgtttttaagcatctttctgttgttgttttgctacaacaggttttctaagggcgtctgtgtccaacgtggtattagaatttgatggatctgagtcatctgactgtaaattctataagcaaactcaaaaggggtataagag

SEQ ID NO: 220179 - DNA, 3849 bp, Zea Mays
ggggaagagaggggacgaagagggagaaggaactgggacttgccgcccccgcctccgaattccccactcctccaccaccgccaccactcaccccttgctccgctcggcctcctgaatccggcgtcgtcaagcaaccccactccttctgccgttatcagaaccctaaccgatcaatccgtccgattcccagctgccggtttcgcgttgggagcgccggagcaggggaggggcggagggtcggatcggcagccgcaggagcattgagcgatggctgccgtgtaggatgcagctggactccgccggccgccgcctagctgctgctgttgttgctgaagttccgatgcttcagcaaccgcgatcttaataggagcggagggtggagtaccggtggagtgggccggacggctggttgatctccgtgagctccagcgcctacgcactgggaggtggggaggtgattgccggaggcgtatggaggaacctgggagggagggggattcccccgggccgccgtgggcgccaagtgagtcctcagctttccgggcgttcgttacggcggtgggggagcgggcggtggcgtcgccttcaggctcggacaatggggattccgtctgctcaagcaacctccgcgccgtcaggaagagaccttttgttgcaagattaaccacatatatcatccaaacttttgaaaaatgcaatcctgagtttaagtactcagagtcactaaaccccaagcgctttctcaccaatcccgcagttcctgttcacaaccatggtcttgacaatgcaaactctgatctcatattgtatgtcaacctggaactgcttaataaaaagtcaagccggaggtatgttgtccaagaaatgcttggccaaggtacctttggacaggttgcgaaatgctgggatgcagaaactaacagttatgttgcagtgaaggttataaagaatcagcctgccttttaccagcaggctatcatggaggtctctttattaagattgttaaatgagaaatttgatcctgatgatgaacatcacattgtccggatgctggattttttcctctaccaaaaccatttgtgtatagcctttgaaatgcttggtaacaacctgtatgagctgttgaaaaggaatagtttaagaggtttgcaaatgaaatatgttcgaactttctcaagacagatactggatgccctgattatcatgaaagatgctggcattattcattgtgatctaaaaccagaaaacatccttatagctccaactgtaaaaacagcagttggagtgaaagtaattgattttggatcagtgtgcatggagggtaaaaccatttattcatatattcagagccgttattacaggtctccagaagtacttcttggttatccatatactactgccattgatatgtggtcattcggttgcatcgttgctgagctatatatagggctgcctttatttcctggtgcatcagaatatgatgttctttgccgtatgattgagattattggtgggcaaccaccagatgatctgctacgtgaggctaaaaacactgggaaattttttaagcatgttggaagtatctatcctagtagtgaggctcggaatggcgctagcagtgcatacagaattttaagtgaagatgagatcgaagcaagggactccaagaaaccgaaggttgggagatggtatttccctcgtggaaggcttgacagactcatatatacatacccctggaagaatttgagcgagggaaacttgccagaaaaggctgattgcttggcattagttgatttcttgagaggacttgttgagtttgatcctaataagaggtggtcaccgctgcaggcctcgtatcatccattcatcactggtgaagccttcactggtccttacgagcctgttcaggagaccccacgaattcctgttggacgtgctgcagtagttgaccacaatccaggaggaggtcacttgctgggtgctggtctttctcctcaggttggaagcattaacagatgcttacgatttaacaacgctttgcaaccaaatatgcctttttcatatggaagcagttgtggcagttttgggagccatggtagctttaacgataatgctggctttagctatggaagctatgattttaacagtgtcgacatatataattcaccaatggatccttctgggtttaatttacgttcacaacttggaggatcgtttctcggatctagcccacatattcgacgaagacctcatctctcacatggtggtggcattcggttaagccctggtggtccagggcatatgtctcttggggccagtccatcacaatttacaccgccaaattcccagatgcaaatcccaacaggtcctaatggaaggtatggtgcctctccttcaagaggtggacatggctcttcgttgggaaaggttgctgttgtaggccaatacaataggaggaggaatcagggttatccacctatgccaatgccaccacatgaacacacatctcaactgatccaggggcaccaaggagatggtgtcagtactgctcgctttggtgcatatgcccaaggaaattctacctacctacataatgcactccctaattctagtcattatagttggagatcgcaaaggggatctggcagtggtttacctttggacccttcttctagccgtggttcttttccacccaccaattactatggctttcctttacactccgatgcgtcagcagatacattgccctccacctcatcagtatcagatccagccgattgggatctcaactctagtgacaagtcactcctgcaagaggaccgaacactgtcagctgggttaagtgatcttcgcttgatagacgcaagtggccaaacaaacagatctagcagattggctcctttccaaagtcatgatattttaagttcaaacccttcgactatgaatcaaagaaatggacacctatttcatgcatcatctctgggagagagtacacatactccaggtcatgtcacattggatggatacgaacacacaacttattctcagcgaagtttcccaatctatcgtgggcaaccatttcagcagtacaacaacatgacttccagttacatccgaccgatgagggctcatcacaatggtcagcctgtctggtctaattataggctgacagaacctccaccaactacaatgggtgacggaatgctctggggagggaggggtggccattcgtttgcagcgagcggactgccacctacacttaggaaagattttgggagaatcttttagtcctgaatccggaggaatgccgaatgccaccaaattgatggcatcagttgtttgcatctgcaattccgggttggattatttgctgggggtgcctactggtattgcaatttgttgtgttcctccgatgtctcccaggatgttcggttcaaatgattatatggtacgggatatgattacagtgctcgttctttgctatacctgcacgatctagtagaaaaatgtcagttgtgctacttgatgcgaatcttgctagttcgaggtttgggagagtttttctgtctcggttattgtcttcctttctctattctatttttgacagagggttaagttcctgaaccttaacatggctaagactgaagtgaaggccacgtggtcgtggtgacatgatttcgttttcgtgatacttgaggagccgactatctgtttttaagcatctttctgttgttgttttgctacaacaggttttctaagggcgtctgtgtccaacgtggtattagaatttgatggatctgagtcatctgactgtaaattctataagcaaactcaaaaggggtataagag

SEQ ID NO: 220180 - DNA, 3841 bp, Zea Mays
ggggaagagaggggacgaagagggagaaggaactgggacttgccgcccccgcctccgaattccccactcctccaccaccgccaccactcaccccttgctccgctcggcctcctgaatccggcgtcgtcaagcaaccccactccttctgccgttatcagaaccctaaccgatcaatccgtccgattcccagctgccggtttcgcgttgggagcgccggagcaggggaggggcggagggtcggatcggcagccgcaggagcattgagcgatggctgccgtgtaggatgcagctggactccgccggccgccgcctagctgctgctgttgttgctgaagttccgatgcttcagcaaccgcgatcttaataggagcggagggtggagtaccggtggagtgggccggacggctggttgatctccgtgagctccagcgcctacgcactgggaggtggggaggtgattgccggaggcgtatggaggaacctgggagggagggggattcccccgggccgccgtgggcgccaagtgagtcctcagctttccgggcgttcgttacggcggtgggggagcgggcggtggcgtcgccttcaggctcggacaatggggattccgtctgctcaagcaacctccgcgccgtcaggaagagaccttttgttgcaagattaaccacatatatcatccaaacttttgaaaaatgcaatcctgagtttaagtactcagagtcactaaaccccaagcgctttctcaccaatcccgcagttcctgttcacaaccatggtcttgacaatgcaaactctgatctcatattgtatgtcaacctggaactgcttaataaaaagtcaagccggaggtatgttgtccaagaaatgcttggccaaggtacctttggacaggttgcgaaatgctgggatgcagaaactaacagttatgttgcagtgaaggttataaagaatcagcctgccttttaccagcaggctatcatggaggtctctttattaagattgttaaatgagaaatttgatcctgatgatgaacatcacattgtccggatgctggattttttcctctaccaaaaccatttgtgtatagcctttgaaatgcttggtaacaacctgtatgagctgttgaaaaggaatagtttaagaggtttgcaaatgaaatatgttcgaactttctcaagacagatactggatgccctgattatcatgaaagatgctggcattattcattgtgatctaaaaccagaaaacatccttatagctccaactgtaaaaacagcagttggagtgaaagtaattgattttggatcagtgtgcatggagggtaaaaccatttattcatatattcagagccgttattacaggtctccagaagtacttcttggttatccatatactactgccattgatatgtggtcattcggttgcatcgttgctgagctatatatagggctgcctttatttcctggtgcatcagaatatgatgttctttgccgtatgattgagattattggatgatctgctacgtgaggctaaaaacactgggaaattttttaagcatgttggaagtatctatcctagtagtgaggctcggaatggcgctagcagtgcatacagaattttaagtgaagatgagatcgaagcaagggactccaagaaaccgaaggttgggagatggtatttccctcgtggaaggcttgacagactcatatatacatacccctggaagaatttgagcgagggaaacttgccagagacagaaaaggctgattgcttggcattagttgatttcttgagaggacttgttgagtttgatcctaataagaggtggtcaccgctgcaggcctcgtatcatccattcatcactggtgaagccttcactggtccttacgagcctgttcaggagaccccacgaattcctgttggacgtgctgcagtagttgaccacaatccaggaggaggtcacttgctgggtgctggtctttctcctcaggttggaagcattaacagatgcttacgatttaacaacgctttgcaaccaaatatgcctttttcatatggaagcagttgtggcagttttgggagccatggtagctttaacgataatgctggctttagctatggaagctatgattttaacagtgtcgacatatataattcaccaatggatccttctgggtttaatttacgttcacaacttggaggatcgtttctcggatctagcccacatattcgacgaagacctcatctctcacatggtggtggcattcggttaagccctggtggtccagggcatatgtctcttggggccagtccatcacaatttacaccgccaaattcccagatgcaaatcccaacaggtcctaatggaaggtatggtgcctctccttcaagaggtggacatggctcttcgttgggaaaggttgctgttgtaggccaatacaataggaggaggaatcagggttatccacctatgccaatgccaccacatgaacacacatctcaactgatccaggggcaccaaggagatggtgtcagtactgctcgctttggtgcatatgcccaaggaaattctacctacctacataatgcactccctaattctagtcattatagttggagatcgcaaaggggatctggcagtggtttacctttggacccttcttctagccgtggttcttttccacccaccaattactatggctttcctttacactccgatgcgtcagcagatacattgccctccacctcatcagtatcagatccagccgattgggatctcaactctagtgacaagtcactcctgcaagaggaccgaacactgtcagctgggttaagtgatcttcgcttgatagacgcaagtggccaaacaaacagatctagcagattggctcctttccaaagtcatgatattttaagttcaaacccttcgactatgaatcaaagaaatggacacctatttcatgcatcatctctgggagagagtacacatactccaggtcatgtcacattggatggatacgaacacacaacttattctcagcgaagtttcccaatctatcgtgggcaaccatttcagcagtacaacaacatgacttccagttacatccgaccgatgagggctcatcacaatggtcagcctgtctggtctaattataggctgacagaacctccaccaactacaatgggtgacggaatgctctggggagggaggggtggccattcgtttgcagcgagcggactgccacctacacttaggaaagattttgggagaatcttttagtcctgaatccggaggaatgccgaatgccaccaaattgatggcatcagttgtttgcatctgcaattccgggttggattatttgctgggggtgcctactggtattgcaatttgttgtgttcctccgatgtctcccaggatgttcggttcaaatgattatatggtacgggatatgattacagtgctcgttctttgctatacctgcacgatctagtagaaaaatgtcagttgtgctacttgatgcgaatcttgctagttcgaggtttgggagagtttttctgtctcggttattgtcttcctttctctattctatttttgacagagggttaagttcctgaaccttaacatggctaagactgaagtgaaggccacgtggtcgtggtgacatgatttcgttttcgtgatacttgaggagccgactatctgtttttaagcatctttctgttgttgttttgctacaacaggttttctaagggcgtctgtgtccaacgtggtattagaatttgatggatctgagtcatctgactgtaaattctataagcaaactcaaaaggggtataagag

SEQ ID NO: 220181 - DNA, 3732 bp, Zea Mays
ggggaagagaggggacgaagagggagaaggaactgggacttgccgcccccgcctccgaattccccactcctccaccaccgccaccactcaccccttgctccgctcggcctcctgaatccggcgtcgtcaagcaaccccactccttctgccgttatcagaaccctaaccgatcaatccgtccgattcccagctgccggtttcgcgttgggagcgccggagcaggggaggggcggagggtcggatcggcagccgcaggagcattgagcgatggctgccgtgtaggatgcagctggactccgccggccgccgcctagctgctgctgttgttgctgaagttccgatgcttcagcaaccgcgatcttaataggagcggagggtggagtaccggtggagtgggccggacggctggttgatctccgtgagctccagcgcctacgcactgggaggtggggaggtgattgccggaggcgtatggaggaacctgggagggagggggattcccccgggccgccgtgggcgccaagtgagtcctcagctttccgggcgttcgttacggcggtgggggagcgggcggtggcgtcgccttcaggctcggacaatggggattccgtctgctcaagcaacctccgcgccgtcaggaagagaccttttgttgcaagattaaccacatatatcatccaaacttttgaaaaatgcaatcctgagtttaagtactcagagtcactaaaccccaagcgctttctcaccaatcccgcagttcctgttcacaaccatggtcttgacaatgcaaactctgatctcatattgtatgtcaacctggaactgcttaataaaaagtcaagccggaggtatgttgtccaagaaatgcttggccaaggtacctttggacaggttgcgaaatgctgggatgcagaaactaacagttatgttgcagtgaaggttataaagaatcagcctgccttttaccagcaggctatcatggaggtctctttattaagattgttaaatgagaaatttgatcctgatgatgaacatcacattgtccggatgctggattttttcctctaccaaaaccatttgtgtatagcctttgaaatgcttggtaacaacctgtatgagctgttgaaaaggaatagtttaagaggtttgcaaatgaaatatgttcgaactttctcaagacagatactggatgccctgattatcatgaaagatgctggcattattcattgtgatctaaaaccagaaaacatccttatagctccaactgtaaaaacagcagttggagtgaaagtaattgattttggatcagtgtgcatggagggtaaaaccatttattcatatattcagagccgttattacaggtctccagaagtacttcttggttatcctgggcaaccaccagatgatctgctacgtgaggctaaaaacactgggaaattttttaagcatgttggaagtatctatcctagtagtgaggctcggaatggcgctagcagtgcatacagaattttaagtgaagatgagatcgaagcaagggactccaagaaaccgaaggttgggagatggtatttccctcgtggaaggcttgacagactcatatatacatacccctggaagaatttgagcgagggaaacttgccagagacagaaaaggctgattgcttggcattagttgatttcttgagaggacttgttgagtttgatcctaataagaggtggtcaccgctgcaggcctcgtatcatccattcatcactggtgaagccttcactggtccttacgagcctgttcaggagaccccacgaattcctgttggacgtgctgcagtagttgaccacaatccaggaggaggtcacttgctgggtgctggtctttctcctcaggttggaagcattaacagatgcttacgatttaacaacgctttgcaaccaaatatgcctttttcatatggaagcagttgtggcagttttgggagccatggtagctttaacgataatgctggctttagctatggaagctatgattttaacagtgtcgacatatataattcaccaatggatccttctgggtttaatttacgttcacaacttggaggatcgtttctcggatctagcccacatattcgacgaagacctcatctctcacatggtggtggcattcggttaagccctggtggtccagggcatatgtctcttggggccagtccatcacaatttacaccgccaaattcccagatgcaaatcccaacaggtcctaatggaaggtatggtgcctctccttcaagaggtggacatggctcttcgttgggaaaggttgctgttgtaggccaatacaataggaggaggaatcagggttatccacctatgccaatgccaccacatgaacacacatctcaactgatccaggggcaccaaggagatggtgtcagtactgctcgctttggtgcatatgcccaaggaaattctacctacctacataatgcactccctaattctagtcattatagttggagatcgcaaaggggatctggcagtggtttacctttggacccttcttctagccgtggttcttttccacccaccaattactatggctttcctttacactccgatgcgtcagcagatacattgccctccacctcatcagtatcagatccagccgattgggatctcaactctagtgacaagtcactcctgcaagaggaccgaacactgtcagctgggttaagtgatcttcgcttgatagacgcaagtggccaaacaaacagatctagcagattggctcctttccaaagtcatgatattttaagttcaaacccttcgactatgaatcaaagaaatggacacctatttcatgcatcatctctgggagagagtacacatactccaggtcatgtcacattggatggatacgaacacacaacttattctcagcgaagtttcccaatctatcgtgggcaaccatttcagcagtacaacaacatgacttccagttacatccgaccgatgagggctcatcacaatggtcagcctgtctggtctaattataggctgacagaacctccaccaactacaatgggtgacggaatgctctggggagggaggggtggccattcgtttgcagcgagcggactgccacctacacttaggaaagattttgggagaatcttttagtcctgaatccggaggaatgccgaatgccaccaaattgatggcatcagttgtttgcatctgcaattccgggttggattatttgctgggggtgcctactggtattgcaatttgttgtgttcctccgatgtctcccaggatgttcggttcaaatgattatatggtacgggatatgattacagtgctcgttctttgctatacctgcacgatctagtagaaaaatgtcagttgtgctacttgatgcgaatcttgctagttcgaggtttgggagagtttttctgtctcggttattgtcttcctttctctattctatttttgacagagggttaagttcctgaaccttaacatggctaagactgaagtgaaggccacgtggtcgtggtgacatgatttcgttttcgtgatacttgaggagccgactatctgtttttaagcatctttctgttgttgttttgctacaacaggttttctaagggcgtctgtgtccaacgtggtattagaatttgatggatctgagtcatctgactgtaaattctataagcaaactcaaaaggggtataagag

SEQ ID NO: 220182 - DNA, 3845 bp, Zea Mays
ggggaagagaggggacgaagagggagaaggaactgggacttgccgcccccgcctccgaattccccactcctccaccaccgccaccactcaccccttgctccgctcggcctcctgaatccggcgtcgtcaagcaaccccactccttctgccgttatcagaaccctaaccgatcaatccgtccgattcccagctgccggtttcgcgttgggagcgccggagcaggggaggggcggagggtcggatcggcagccgcaggagcattgagcgatggctgccgtgtaggatgcagctggactccgccggccgccgcctagctgctgctgttgttgctgaagttccgatgcttcagcaaccgcgatcttaataggagcggagggtggagtaccggtggagtgggccggacggctggttgatctccgtgagctccagcgcctacgcactgggaggtggggaggtgattgccggaggcgtatggaggaacctgggagggagggggattcccccgggccgccgtgggcgccaagtgagtcctcagctttccgggcgttcgttacggcggtgggggagcgggcggtggcgtcgccttcaggctcggacaatggggattccgtctgctcaagcaacctccgcgccgtcaggaagagaccttttgttgcaagattaaccacatatatcatccaaacttttgaaaaatgcaatcctgagtttaagtactcagagtcactaaaccccaagcgctttctcaccaatcccgcagttcctgttcacaaccatggtcttgacaatgcaaactctgatctcatattgtatgtcaacctggaactgcttaataaaaagtcaagccggaggtatgttgtccaagaaatgcttggccaaggtacctttggacaggttgcgaaatgctgggatgcagaaactaacagttatgttgcagtgaaggttataaagaatcagcctgccttttaccagcaggctatcatggaggtctctttattaagattgttaaatgagaaatttgatcctgatgatgaacatcacattgtccggatgctggattttttcctctaccaaaaccatttgtgtatagcctttgaaatgcttggtatgagctgttgaaaaggaatagtttaagaggtttgcaaatgaaatatgttcgaactttctcaagacagatactggatgccctgattatcatgaaagatgctggcattattcattgtgatctaaaaccagaaaacatccttatagctccaactgtaaaaacagcagttggagtgaaagtaattgattttggatcagtgtgcatggagggtaaaaccatttattcatatattcagagccgttattacaggtctccagaagtacttcttggttatccatatactactgccattgatatgtggtcattcggttgcatcgttgctgagctatatatagggctgcctttatttcctggtgcatcagaatatgatgttctttgccgtatgattgagattattggtgggcaaccaccagatgatctgctacgtgaggctaaaaacactgggaaattttttaagcatgttggaagtatctatcctagtagtgaggctcggaatggcgctagcagtgcatacagaattttaagtgaagatgagatcgaagcaagggactccaagaaaccgaaggttgggagatggtatttccctcgtggaaggcttgacagactcatatatacatacccctggaagaatttgagcgagggaaacttgccagagacagaaaaggctgattgcttggcattagttgatttcttgagaggacttgttgagtttgatcctaataagaggtggtcaccgctgcaggcctcgtatcatccattcatcactggtgaagccttcactggtccttacgagcctgttcaggagaccccacgaattcctgttggacgtgctgcagtagttgaccacaatccaggaggaggtcacttgctgggtgctggtctttctcctcaggttggaagcattaacagatgcttacgatttaacaacgctttgcaaccaaatatgcctttttcatatggaagcagttgtggcagttttgggagccatggtagctttaacgataatgctggctttagctatggaagctatgattttaacagtgtcgacatatataattcaccaatggatccttctgggtttaatttacgttcacaacttggaggatcgtttctcggatctagcccacatattcgacgaagacctcatctctcacatggtggtggcattcggttaagccctggtggtccagggcatatgtctcttggggccagtccatcacaatttacaccgccaaattcccagatgcaaatcccaacaggtcctaatggaaggtatggtgcctctccttcaagaggtggacatggctcttcgttgggaaaggttgctgttgtaggccaatacaataggaggaggaatcagggttatccacctatgccaatgccaccacatgaacacacatctcaactgatccaggggcaccaaggagatggtgtcagtactgctcgctttggtgcatatgcccaaggaaattctacctacctacataatgcactccctaattctagtcattatagttggagatcgcaaaggggatctggcagtggtttacctttggacccttcttctagccgtggttcttttccacccaccaattactatggctttcctttacactccgatgcgtcagcagatacattgccctccacctcatcagtatcagatccagccgattgggatctcaactctagtgacaagtcactcctgcaagaggaccgaacactgtcagctgggttaagtgatcttcgcttgatagacgcaagtggccaaacaaacagatctagcagattggctcctttccaaagtcatgatattttaagttcaaacccttcgactatgaatcaaagaaatggacacctatttcatgcatcatctctgggagagagtacacatactccaggtcatgtcacattggatggatacgaacacacaacttattctcagcgaagtttcccaatctatcgtgggcaaccatttcagcagtacaacaacatgacttccagttacatccgaccgatgagggctcatcacaatggtcagcctgtctggtctaattataggctgacagaacctccaccaactacaatgggtgacggaatgctctggggagggaggggtggccattcgtttgcagcgagcggactgccacctacacttaggaaagattttgggagaatcttttagtcctgaatccggaggaatgccgaatgccaccaaattgatggcatcagttgtttgcatctgcaattccgggttggattatttgctgggggtgcctactggtattgcaatttgttgtgttcctccgatgtctcccaggatgttcggttcaaatgattatatggtacgggatatgattacagtgctcgttctttgctatacctgcacgatctagtagaaaaatgtcagttgtgctacttgatgcgaatcttgctagttcgaggtttgggagagtttttctgtctcggttattgtcttcctttctctattctatttttgacagagggttaagttcctgaaccttaacatggctaagactgaagtgaaggccacgtggtcgtggtgacatgatttcgttttcgtgatacttgaggagccgactatctgtttttaagcatctttctgttgttgttttgctacaacaggttttctaagggcgtctgtgtccaacgtggtattagaatttgatggatctgagtcatctgactgtaaattctataagcaaactcaaaaggggtataagag

SEQ ID NO: 220183 - DNA, 3880 bp, Zea Mays
cgctgacggagccgagacggggaagggggaagagaggggacgaagagggagaaggaactgggacttgccgcccccgcctccgaattccccactcctccaccaccgccaccactcaccccttgctccgctcggcctcctgaatccggcgtcgtcaagcaaccccactccttctgccgttatcagaaccctaaccgatcaatccgtccgattcccagctgccggtttcgcgttgggagcgccggagcaggggaggggcggagggtcggatcggcagccgcaggagcattgagcgatggctgccgtgtaggatgcagctggactccgccggccgccgcctagctgctgctgttgttgctgaagttccgatgcttcagcaaccgcgatcttaataggagcggagggtggagtaccggtggagtgggccggacggctggttgatctccgtgagctccagcgcctacgcactgggaggtggggaggtgattgccggaggcgtatggaggaacctgggagggagggggattcccccgggccgccgtgggcgccaagtgagtcctcagctttccgggcgttcgttacggcggtgggggagcgggcggtggcgtcgccttcaggctcggacaatggggattccgtctgctcaagcaacctccgcgccgtcaggaagagaccttttgttgcaagattaaccacatatatcatccaaacttttgaaaaatgcaatcctgagtttaagtactcagagtcactaaaccccaagcgctttctcaccaatcccgcagttcctgttcacaaccatggtcttgacaatgcaaactctgatctcatattgtatgtcaacctggaactgcttaataaaaagtcaagccggaggtatgttgtccaagaaatgcttggccaaggtacctttggacaggttgcgaaatgctgggatgcagaaactaacagttatgttgcagtgaaggttataaagaatcagcctgccttttaccagcaggctatcatggaggtctctttattaagattgttaaatgagaaatttgatcctgatgatgaacatcacattgtccggatgctggattttttcctctaccaaaaccatttgtgtatagcctttgaaatgcttggtaacaacctgtatgagctgttgaaaaggaatagtttaagaggtttgcaaatgaaatatgttcgaactttctcaagacagatactggatgccctgattatcatgaaagatgctggcattattcattgtgatctaaaaccagaaaacatccttatagctccaactgtaaaaacagcagttggagtgaaagtaattgattttggatcagtgtgcatggagggtaaaaccatttattcatatattcagagccgttattacaggtctccagaagtacttcttggttatccatatactactgccattgatatgtggtcattcggttgcatcgttgctgagctatatatagggctgcctttatttcctggtgcatcagaatatgatgttctttgccgtatgattgagattattggtgggcaaccaccagatgatctgctacgtgaggctaaaaacactgggaaattttttaagcatgttggaagtatctatcctagtagtgaggctcggaatggcgctagcagtgcatacagaattttaagtgaagatgagatcgaagcaagggactccaagaaaccgaaggttgggagatggtatttccctcgtggaaggcttgacagactcatatatacatacccctggaagaatttgagcgagggaaacttgccagagacagaaaaggctgattgcttggcattagttgatttcttgagaggacttgttgagtttgatcctaataagaggtggtcaccgctgcaggcctcgtatcatccattcatcactggtgaagccttcactggtccttacgagcctgttcaggagaccccacgaattcctgttggacgtgctgcagtagttgaccacaatccaggaggaggtcacttgctgggtgctggtctttctcctcaggttggaagcattaacagatgcttacgatttaacaacgctttgcaaccaaatatgcctttttcatatggaagcagttgtggcagttttgggagccatggtagctttaacgataatgctggctttagctatggaagctatgattttaacagtgtcgacatatataattcaccaatggatccttctgggtttaatttacgttcacaacttggaggatcgtttctcggatctagcccacatattcgacgaagacctcatctctcacatggtggtggcattcggttaagccctggtggtccagggcatatgtctcttggggccagtccatcacaatttacaccgccaaattcccagatgcaaatcccaacaggtcctaatggaaggtatggtgcctctccttcaagaggtggacatggctcttcgttgggaaaggttgctgttgtaggccaatacaataggaggaggaatcagggttatccacctatgccaatgccaccacatgaacacacatctcaactgatccaggggcaccaaggagatggtgtcagtactgctcgctttggtgcatatgcccaaggaaattctacctacctacataatgcactccctaattctagtcattatagttggagatcgcaaaggggatctggcagtggtttacctttggacccttcttctagccgtggttcttttccacccaccaattactatggctttcctttacactccgatgcgtcagcagatacattgccctccacctcatcagtatcagatccagccgattgggatctcaactctagtgacaagtcactcctgcaagaggaccgaacactgtcagctgggttaagtgatcttcgcttgatagacgcaagtggccaaacaaacagatctagcagattggctcctttccaaagtcatgatattttaagttcaaacccttcgactatgaatcaaagaaatggacacctatttcatgcatcatctctgggagagagtacacatactccaggtcatgtcacattggatggatacgaacacacaacttattctcagcgaagtttcccaatctatcgtgggcaaccatttcagcagtacaacaacatgacttccagttacatccgaccgatgagggctcatcacaatggtcagcctgtctggtctaattataggctgacagaacctccaccaactacaatgggtgacggaatgctctggggagggaggggtggccattcgtttgcagcgagcggactgccacctacacttaggaaagattttgggagaatcttttagtcctgaatccggaggaatgccgaatgccaccaaattgatggcatcagttgtttgcatctgcaattccgggttggattatttgctgggggtgcctactggtattgcaatttgttgtgttcctccgatgtctcccaggatgttcggttcaaatgattatatggtacgggatatgattacagtgctcgttctttgctatacctgcacgatctagtagaaaaatgtcagttgtgctacttgatgcgaatcttgctagttcgaggtttgggagagtttttctgtctcggttattgtcttcctttctctattctatttttgacagagggttaagttcctgaaccttaacatggctaagactgaagtgaaggccacgtggtcgtggtgacatgatttcgttttcgtgatacttgaggagccgactatctgtttttaagcatctttctgttgttgttttgctacaacaggttttctaagggcgtctgtgtccaacgtggtattagaatttgatggatctgagtcatctgactgtaaattctataagcaaactcaaaaggggtataagag

SEQ ID NO: 220184 - DNA, 3284 bp, Zea Mays
ggggaagagaggggacgaagagggagaaggaactgggacttgccgcccccgcctccgaattccccactcctccaccaccgccaccactcaccccttgctccgctcggcctcctgaatccggcgtcgtcaagcaaccccactccttctgccgttatcagaaccctaaccgatcaatccgtccgattcccagctgccggtttcgcgttgggagcgccggagcaggggaggggcggagggtcggatcggcagccgcaggagcattgagcgatggctgccgtgtaggatgcagctggactccgccggccgccgcctagctgctgctgttgttgctgaagttccgatgcttcagcaaccgcgatcttaataggagcggagggtggagtaccggtggagtgggccggacggctggttgatctccgtgagctccagcgcctacgcactgggaggtggggaggtgattgccggaggcgtatggaggaacctgggagggagggggattcccccgggccgccgtgggcgccaagtgagtcctcagctttccgggcgttcgttacggcggtgggggagcgggcggtggcgtcgccttcaggctcggacaatggggattccgtctgctcaagcaacctccgcgccgtcaggaagagaccttttgttgcaagattaaccacatatatcatccaaacttttgaaaaatgcaatcctgagtttaagtactcagagtcactaaaccccaagcgctttctcaccaatcccgcagttcctgttcacaaccatggtcttgacaatgcaaactctgatctcatattgtatgtcaacctggaactgcttaataaaaagtcaagccggaggtatgttgtccaagaaatgcttggccaaggtacctttggacaggttgcgaaatgctgggatgcagaaactaacagttatgttgcagtgaaggttataaagaatcagcctgccttttaccagcaggctatcatggaggtctctttattaagattgttaaatgagaaatttgatcctgatgatgaacatcacattgtccggatgctggattttttcctctaccaaaaccatttgtgtatagcctttgaaatgcttggtaacaacctgtatgagctgttgaaaaggaatagtttaagaggtttgcaaatgaaatatgttcgaactttctcaagacagatactggatgccctgattatcatgaaagatgctggcattattcattgtgatctaaaaccagaaaacatccttatagctccaactgtaaaaacagcagttggagtgaaagtaattgattttggatcagtgtgcatggagggtaaaaccatttattcatatattcagagccgttattacaggtctccagaagtacttcttggttatccatatactactgccattgatatgtggtcattcggttgcatcgttgctgagctatatatagggctgcctttatttcctggtgcatcagaatatgatgttctttgccgtatgattgagattattggtgggcaaccaccagatgatctgctacgtgaggctaaaaacactgggaaattttttaagcatgttggaagtatctatcctagtagtgaggctcggaatggcgctagcagtgcatacagaattttaagtgaagatgagatcgaagcaagggactccaagaaaccgaaggttgggagatggtatttccctcgtggaaggcttgacagactcatatatacatacccctggaagaatttgagcgagggaaacttgccagagacagaaaaggctgattgcttggcattagttgatttcttgagaggacttgttgagtttgatcctaataagaggtggtcaccgctgcagggcctcgtatcatccattcatcactggtgaagccttcactggtccttacgagcctgttcaggagaccccacgaattcctgttggacgtgctgcagtagttgaccacaatccaggaggaggtcacttgctgggtgctggtctttctcctcaggttggaagcattaacagatgcttacgatttaacaacgctttgcaaccaaatatgcctttttcatatggaagcagttgtggcagttttgggagccatggtagctttaacgataatgctggctttagctatggaagctatgattttaacagtgtcgacatatataattcaccaatggatccttctgggtttaatttacgttcacaacttggaggatcgtttctcggatctagcccacatattcgacgaagacctcatctctcacatggtggtggcattcggttaagccctggtggtccagggcatatgtctcttggggccagtccatcacaatttacaccgccaaattcccagatgcaaatcccaacaggtcctaatggaaggtatggtgcctctccttcaagaggtggacatggctcttcgttgggaaaggttgctgttgtaggccaatacaataggaggaggaatcagggttatccacctatgccaatgccaccacatgaacacacatctcaactgatccaggggcaccaaggagatggtgtcagtactgctcgctttggtgcatatgcccaaggaaattctacctacctacataatgcactccctaattctagtcattatagttggagatcgcaaaggggatctggcagtggtttacctttggacccttcttctagccgtggttcttttccacccaccaattactatggctttcctttacactccgatgcgtcagcagatacattgccctccacctcatcagtatcagatccagccgattgggatctcaactctagtgacaagtcactcctgcaagaggaccgaacactgtcagctgggttaagtgatcttcgcttgatagacgcaagtggccaaacaaacagatctagcagattggctcctttccaaagtcatgatattttaagttcaaacccttcgactatgaatcaaagaaatggacacctatttcatgcatcatctctgggagagagtacacatactccaggtcatgtcacattggatggatacgaacacacaacttattctcagcgaagtttcccaatctatcgtgggcaaccatttcagcagtacaacaacatgacttccagttacatccgaccgatgagggctcatcacaatggtcagcctgtctggtctaattataggctgacagaacctccaccaactacaatgggtgacggaatgctctgggttctctgttaaacctttgatcttaggcaaggcatgtttcagaaatttaattggcattatcttgttg

SEQ ID NO: 220185 - DNA, 915 bp, Zea Mays
ctgggacaagcacgctgccagcgacgtacgtcatggcaaatgagcgctgaggctacttgctagcgtacccgtgacctgatgttcctttaatataatgccttctccccgcgctgcatctccagtggtgattcctgtgtcctaggctcctagcaagtgaactccccagagtggtgattctcttggatttggtgcatcgacagttcaaggaggaaaccatgacgctttttgcagatcgtagagatgcatgtgagcatcgactgcgatggctgcgaggacaacgtcaggaaggccctggaaaagctcaaaggagtgcaccacgtaagcatcgacaggatgcacggcaaggtgactgtcactgggtcggtgagccagaggaaggcgctccgcgcggcgcggcgcacgggcaagctcgccgtgctgtggccgtccgcctacaacaacccgtcgtaccaccaagcccacgcgatgcgggcctactaccagtaccagtaccaggccaataagcccgcgcaagcgcagcagcaccagtactacagcagcgtccagcgcgccggcaagaacagcggcggcatctcggcggtggctacgaagccggcggggcatcagtacccccagtccaaggccagctcctacaactaccatgtccacgggtactatgactccgagctgtacgggtactaccacgaccacgagcagcccggcgacgtagtgccagccgccgtgcggtcctacttcagcgacgagaacccgagtgcttgctcgatcatgtagtcatcatcgatccttccatgaggtcggtacggtgtggtcgttcgggtgtatgatgattgatcatcggcctcgcttgtgtctgggtttatgtttccattcatcctgtatgtataaatgtacaatacaatactgccttgtttgtac

SEQ ID NO: 220186 - DNA, 1795 bp, Zea Mays
aagatcgggcgtcgcccgtccgtctcctctccccgctccgctggtcgccttctcccctccccgcgaactcgggctcaaagcaaaccaaaccccttctagggtttgcgctccgggcatgatccccttgtagccaccgcctcccatggccctagccgtgtcctgctggccatgaccacctcggcttccccactcttccccaacccgcgcaagcgccacctcgacgcctccccccttccccgccacttccacggcccgcagagccaaacccgcctaagccagcgccaccgccgccggttcttcttgccgctaccaccgaaggcgcggtccttcgcttccgacatgggaaatcacatgtccagtgccttcggttggcccagtgatgacgggcgggggctcctctgttgctggatcggcaaggcgcggggtctcacggtggccatggatgtggaggcggggacgggactgcatttggtggaccggcggagggttacggattcgaggaagactacgttgaaggaggaggcggtgaagcctccccaatggaagaaaaggaggcccttctacaaggaggcgttggaggcagcagcgacacattacgatccgaggctggaggcaatcgggatcgagataaggctccaaaaggagaagcttgcctatataccaaagtcggataaggctgccaaggaggatatgtctgaactatttaaacctctcactgctgaggaggaaaatgatgttcatgactgtctctacagtagaggctcgagtagcaaagttctagtgctgcatgaaccatctaacattgaggttagcaaagagaaattccagtgcttgagacgtggctgctggttaaatgatgaggttattaatctgtaccttgaattgttgaaggagcgagaaaaaagagaaccaaacaggtttctgaaatgtcatttctttaatacattcttttataagaagcttgcttgtggaaaaaatggttatgattacaaatctgttaaaagatggacctcccaaaggaagttgggatatgaactcattgaatgcgataaagtaatatatttgtccctgtgcataaagatgtacattggtgtttagcaattataaacgtgaaggaaaatttctttcagtatcttgattcccttggtggcatggatcataatgtaccaaaagtactggctcgatatatttcagaggaagtgaaggacaaaagtaacagagtaatcaacaccagtttgtggcatgaagagctagttgatattcctttacagcggaatgggtgggactgcggtatgtttatgctcaagtacattgatttccacagcagaggactgcccctgtcttttagtcaggaacacatggagtattttaggaagaggacagcgaaggagatcttaagactaagagctgactgatggatagacattcatcactttttggaacagaggctgactttttttactgcattttggggattataataaataaaagctgctaagtcaagtctatggcattgttgagcatgctcagggtggggtcatctacctgagatggttggtaatgtggccctgataatgtaaatactatagatattctgtagagaaattttgtttagggatttatttgactcggagaagcagtgaggggggaaatagatgtagctacgctgatattcgttgttggtttaaagttgtttcagattaatttgttcttgtggaattattttgcagccatggttgtcatacttaagttacccttgaatctccttggagaatagttgtatccgaaatctaat

SEQ ID NO: 220187 - DNA, 1752 bp, Zea Mays
aagatcgggcgtcgcccgtccgtctcctctccccgctccgctggtcgccttctcccctccccgcgaactcgggctcaaagcaaaccaaaccccttctagggtttgcgctccgggcatgatccccttgtagccaccgcctcccatggccctagccgtgtcctgctggccatgaccacctcggcttccccactcttccccaacccgcgcaagcgccacctcgacgcctccccccttccccgccacttccacggcccgcagagccaaacccgcctaagccagcgccaccgccgccggttcttcttgccgctaccaccgaaggcgcggtccttcgcttccgacatgggaaatcacatgtccagtgccttcggttggcccagtgatgacgggcgggggctcctctgttgctggatcggcaaggcgcggggtctcacggtggccatggatgtggaggcggggacgggactgcatttggtggaccggcggagggttacggattcgaggaagactacgttgaaggaggaggcggtgaagcctccccaatggaagaaaaggaggcccttctacaaggaggcgttggaggcagcagcgacacattacgatccgaggctggaggcaatcgggatcgagataaggctccaaaaggagaagcttgcctatataccaaagtcggataaggctgccaaggaggatatgtctgaactatttaaacctctcactgctgaggaggaaaatgatgttcatgactgtctctacagtagaggctcgagtagcaaagttctagtgctgcatgaaccatctaacattgaggttagcaaagagaaattccagtgcttgagacgtggctgctggttaaatgatgaggttattaatctgtaccttgaattgttgaaggagcgagaaaaaagagaaccaaacagcttgcttgtggaaaaaatggttatgattacaaatctgttaaaagatggacctcccaaaggaagttgggatatgaactcattgaatgcgataaagtaatatatttgtccctgtgcataaagatgtacattggtgtttagcaattataaacgtgaaggaaaatttctttcagtatcttgattcccttggtggcatggatcataatgtaccaaaagtactggctcgatatatttcagaggaagtgaaggacaaaagtaacagagtaatcaacaccagtttgtggcatgaagagctagttgatattcctttacagcggaatgggtgggactgcggtatgtttatgctcaagtacattgatttccacagcagaggactgcccctgtcttttagtcaggaacacatggagtattttaggaagaggacagcgaaggagatcttaagactaagagctgactgatggatagacattcatcactttttggaacagaggctgactttttttactgcattttggggattataataaataaaagctgctaagtcaagtctatggcattgttgagcatgctcagggtggggtcatctacctgagatggttggtaatgtggccctgataatgtaaatactatagatattctgtagagaaattttgtttagggatttatttgactcggagaagcagtgaggggggaaatagatgtagctacgctgatattcgttgttggtttaaagttgtttcagattaatttgttcttgtggaattattttgcagccatggttgtcatacttaagttacccttgaatctccttggagaatagttgtatccgaaatctaat

SEQ ID NO: 220188 - DNA, 3530 bp, Zea Mays
cgtccttcaacctctaaatgtggcggaagggaatcgtccaccaaacttcgacctctaaatgtggcggaagggaatcgtccaccaaacgtcagttgcttcctcctcccgcctcgatctgaaaagttccgagctcgtgtctatgctgcttgcgaccttcttcctcgaggcgatagttggattgcaacggttctcgtcggagctcgacacgaagctgagcggcaggagggcgaagtgtggcgaatatgattttaggctggtcctgatttagttgagataaaggtaagcaagtcgtcgtagcaatcaaggtcgagctcggtcgccatggcggcgcggaggacttgggacgcaccatacctatctttgtcgcgtgttggtgagttggcgagtctggttgcagtagcttcgctttggtctgtgaggtggatggcgagcgacggctgcaaaaagtgacgtcggaaaagacgcgtgcaaggtgctcgatgtaatgcctgtgtacaacaaatgtgaaggaaatatacgactagtaatcagtttgtcattttatatccatacaaaactattaattaattcatgatgctggagtatttcatcatttttaatggcgtacgtttaatccaattgaaatataagaaaaacaaagaataaatatggtagtttatgtattctaacgctatagatatagaggaccgaatttagaaaatattgttgaagatgagaaatatatagaagaccaaaatcttttaaaatgtactataaagaaataaaatatttttttagagggtgaaatttatgacgttcctcgaggctggagaagcctgaaggtgctcctggactacccagccggccaggcgttcgcgttcacgtggcacgtgagagtcgcgtgatgcggtgcatgggccggcccgtacctatttggaatttcacaaaaaaaaaggggtgggggaagatcgggcgtcgcccgtccgtctcctctccccgctccgctggtcgccttctcccctccccgcgaactcgggctcaaagcaaaccaaaccccttctagggtttgcgctccgggcatgatccccttgtagccaccgcctcccatggccctagccgtgtcctgctggccatgaccacctcggcttccccactcttccccaacccgcgcaagcgccacctcgacgcctccccccttccccgccacttccacggcccgcagagccaaacccgcctaagccagcgccaccgccgccggttcttcttgccgctaccaccgaaggcgcggtccttcgcttccgacatgggaaatcacatgtccagtgccttcggttggcccagtgatgacgggcgggggctcctctgttgctggatcggcaaggcgcggggtctcacggtggccatggatgtggaggcggggacgggactgcatttggtggaccggcggagggttacggattcgaggaagactacgttgaaggaggaggcggtgaagcctccccaatggaagaaaaggaggcccttctacaaggaggcgttggaggcagcagcgacacattacgatccgaggctggaggcaatcgggatcgagataaggctccaaaaggagaagcttgcctatataccaaagtcggataaggctgccaaggaggatatgtctgaactatttaaacctctcactgctgaggaggaaaatgatgttcatgactgtctctacagtagaggctcgagtagcaaagttctagtgctgcatgaaccatctaacattgaggttagcaaagagaaattccagtgcttgagacgtggctgctggttaaatgatgaggttattaatctgtaccttgaattgttgaaggagcgagaaaaaagagaaccaaacaggatgtttgcatcttttttccgtactaaaattggcatttttttgtgtatcctccttgaagaagttttttgttttgtttctaaatgaactagttgatgttgaattgttgattgaattttcagtattagctcttataagaaatgtagatgacgtaatcaaatttgaatgatagcatatcatagtttagttttgtggtggttcatttattacatcaagtattaatccctcttatttataaatgtgttaatagcttggataattagttgtcaagttgtacatttggctgctaattctgcacaaatctatatctgttatgaacttgcattactaatttatatatggtagttgctatagttttaatgtgatcgatttgtaatggtatgtggtcgtatagttaggaaagtttaattacatattttccatggcggtttacatttgtagatataattggcatcctgaatctctgagttgttcgacactttaccttcttggtttcttagatcgtattatctacccaaaccccttagattgcattattattacttgatttgctttcttggttccttatactatactatcttgctttgcacttttgtttggtattgtatactgataatatttgatatatctttgtttcttgtttggtgtacccaaattgtatttaatgaaatcacatattggcctctgtatatcagttattagctatgttcacttttgtttaaacccctttctcactgatgacatggacttctgccttgcatgtatctgccttcgtttattgttcatggatttttttttgcctatgaatgttgatccttactgacttcctgaatgttactcagcttgcttgtggaaaaaatggttatgattacaaatctgttaaaagatggacctcccaaaggaagttgggatatgaactcattgaatgcgataaaatatttgtccctgtgcataaagatgtacattggtgtttagcaattataaacgtgaaggaaaatttctttcagtatcttgattcccttggtggcatggatcataatgtaccaaaagtactggctcgatatatttcagaggaagtgaaggacaaaagtaacagagtaatcaacaccagtttgtggcatgaagagctagttgatattcctttacagcggaatgggtgggactgcggtatgtttatgctcaagtacattgatttccacagcagaggactgcccctgtcttttagtcaggaacacatggagtattttaggaagaggacagcgaaggagatcttaagactaagagctgactgatggatagacattcatcactttttggaacagaggctgactttttttactgcattttggggattataataaataaaagctgctaagtcaagtctatggcattgttgagcatgctcagggtggggtcatctacctgagatggttggtaatgtggccctgataatgtaaatactatagatattctgtagagaaattttgtttagggatttatttgactcggagaagcagtgaggggggaaatagatgtagctacgctgatattcgttgttggtttaaagttgtttcagattaatttgttcttgtggaattattttgcagccatggttgtcatacttaagttacccttgaatctccttggagaatagttgtatccgaaatctaat

SEQ ID NO: 220189 - DNA, 1014 bp, Zea Mays
cgcccctctcctcccacatgtggtgctcaagatgccatccccacaaatgaagctatgaagaagcaaatagttgtagcatcgaaggctatgcctttttactgcgctcttccaactttatctgaatatatgattgagagcggatggactcggagctacttcgatatcagcgaaattggtttttctatgtacctctgttatatggctatgtatctcatctttgtggagtttggaatttactggatgcacagagagttgcatgacataaaaccattatacaaatatctgcatgcaacccaccatatttacaacaaggagaataccttgtctccatttgctggacttgcatttcatccactggatggtgttctgcaagcaataccacatgtgttcgcgctcttcctctttccaacgcacttcaggacacatattgcactcttgttcctagaggctgtgtggacaacaaacatccacgactgcattcatggcaagatatggccagtcatgggtgctggatatcacaccattcaccatacgacataccgccacaactatggccactacaccatctggatggactggatgtttggtacgctcaatgagccagaagatatcctcaagaaggcttgagtttctcggagctgtggtattcctatggtgctggtgctggaactgctcgatctgttcccagtgtttctaatccgttgagcctgttcagcactgtctgtttatgtaggcatcagtgtgttaattagtttgctaggttcatatggctttgtgcttattctgtaatttagcgatgtttgtctcatgacgcaacggagttcaggacgaataaaactttgctagacacattctggattccagctgcttgtacaatgttgcaactcaactgtcaatataggatgtaaaacggattccttctagtcttgtacctgatgagttatttgtggtttctgtgcatgcattgctcagcctatgaatgttgcttatgttttgtggtcaagccaaatgaag

SEQ ID NO: 220190 - DNA, 1052 bp, Zea Mays
ctcgcgtgctcgattcccatctccccctccctgcgcacacccgcacaccaccaacaccagacgccgccgcccctcatcgctgtcccgtcccgcgcgcggccgccgcatccgtccgggcctcctcgtctccccagccccgctgccgccgcagcaaaaacctccacgaatcgccgacactccaacccggaagagccaacgaggtgactccgcgccccggtcatgggtgacagccaatactccttctctcttaccactttcagcccgtcgggaaagcttgtgcagatagagcacgcgctcacggctgtcggatccgggcagacctccctagggatcaaagctgccaacggtgtagtgattgccaccgagaagaaactgccttctattttagtggatgaaacatctgtgcaaaagattcaggcactaacaccaaatattggagttgtctatagtgggatgggtccagattttcgtgttctggtgagaaaaagtcgaaagcaggcacagcagtattatcggttgtacaaggagcatatacctgtaacacagcttgtgcgggagactgctgctgtgatgcaggagttcacacagtcaggatacacagaggatatggaacttgatgatgccatccacactgcaattttgactttgaaagaaggatatgaggggcaaatttcctccaacaacattgaaatcggaattattcgagctgaccgtgagttcaaagttctaagcccatcagagatcaaggatttcttggaagaggtggagtaagttgtctgttgatgatttactgtttcaaacaagaatagcagcatcacttatgagcagccagcctgaagcttgtcttggttttatcactctgtaaactgatttgctccagcgacatgtcttggttttatcactctgtaaactgatttgctccagcgacatgtggttcttacatttgaaaccctcctgaacgcatactgtagacaaatgagatacgtaagatggattttgtatttgacagtctctacagtttgtttatgtgattcacgttcttgtgtgctgta

SEQ ID NO: 220191 - DNA, 1055 bp, Zea Mays
ctcgcgtgctcgattcccatctccccctccctgcgcacacccgcacaccaccaacaccagacgccgccgcccctcatcgctgtcccgtcccgcgcgcggccgccgcatccgtccgggcctcctcgtctccccagccccgctgccgccgcagcaaaaacctccacgaatcgccgacactccaacccggaagagccaacgaggtgactccgcgccccggtcatgggtgacagccaatactccttctctcttaccactttcagcccgtcgggaaagcttgtgcagatagagcacgcgctcacggctgtcggatccgggcagacctccctagggatcaaagctgccaacggtgtagtgattgccaccgagaagaaactgccttctattttagtggatgaaacatctgtgcaaaagattcaggcactaacaccaaatattggagttgtctatagtgggatgggtccagattttcgtgttctggtgagaaaaagtcgaaagcaggcacagcagtattatcggttgtacaaggagcatatacctgtaacacagcttgtgcgggagactgctgctgtgatgcaggagttcacacagtcaggatacacagaggatatggagcttgatgatgccatccacactgcaattttgactttgaaagaaggatatgaggggcaaatttcctccaacaacattgaaatcggaattattcgagctgaccgtgagttcaaagttctaagcccatcagagatcaaggatttcttggaagaggtggagtaagttgtctgttgatgatttactgtttcaaacaagaatagcagcatcacttatgagcagccagcctgaagcttgtcttggttttatcactctgtaaactgatttgctccagcgacatgtcttggttttatcactctgtaaactgatttgctccagcgacatgtggttcttacatttgaaaccctcctgagcgcatactgtagacaaatgagatacgtaagatggatgttgtatttgacagtctctgcagtttgtttatgtgattcacgttcttgtgtgctgtatcg

SEQ ID NO: 220192 - DNA, 1459 bp, Zea Mays
cgaccccccaatcatctactactaataatacccgtacggggggcggctacttagtcctcgtctcagatctgcagcgcaccgtccctttcagctgctcatcagccgcagcggcacgcaaatcgttccgttctgttgcactctcgatctcgttgtccaatagtgcagctaactctccgcactccgttgcgagcttgcgctctgcagctgcggcggccgagcagagcatagcagagcagggcgcgacgcgatcaatcggagatgccccggaccgcgtgtacgcccatccacttttcaaaaggtttaaccaccaacatgtatagtacaagccgagcagttggacgtacagctgatctgaatcctggtctatcctactcctagaaagagtagcactgtaggcgatacatgacctctgtgtgtgattgtgagcgtttcgcctccgattggaacgtcgcagacgcctcttttcgtcttcgtggagcctgccttttctttttcatgccgattggaggctgaggcagcagatgacggacggggacggcccccttttttgccgtcgcggaagtggtggaatcggctagccgcttcgcttttctgtccacggctccacgcacggccgtccgtaggatctgccggccctgggtgcgggcgggcgtaataaagccatgccacccgcgtcgcgtgtggtgctccgttccccgtctggatttgacttgcccgggtgctgctgctgctggtcgaaacggaataaagccacggtgctggggcaagcaagacaagcgcagacgaacctggtgctggtgggggcgccggcggcggcagcatactgaagcttcacgaggacgtgcagacctgtggctacagggacgtgcaggtgatgttcgacatcctgacgtcggagctggaggcgtccgcgcagcgccccgccgccaagcaccaccagcggaagcggccgccgtcgccgtcgtcgccgtggcccagatacccgtcatcctccatgatcgcggccgcgcaatagaggccgcgcgcgacgctgacggggcgtggacatggagtatagtagtccaaagctgccgcgctcgtcctgggtgatgatggcgccgcggttagttaataagcaagcagttcggttaagaacaccgggttattagtagcacgctgtctagttcgtggtggtagctagctaatagagctggcactgaacgtaaggtttggtgccatgaagggtgtcgtcgatcgtcctcctgccgtctctccggcgaaaagagcgaagaaatccaacagcgtcaaggaccaaggtggtggtagtgtcatataagctgtctggtctgaatgtgcctgtacatactacatagcaccatgtgctgaatttttcgcaatactcggagaaatatattgatggaacaagagaggtttgttttttctctctctctctctcaagtgtcttctatgtctggttccg

SEQ ID NO: 220193 - DNA, 937 bp, Zea Mays
ccaaaacgtcgtctatccagataagacgcgcgccacggctgccgtggagtaaaccacaacgcaggacaagccatcgccccgatggacaccgccgcctcatgccgcctcctctcgccggcctcctcctctccgcccccctgtccgaagcagctacccaagcggcgaccgaccttcgcggcctcgcagcagcagtcgcccagctccagcgccaagttcaggctcctctgcctcctccatgacaagtccgcgtcgccaacgacgtcggtgcagatgcagagctcacagtcacagttgcagaggctggcgacggtgttgcagtgcggagccgtctgggcagctgttgaggcgccggcggcgctggcggtgaccggcgaggaggacatcgacctgctagggatcctgccgccgctcgcggtgttcgccttcttctacttcctcgtcgctccccggtgatcatgaactggatgaggctgaggtggtacaagcgcgaattcgtggagacgtacctgcagttcatgttcacctacctcttctacccagcgatgatgttctgggcgccattcgtcaacttcaggaagttcccgagggatcccaccatgaagtacccttggtccaagccgaaggagggcacgccgctgttcaaagacagatacccgcctatagactcctagatacagccttgatgcttgtactcggctcgtcgcgcgccacgggcatgcaggcagcagcgaaaaggccggtttcttcacctaaaaatctgtgtaaaacattactatatatcacacagtctaataatacccgtgctagtacatgggaaaggttactatcactaagattttaccatgatctatagttctatacctcacaacattcatgtaatcatgtccgttaaaaactatgttcaccagtacaaagaagctctataatgacggtcgtg

SEQ ID NO: 220194 - DNA, 2701 bp, Zea Mays
cacggacgagttccatccgagccctcgtcgaagcgtcgatgcaaacttgagttattggtctggaccggattgagccaaggccattgcctcaatcggcccatcacgcggcctttcaggcactccctggcggcggcccctagccagcctctcgcgcgtgcgcagccggcaccctgtggctcactcagcagctgcgcgcggcaggccagcagtggtagtggacagcggcagcggctgtgctcggcggcccctgtgttgatgtgcgctgctcagctgctgtgcccagcggccgacacctctgcggctctcctttgctcgacgtcgagcgagggagaaattccagcaatgcttgtcgtgcaactgccgccacctgaggtagcgggtgaggatgagagcaatagccgtggtgtcttcgtggagttcatgaccaaggtcgctcagttcaatgagcttgttgaatctggggagcgattgcttgggagatttcgtgaggagcttgagtattttcgtaggccgcagatttctaaggaagcagatgtaatgaatcagatacttaaatcaaactgcactgtcagaatgaggtcctatattgaaactggctgcagggtccactgccaaaacatctcaaacattaatcagctgagctcatgcgaaaatggacttaaagatcatataaagaaagttaagaccttgcttgaagagcttgaatgtctggttgagaatgtctatggcatcacactaacagccagtttaagtgctctggaagtttcagacagtcagtgccttgacagcatgctaagtaccgatcgctgctccgtggagggtgtttgtacacagcaggaggacagaagtgcagatcggttggacagggatgtgtcgtttgctacagtaatggtcatggttcgcaacgcgctgaaggctgactacacgatgcaggaaaagattgtctgtgcattgtccttgaaaacaccatcatcagagctcgagggatactgcctcatgtggaatttacgcccgtacatcgatgacgatgtgatgcgtcttgcgtggaaaatgtgtccttagtaggcgcaaggttcgtcattctagcaacaagtaccagaagccggtacggattaaagccaagcttgtttaagctgtttgtcttcaaaaactcacagcagttcacgattacccaaaacattgtttgtattgtacatttcactgtttgcatatgtatacactatattaaagccccctcaaattttcttagatcaaaccaccgtcctctcttccctcgtacccatgtgtcagggatcaaaagagataatggagccagtcaccggcaacgacgtaagaatgtgctaaatgggcttagatgggctatgtaatacattacctgggttcggcctgtatagaacgatatatgtgtgtctcaaactgaggaagacatggtaaaacacataacagaaacgctacttctctgcctcgtctccttcctcgctgccttccttacctcttctccacgaaatctgccattgctgctcgtttctcttctgcagcctcgctaggcatcgctaacaccatgcctccctctctctccctttttccctcgactgcatgtgaaaccttagcctcctcctcaaactactgcgtggagcttcctctccaacttcgcgaacgatgtgttcgctgtgacctctggcaaccactaatatacaaacagtcattaggtgtcgcaaccctttaggtgccgcaaccctttcgtatggaggaggtggcggcccgcgcgggcccggcgtgtccccgacaacacccctcaaggacgccacgcgcgcgccatgatagcacaacgctggcgcccacccagtcctcgcgtccgcttgtctactttcgtatccttgtataaccacgacaccggcccgccagcaaccggcaagcaaaatcaaagtgagccagcccagccatggagaaggcgatcgatcgacagtggcccatccgccacctcagcttgtggtgagcgtcccgatctactgttctattcatccattcattctcaaggattggatcagctcggattggattgggttgggttggctgatcgattccgtgttgggtctgcgtgacagtgcaggcattagtgtgcgcgccgcccctatgctatgagccacatcccaattttttgttagcatctgcaatgataaaattgtgttgcacactttgcttctagcaatttttatgcactacacaaaagcgatttattctagattaaacagaatgaatgtacgatttcgatatatgattccacaatatagttggacttgtattttagtatactatgtactaaataagttccttgtatgatcatcgttctttatgcattttcaaacaaaatttatgatatttattgcattttacgctactactagaaagctcaggctaatccctggcacatgtggctaaatttataacatttttatgtgtttaacggcaacctcgtgtgaagcgagatacacgacaactacctcaatttgaacgtgtcttttacgctttttgtgttgttttttaatgcaaccttgtataaaacgagatacacgacaactaccccaaatcgcccgcgtgatttatgatgtttcgtgactgtcataaaaaatcatcttgttcaccattgtaacaacgatgacaatatatcgccataatttacgctagaaaatgaggattttac

SEQ ID NO: 220195 - DNA, 2866 bp, Zea Mays
ctccgaaccgactaccgagtgctgtgctgaccatcgccgcccgaagcacggacgagttccatccgagccctcgtcgaagcgtcgatgcaaacttgagttattggtctggaccggattgagccaaggccattgcctcaatcggcccatcacgcggcctttcaggcactccctggcggcggcccctagccagcctctcgcgcgtgcgcagccggcaccctgtggctcactcagcagctgcgcgcggcaggccagcagtggtagtggacagcggcagcggctgtgctcggcggcccctgtgttgatgtgcgctgctcagctgctgtgcccagcggccgacacctctgcggctctcctttgctcgacgtcgagttcgtccctgatctggctcaacgatttactggtttttttgccgatgcttcatagttggcgagggagaaattccagcaatgcttgtcgtgcaactgccgccacctgaggtagcgggtgaggatgagagcaatagccgtggtgtcttcgtggagttcatgaccaaggtcgctcagttcaatgagcttgttgaatctggggagcgattgcttgggagatttcgtgaggagcttggttagtttttgttgacacgtctgatttgccatggaggttcagtttatattatccactgggaagccattttgtgatgagtattttcgtaggccgcagatttctaaggaagcagatgtaatgaatcagatacttaaatcaaactgcactgtcagaatgaggtcctatattgaaactggctgcagggtccactgccaaaacatctcaaacattaatcagctgagctcatgcgaaaatggacttaaagatcatataaagaaagttaagaccttgcttgaagagcttgaatgtctggttgagaatgtctatggcatcacactaacagccagtttaagtgctctggaagtttcagacagtcagtgccttgacagcatgctaagtaccgatcgctgctccgtggagcaggaggacagaagtgcagatcggttggacagggatgtgtcgtttgctacagtaatggtcatggttcgcaacgcgctgaaggctgactacacgatgcaggaaaagattgtctgtgcattgtccttgaaaacaccatcatcagagctcgagggatactgcctcatgtggaatttacgcccgtacatcgatgacgatgtgatgcgtcttgcgtggaaaatgtgtccttagtaggcgcaaggttcgtcattctagcaacaagtaccagaagccggtacggattaaagccaagcttgtttaagctgtttgtcttcaaaaactcacagcagttcacgattacccaaaacattgtttgtattgtacatttcactgtttgcatatgtatacactatattaaagccccctcaaattttcttagatcaaaccaccgtcctctcttccctcgtacccatgtgtcagggatcaaaagagataatggagccagtcaccggcaacgacgtaagaatgtgctaaatgggcttagatgggctatgtaatacattacctgggttcggcctgtatagaacgatatatgtgtgtctcaaactgaggaagacatggtaaaacacataacagaaacgctacttctctgcctcgtctccttcctcgctgccttccttacctcttctccacgaaatctgccattgctgctcgtttctcttctgcagcctcgctaggcatcgctaacaccatgcctccctctctctccctttttccctcgactgcatgtgaaaccttagcctcctcctcaaactactgcgtggagcttcctctccaacttcgcgaacgatgtgttcgctgtgacctctggcaaccactaatatacaaacagtcattaggtgtcgcaaccctttaggtgccgcaaccctttcgtatggaggaggtggcggcccgcgcgggcccggcgtgtccccgacaacacccctcaaggacgccacgcgcgcgccatgatagcacaacgctggcgcccacccagtcctcgcgtccgcttgtctactttcgtatccttgtataaccacgacaccggcccgccagcaaccggcaagcaaaatcaaagtgagccagcccagccatggagaaggcgatcgatcgacagtggcccatccgccacctcagcttgtggtgagcgtcccgatctactgttctattcatccattcattctcaaggattggatcagctcggattggattgggttgggttggctgatcgattccgtgttgggtctgcgtgacagtgcaggcattagtgtgcgcgccgcccctatgctatgagccacatcccaattttttgttagcatctgcaatgataaaattgtgttgcacactttgcttctagcaatttttatgcactacacaaaagcgatttattctagattaaacagaatgaatgtacgatttcgatatatgattccacaatatagttggacttgtattttagtatactatgtactaaataagttccttgtatgatcatcgttctttatgcattttcaaacaaaatttatgatatttattgcattttacgctactactagaaagctcaggctaatccctggcacatgtggctaaatttataacatttttatgtgtttaacggcaacctcgtgtgaagcgagatacacgacaactacctcaatttgaacgtgtcttttacgctttttgtgttgttttttaatgcaaccttgtataaaacgagatacacgacaactaccccaaatcgcccgcgtgatttatgatgtttcgtgactgtcataaaaaatcatcttgttcaccattgtaacaacgatgacaatatatcgccataatttacgctagaaaatgaggattttac

SEQ ID NO: 220196 - DNA, 2818 bp, Zea Mays
gacagggcctgacctccgaaccgactaccgagtgctgtgctgaccatcgccgcccgaagcacggacgagttccatccgagccctcgtcgaagcgtcgatgcaaacttgagttattggtctggaccggattgagccaaggccattgcctcaatcggcccatcacgcggcctttcaggcactccctggcggcggcccctagccagcctctcgcgcgtgcgcagccggcaccctgtggctcactcagcagctgcgcgcggcaggccagcagtggtagtggacagcggcagcggctgtgctcggcggcccctgtgttgatgtgcgctgctcagctgctgtgcccagcggccgacacctctgcggctctcctttgctcgacgtcgagttcgtccctgatctggctcaacgatttactggtttttttgccgatgcttcatagttggcgagggagaaattccagcaatgcttgtcgtgcaactgccgccacctgaggtagcgggtgaggatgagagcaatagccgtggtgtcttcgtggagttcatgaccaaggtcgctcagttcaatgagcttgttgaatctggggagcgattgcttgggagatttcgtgaggagcttgagtattttcgtaggccgcagatttctaaggaagcagatgtaatgaatcagatacttaaatcaaactgcactgtcagaatgaggtcctatattgaaactggctgcagggtccactgccaaaacatctcaaacattaatcagctgagctcatgcgaaaatggacttaaagatcatataaagaaagttaagaccttgcttgaagagcttgaatgtctggttgagaatgtctatggcatcacactaacagccagtttaagtgctctggaagtttcagacagtcagtgccttgacagcatgctaagtaccgatcgctgctccgtggagggtgtttgtacacagcaggaggacagaagtgcagatcggttggacagggatgtgtcgtttgctacagtaatggtcatggttcgcaacgcgctgaaggctgactacacgatgcaggaaaagattgtctgtgcattgtccttgaaaacaccatcatcagagctcgagggatactgcctcatgtggaatttacgcccgtacatcgatgacgatgtgatgcgtcttgcgtggaaaatgtgtccttagtaggcgcaaggttcgtcattctagcaacaagtaccagaagccggtacggattaaagccaagcttgtttaagctgtttgtcttcaaaaactcacagcagttcacgattacccaaaacattgtttgtattgtacatttcactgtttgcatatgtatacactatattaaagccccctcaaattttcttagatcaaaccaccgtcctctcttccctcgtacccatgtgtcagggatcaaaagagataatggagccagtcaccggcaacgacgtaagaatgtgctaaatgggcttagatgggctatgtaatacattacctgggttcggcctgtatagaacgatatatgtgtgtctcaaactgaggaagacatggtaaaacacataacagaaacgctacttctctgcctcgtctccttcctcgctgccttccttacctcttctccacgaaatctgccattgctgctcgtttctcttctgcagcctcgctaggcatcgctaacaccatgcctccctctctctccctttttccctcgactgcatgtgaaaccttagcctcctcctcaaactactgcgtggagcttcctctccaacttcgcgaacgatgtgttcgctgtgacctctggcaaccactaatatacaaacagtcattaggtgtcgcaaccctttaggtgccgcaaccctttcgtatggaggaggtggcggcccgcgcgggcccggcgtgtccccgacaacacccctcaaggacgccacgcgcgcgccatgatagcacaacgctggcgcccacccagtcctcgcgtccgcttgtctactttcgtatccttgtataaccacgacaccggcccgccagcaaccggcaagcaaaatcaaagtgagccagcccagccatggagaaggcgatcgatcgacagtggcccatccgccacctcagcttgtggtgagcgtcccgatctactgttctattcatccattcattctcaaggattggatcagctcggattggattgggttgggttggctgatcgattccgtgttgggtctgcgtgacagtgcaggcattagtgtgcgcgccgcccctatgctatgagccacatcccaattttttgttagcatctgcaatgataaaattgtgttgcacactttgcttctagcaatttttatgcactacacaaaagcgatttattctagattaaacagaatgaatgtacgatttcgatatatgattccacaatatagttggacttgtattttagtatactatgtactaaataagttccttgtatgatcatcgttctttatgcattttcaaacaaaatttatgatatttattgcattttacgctactactagaaagctcaggctaatccctggcacatgtggctaaatttataacatttttatgtgtttaacggcaacctcgtgtgaagcgagatacacgacaactacctcaatttgaacgtgtcttttacgctttttgtgttgttttttaatgcaaccttgtataaaacgagatacacgacaactaccccaaatcgcccgcgtgatttatgatgtttcgtgactgtcataaaaaatcatcttgttcaccattgtaacaacgatgacaatatatcgccataatttacgctagaaaatgaggattttac

SEQ ID NO: 220197 - DNA, 1129 bp, Zea Mays
cgcggcctttcaggcactccctggcggcggcccctagccagcctctcgcgcgtgcgcagccggcaccctgtggctcactcagcagctgcgcgcggcaggccagcagtggtagtggacagcggcagcggctgtgctcggcggcccctgtgttgatgtgcgctgctcagctgctgtgcccagcggccgacacctctgcggctctcctttgctcgacgtcgagcgagggagaaattccagcaatgcttgtcgtgcaactgccgccacctgaggtagcgggtgaggatgagagcaatagccgtggtgtcttcgtggagttcatgaccaaggtcgctcagttcaatgagcttgttgaatctggggagcgattgcttgggagatttcgtgaggagcttgagtattttcgtaggccgcagatttctaaggaagcagatgtaatgaatcagatacttaaatcaaactgcactgtcagaatgaggtcctatattgaaactggctgcagggtccactgccaaaacatctcaaacattaatcagctgagctcatgcgaaaatggacttaaagatcatataaagaaagttaagaccttgcttgaagagcttgaatgtctggttgagaatgtctatggcatcacactaacagccagtttaagtgctctggaagtttcagacagtcagtgccttgacagcatgctaagtaccgatcgctgctccgtggaggaggacagaagtgcagatcggttggacagggatgtgtcgtttgctacagtaatggtcatggttcgcaacgcgctgaaggctgactacacgatgcagattgtctgtgcattgtccttgaaaacaccatcatcagagctcgagggatactgcctcatgtggaatttacgcccgtacatcgatgacgatgtgatgcgtcttgcgtggaaaatgtgtccttagtaggcgcaaggttcgtcattctagcaacaagtaccagaagccggtacggattaaagccaagcttgtttaagctgtttgtcttcaaaaactcacagcagttcacgattacccaaaacattgtttgtattgtacatttcactgtttgcatatgtatacactatattaaagccccctcaaattttcttagatcaaac

SEQ ID NO: 220198 - DNA, 1170 bp, Zea Mays
cgcggcctttcaggcactccctggcggcggcccctagccagcctctcgcgcgtgcgcagccggcaccctgtggctcactcagcagctgcgcgcggcaggccagcagtggtagtggacagcggcagcggctgtgctcggcggcccctgtgttgatgtgcgctgctcagctgctgtgcccagcggccgacacctctgcggctctcctttgctcgacgtcgagcgagggagaaattccagcaatgcttgtcgtgcaactgccgccacctgaggtagcgggtgaggatgagagcaatagccgtggtgtcttcgtggagttcatgaccaaggtcgctcagttcaatgagcttgttgaatctggggagcgattgcttgggagatttcgtgaggagcttgagtattttcgtaggccgcagatttctaaggaagcagatgtaatgaatcagatacttaaatcaaactgcactgtcagaatgaggtcctatattgaaactggctgcagggtccactgccaaaacatctcaaacattaatcagctgagctcatgcgaaaatggacttaaagatcatataaagaaagaccttgcttgaagagcttgaatgtctggttgagaatgtctatggcatcacactaacagccagtttaagtgctctggaagtttcagacagtcagtgccttgacagcatgctaagtaccgatcgctgctccgtggagtgaaatggaaaatgggtgacagggtgtttgtacacagcaggaggacagaagtgcagatcggttggacagggatgtgtcgtttgctacagtaatggtcatggttcgcaacgcgctgaaggctgactacacgatgcaggaaaagattgtctgtgcattgtccttgaaaacaccatcatcagagctcgagggatactgcctcatgtggaatttacgcccgtacatcgatgacgatgtgatgcgtcttgcgtggaaaatgtgtccttagtaggcgcaaggttcgtcattctagcaacaagtaccagaagccggtacggattaaagccaagcttgtttaagctgtttgtcttcaaaaactcacagcagttcacgattacccaaaacattgtttgtattgtacatttcactgtttgcatatgtatacactatattaaagccccctcaaattttcttagatcaaac

SEQ ID NO: 220199 - DNA, 1148 bp, Zea Mays
cgcggcctttcaggcactccctggcggcggcccctagccagcctctcgcgcgtgcgcagccggcaccctgtggctcactcagcagctgcgcgcggcaggccagcagtggtagtggacagcggcagcggctgtgctcggcggcccctgtgttgatgtgcgctgctcagctgctgtgcccagcggccgacacctctgcggctctcctttgctcgacgtcgagcgagggagaaattccagcaatgcttgtcgtgcaactgccgccacctgaggtagcgggtgaggatgagagcaatagccgtggtgtcttcgtggagttcatgaccaaggtcgctcagttcaatgagcttgttgaatctggggagcgattgcttgggagatttcgtgaggagcttgagtattttcgtaggccgcagatttctaaggaagcagatgtaatgaatcagatacttaaatcaaactgcactgtcagaatgaggtcctatattgaaactggctgcagggtccactgccaaaacatctcaaacattaatcagctgagctcatgcgaaaatggacttaaagatcatataaagaaagaccttgcttgaagagcttgaatgtctggttgagaatgtctatggcatcacactaacagccagtttaagtgctctggaagtttcagacagtcagtgccttgacagcatgctaagtaccgatcgctgctccgtggagggtgtttgtacacagcaggaggacagaagtgcagatcggttggacagggatgtgtcgtttgctacagtaatggtcatggttcgcaacgcgctgaaggctgactacacgatgcaggaaaagattgtctgtgcattgtccttgaaaacaccatcatcagagctcgagggatactgcctcatgtggaatttacgcccgtacatcgatgacgatgtgatgcgtcttgcgtggaaaatgtgtccttagtaggcgcaaggttcgtcattctagcaacaagtaccagaagccggtacggattaaagccaagcttgtttaagctgtttgtcttcaaaaactcacagcagttcacgattacccaaaacattgtttgtattgtacatttcactgtttgcatatgtatacactatattaaagccccctcaaattttcttagatcaaac

SEQ ID NO: 220200 - DNA, 1133 bp, Zea Mays
cgcggcctttcaggcactccctggcggcggcccctagccagcctctcgcgcgtgcgcagccggcaccctgtggctcactcagcagctgcgcgcggcaggccagcagtggtagtggacagcggcagcggctgtgctcggcggcccctgtgttgatgtgcgctgctcagctgctgtgcccagcggccgacacctctgcggctctcctttgctcgacgtcgagcgagggagaaattccagcaatgcttgtcgtgcaactgccgccacctgaggtagcgggtgaggatgagagcaatagccgtggtgtcttcgtggagttcatgaccaaggtcgctcagttcaatgagcttgttgaatctggggagcgattgcttgggagatttcgtgaggagcttgagtattttcgtaggccgcagatttctaaggaagcagatgtaatgaatcagatacttaaatcaaactgcactgtcagaatgaggtcctatattgaaactggctgcagggtccactgccaaaacatctcaaacattaatcagctgagctcatgcgaaaatggacttaaagatcatataaagaaagaccttgcttgaagagcttgaatgtctggttgagaatgtctatggcatcacactaacagccagtttaagtgctctggaagtttcagacagtcagtgccttgacagcatgctaagtaccgatcgctgctccgtggagcaggaggacagaagtgcagatcggttggacagggatgtgtcgtttgctacagtaatggtcatggttcgcaacgcgctgaaggctgactacacgatgcaggaaaagattgtctgtgcattgtccttgaaaacaccatcatcagagctcgagggatactgcctcatgtggaatttacgcccgtacatcgatgacgatgtgatgcgtcttgcgtggaaaatgtgtccttagtaggcgcaaggttcgtcattctagcaacaagtaccagaagccggtacggattaaagccaagcttgtttaagctgtttgtcttcaaaaactcacagcagttcacgattacccaaaacattgtttgtattgtacatttcactgtttgcatatgtatacactatattaaagccccctcaaattttcttagatcaaac

SEQ ID NO: 220201 - DNA, 1135 bp, Zea Mays
cgcggcctttcaggcactccctggcggcggcccctagccagcctctcgcgcgtgcgcagccggcaccctgtggctcactcagcagctgcgcgcggcaggccagcagtggtagtggacagcggcagcggctgtgctcggcggcccctgtgttgatgtgcgctgctcagctgctgtgcccagcggccgacacctctgcggctctcctttgctcgacgtcgagcgagggagaaattccagcaatgcttgtcgtgcaactgccgccacctgaggtagcgggtgaggatgagagcaatagccgtggtgtcttcgtggagttcatgaccaaggtcgctcagttcaatgagcttgttgaatctggggagcgattgcttgggagatttcgtgaggagcttgagtattttcgtaggccgcagatttctaaggaagcagatgtaatgaatcagatacttaaatcaaactgcactgtcagaatgaggtcctatattgaaactggctgcagggtccactgccaaaacatctcaaacattaatcagctgagctcatgcgaaaatggacttaaagatcatataaagaaagttaagaccttgcttgaagagcttgaatgtctggttgagaatgtctatggcatcacactaacagccagtttaagtgctctggaagtttcagacagtcagtgccttgacagcatgctaagtaccgatcgctgctccgtggaggaggacagaagtgcagatcggttggacagggatgtgtcgtttgctacagtaatggtcatggttcgcaacgcgctgaaggctgactacacgatgcaggaaaagattgtctgtgcattgtccttgaaaacaccatcatcagagctcgagggatactgcctcatgtggaatttacgcccgtacatcgatgacgatgtgatgcgtcttgcgtggaaaatgtgtccttagtaggcgcaaggttcgtcattctagcaacaagtaccagaagccggtacggattaaagccaagcttgtttaagctgtttgtcttcaaaaactcacagcagttcacgattacccaaaacattgtttgtattgtacatttcactgtttgcatatgtatacactatattaaagccccctcaaattttcttagatcaaac

SEQ ID NO: 220202 - DNA, 1342 bp, Zea Mays
ctccgaaccgactaccgagtgctgtgctgaccatcgccgcccgaagcacggacgagttccatccgagccctcgtcgaagcgtcgatgcaaacttgagttattggtctggaccggattgagccaaggccattgcctcaatcggcccatcacgcggcctttcaggcactccctggcggcggcccctagccagcctctcgcgcgtgcgcagccggcaccctgtggctcactcagcagctgcgcgcggcaggccagcagtggtagtggacagcggcagcggctgtgctcggcggcccctgtgttgatgtgcgctgctcagctgctgtgcccagcggccgacacctctgcggctctcctttgctcgacgtcgagttcgtccctgatctggctcaacgatttactggtttttttgccgatgcttcatagttggcgagggagaaattccagcaatgcttgtcgtgcaactgccgccacctgaggtagcgggtgaggatgagagcaatagccgtggtgtcttcgtggagttcatgaccaaggtcgctcagttcaatgagcttgttgaatctggggagcgattgcttgggagatttcgtgaggagcttgagtattttcgtaggccgcagatttctaaggaagcagatgtaatgaatcagatacttaaatcaaactgcactgtcagaatgaggtcctatattgaaactggctgcagggtccactgccaaaacatctcaaacattaatcagctgagctcatgcgaaaatggacttaaagatcatataaagaaagttaagaccttgcttgaagagcttgaatgtctggttgagaatgtctatggcatcacactaacagccagtttaagtgctctggaagtttcagacagtcagtgccttgacagcatgctaagtaccgatcgctgctccgtggaggaggacagaagtgcagatcggttggacagggatgtgtcgtttgctacagtaatggtcatggttcgcaacgcgctgaaggctgactacacgatgcaggaaaagattgtctgtgcattgtccttgaaaacaccatcatcagagctcgagggatactgcctcatgtggaatttacgcccgtacatcgatgacgatgtgatgcgtcttgcgtggaaaatgtgtccttagtaggcgcaaggttcgtcattctagcaacaagtaccagaagccggtacggattaaagccaagcttgtttaagctgtttgtcttcaaaaactcacagcagttcacgattacccaaaacattgtttgtattgtacatttcactgtttgcatatgtatacactatattaaagccccctcaaattttcttagatcaaac

SEQ ID NO: 220203 - DNA, 1431 bp, Zea Mays
ctccgaaccgactaccgagtgctgtgctgaccatcgccgcccgaagcacggacgagttccatccgagccctcgtcgaagcgtcgatgcaaacttgagttattggtctggaccggattgagccaaggccattgcctcaatcggcccatcacgcggcctttcaggcactccctggcggcggcccctagccagcctctcgcgcgtgcgcagccggcaccctgtggctcactcagcagctgcgcgcggcaggccagcagtggtagtggacagcggcagcggctgtgctcggcggcccctgtgttgatgtgcgctgctcagctgctgtgcccagcggccgacacctctgcggctctcctttgctcgacgtcgagttcgtccctgatctggctcaacgatttactggtttttttgccgatgcttcatagttggcgagggagaaattccagcaatgcttgtcgtgcaactgccgccacctgaggtagcgggtgaggatgagagcaatagccgtggtgtcttcgtggagttcatgaccaaggtcgctcagttcaatgagcttgttgaatctggggagcgattgcttgggagatttcgtgaggagcttgagtattttcgtaggccgcagatttctaaggaagcagatgtaatgaatcagatacttaaatcaaactgcactgtcagaatgaggtcctatattgaaactggctgcagggtccactgccaaaacatctcaaacattaatcatgagctcatgcgaaaatggacttaaagatcatataaagaaagttaagaccttgcttgaagagcttgaatgtctggttgagaatgtctatggcatcacactaacagccagtttaagtgctctggaagtttcagacagtcagtgccttgacagcatgctaagtaccgatcgctgctccgtggagggtgtttgtacacagcaggaggacagaagtgcagatcggttggacagggatgtgtcgtttgctacagtaatggtcatggttcgcaacgcgctgaaggctgactacacgatgcaggtaaattgaagtgccaggatgtgcatttgctttttgcgctttacattttgcctttctcttatcttgcctacaggaaaagattgtctgtgcattgtccttgaaaacaccatcatcagagctcgagggatactgcctcatgtggaatttacgcccgtacatcgatgacgatgtgatgcgtcttgcgtggaaaatgtgtccttagtaggcgcaaggttcgtcattctagcaacaagtaccagaagccggtacggattaaagccaagcttgtttaagctgtttgtcttcaaaaactcacagcagttcacgattacccaaaacattgtttgtattgtacatttcactgtttgcatatgtatacactatattaaagccccctcaaattttcttagatcaaac

SEQ ID NO: 220204 - DNA, 1416 bp, Zea Mays
gacctccgaaccgactaccgagtgctgtgctgaccatcgccgcccgaagcacggacgagttccatccgagccctcgtcgaagcgtcgatgcaaacttgagttattggtctggaccggattgagccaaggccattgcctcaatcggcccatcacgcggcctttcaggcactccctggcggcggcccctagccagcctctcgcgcgtgcgcagccggcaccctgtggctcactcagcagctgcgcgcggcaggccagcagtggtagtggacagcggcagcggctgtgctcggcggcccctgtgttgatgtgcgctgctcagctgctgtgcccagcggccgacacctctgcggctctcctttgctcgacgtcgagttcgtccctgatctggctcaacgatttactggtttttttgccgatgcttcatagttggcgagggagaaattccagcaatgcttgtcgtgcaactgccgccacctgaggtagcgggtgaggatgagagcaatagccgtggtgtcttcgtggagttcatgaccaaggtcgctcagttcaatgagcttgttgaatctggggagcgattgcttgggagatttcgtgaggagcttgagtattttcgtaggccgcagatttctaaggaagcagatgtaatgaatcagatacttaaatcaaactgcactgtcagaatgaggtcctatattgaaactggctgcagggtccactgccaaaacatctcaaacattaatcagctgagctcatgcgaaaatggacttaaagatcatataaagaaagaccttgcttgaagagcttgaatgtctggttgagaatgtctatggcatcacactaacagccagtttaagtgctctggaagtttcagacagtcagtgccttgacagcatgctaagtaccgatcgctgctccgtggagcaggaggacagaagtgcagatcggttggacagggatgtgtcgtttgctacagtaatggtcatggttcgcaacgcgctgaaggctgactacacgatgcaggtaaattgaagtgccaggatgtgcatttgctttttgcgctttacattttgcctttctcttatcttgcctacaggaaaagattgtctgtgcattgtccttgaaaacaccatcatcagagctcgagggatactgcctcatgtggaatttacgcccgtacatcgatgacgatgtgatgcgtcttgcgtggaaaatgtgtccttagtaggcgcaaggttcgtcattctagcaacaagtaccagaagccggtacggattaaagccaagcttgtttaagctgtttgtcttcaaaaactcacagcagttcacgattacccaaaacattgtttgtattgtacatttcactgtttgcatatgtatacactatattaaagccccctcaaattttcttagatcaaac

SEQ ID NO: 220205 - DNA, 1460 bp, Zea Mays
gcctgacctccgaaccgactaccgagtgctgtgctgaccatcgccgcccgaagcacggacgagttccatccgagccctcgtcgaagcgtcgatgcaaacttgagttattggtctggaccggattgagccaaggccattgcctcaatcggcccatcacgcggcctttcaggcactccctggcggcggcccctagccagcctctcgcgcgtgcgcagccggcaccctgtggctcactcagcagctgcgcgcggcaggccagcagtggtagtggacagcggcagcggctgtgctcggcggcccctgtgttgatgtgcgctgctcagctgctgtgcccagcggccgacacctctgcggctctcctttgctcgacgtcgagttcgtccctgatctggctcaacgatttactggtttttttgccgatgcttcatagttggcgagggagaaattccagcaatgcttgtcgtgcaactgccgccacctgaggtagcgggtgaggatgagagcaatagccgtggtgtcttcgtggagttcatgaccaaggtcgctcagttcaatgagcttgttgaatctggggagcgattgcttgggagatttcgtgaggagcttggttagtttttgttgacacgtctgatttgccatggaggttcagtttatattatccactgggaagccattttgtgatgagtattttcgtaggccgcagatttctaaggaagcagatgtaatgaatcagatacttaaatcaaactgcactgtcagaatgaggtcctatattgaaactggctgcagggtccactgccaaaacatctcaaacattaatcagctgagctcatgcgaaaatggacttaaagatcatataaagaaagaccttgcttgaagagcttgaatgtctggttgagaatgtctatggcatcacactaacagccagtttaagtgctctggaagtttcagacagtcagtgccttgacagcatgctaagtaccgatcgctgctccgtggagtgaaatggaaaatgggtgacagggtgtttgtacacagcaggaggacagaagtgcagatcggttggacagggatgtgtcgtttgctacagtaatggtcatggttcgcaacgcgctgaaggctgactacacgatgcaggaaaagattgtctgtgcattgtccttgaaaacaccatcatcagagctcgagggatactgcctcatgtggaatttacgcccgtacatcgatgacgatgtgatgcgtcttgcgtggaaaatgtgtccttagtaggcgcaaggttcgtcattctagcaacaagtaccagaagccggtacggattaaagccaagcttgtttaagctgtttgtcttcaaaaactcacagcagttcacgattacccaaaacattgtttgtattgtacatttcactgtttgcatatgtatacactatattaaagccccctcaaattttcttagatcaaac

SEQ ID NO: 220206 - DNA, 1350 bp, Zea Mays
gcctgacctccgaaccgactaccgagtgctgtgctgaccatcgccgcccgaagcacggacgagttccatccgagccctcgtcgaagcgtcgatgcaaacttgagttattggtctggaccggattgagccaaggccattgcctcaatcggcccatcacgcggcctttcaggcactccctggcggcggcccctagccagcctctcgcgcgtgcgcagccggcaccctgtggctcactcagcagctgcgcgcggcaggccagcagtggtagtggacagcggcagcggctgtgctcggcggcccctgtgttgatgtgcgctgctcagctgctgtgcccagcggccgacacctctgcggctctcctttgctcgacgtcgagttcgtccctgatctggctcaacgatttactggtttttttgccgatgcttcatagttggcgagggagaaattccagcaatgcttgtcgtgcaactgccgccacctgaggtagcgggtgaggatgagagcaatagccgtggtgtcttcgtggagttcatgaccaaggtcgctcagttcaatgagcttgttgaatctggggagcgattgcttgggagatttcgtgaggagcttgagtattttcgtaggccgcagatttctaaggaagcagatgtaatgaatcagatacttaaatcaaactgcactgtcagaatgaggtcctatattgaaactggctgcagggtccactgccaaaacatctcaaacattaatcatgagctcatgcgaaaatggacttaaagatcatataaagaaagttaagaccttgcttgaagagcttgaatgtctggttgagaatgtctatggcatcacactaacagccagtttaagtgctctggaagtttcagacagtcagtgccttgacagcatgctaagtaccgatcgctgctccgtggagcaggaggacagaagtgcagatcggttggacagggatgtgtcgtttgctacagtaatggtcatggttcgcaacgcgctgaaggctgactacacgatgcaggaaaagattgtctgtgcattgtccttgaaaacaccatcatcagagctcgagggatactgcctcatgtggaatttacgcccgtacatcgatgacgatgtgatgcgtcttgcgtggaaaatgtgtccttagtaggcgcaaggttcgtcattctagcaacaagtaccagaagccggtacggattaaagccaagcttgtttaagctgtttgtcttcaaaaactcacagcagttcacgattacccaaaacattgtttgtattgtacatttcactgtttgcatatgtatacactatattaaagccccctcaaattttcttagatcaaac

SEQ ID NO: 220207 - DNA, 1515 bp, Zea Mays
ctcacacatgtgcgcgggcacgggaaaagcacgagtctacttttccctttcgatatgcggccgaggagagcctctctggcgaatggcgagtggcgagcgattcgtctagactctagacaagcccggctgcgcatttcgatgcaaatacgtggaggatggagtaaaatactaagtaagtgagagagaggatagaggaaggagagggtcttttcttttcttgacccaaggtccaaggaggggatcaggggggagtgagcgagggggaggttttgccgccggcaatggagacgaatctccgggctcagagcccgctctgctcccggacccgccccgcactcgccgtgcgcccggacgctgccgccactggcctcacgctgtctgtcataaggcgcagccgatttacgagaggcgggctcgttcgatgcatggtgtcaagttcagattatcataagagtagtccgagaaggacgtcgacttctaagagcaagggtgtcccttccggagggtatgcttcaagacctactgctgaatccagcacgaagaagatagaacagagcagcgacgatgaaggtgattttagcagaaccaatgggtcactctatggtgaggcagcggagcaggcaagtactgcagaagagtcgtctcaggtttactcgacaggagacatttcaagcagcgcagaaaggggcgaagctgggaccgaagaagaggctgaccaaaatcaatcttcagcgttgttttctgtatctgtggatgatgactcaatcgacaggaaacttgatgagtaccgtggtaaaataagtgcactagcaagttcgaaacctaaatcttcatcacttgcaagtgttgctggacaaaacgaaccagttggcgggcaagaggaaccagtaactggttccaaggaacatgacagttcaattgttgatgcgcccataagaggctgaccaaaatcaatcttcagcgttgttttctgtatctgtggatgatgactcaatcgacaggaaacttgatgagtaccgtggtaaaataagtgcactagcaagttcgaaacctaaatcttcatcacttgcaagtgttgctggacaaaacgaaccagttggcgggcaagaggaaccagtaactggttccaaggaacatgacagttcaattgttgatgcgcccataagaggcaggccatttgctgaggctgttgtgggatataaggattttactgaatcagtagcaggaatggcagccagcaagaatgaggaagaacaacttgtctcgttagaagatgtggtggggataagtacagatgcagatatagaagcaccggttgaggatgatgttgatccagaagtgctactgaggaggcttcaagagcttgctgatgagaattatttgattgggaacaactgtttttctttccctgaagtagtgatggctgattcgatgattgatctttacttaaaccgcagcatgtcggccttagctagcgagtccaatgtttttgtaaaaggagcattcaatggttgg

SEQ ID NO: 220208 - DNA, 2021 bp, Zea Mays
gacaataatgtccttattttggagctcgcgccgcccgccgcccgccgccgcgcccgaacgcagccatcgattccccatttctttcccgcctcctcactcccgcctcttctactcccaaaatcccaaaaccctagctcgctaacgaccccaggcagacgcgccgtcctcccctcccccatggcgctcaagcagaaggacaccgacgccgccgccaccgccaccggtaccaagaagcgccgccgcgtcttcttctccgacaccgatgctggtgttgaggcaaatgagtgtatgaaagtgtttctagtatggaatccaggcgaggtgagctctgtagactgcactgctattcagccatttgacctaaaccatttttttggtgaagatggaaaaatatatggttacaaaaatcttaagataaatgtgtggataagtgcgaaatctttccatggatatgctgatgtttcatttgacgaaacatctgatggagggaaaggaataacagatctaaagcctgttcttcagaacatttttggagaaaacttggtagaaaaagaggaattcctgcatacattttcgaaggaatgtgaatatatcagaactgcagtgacaaatggtagtgccattaagcatgatggctcatatgaatcagatcctgcagttgagattgttcgagttgaactccaaggtgctgctgcatttctttattctcgtctggtacctcttgttcttcttctggttgaaggttccacgcctatagatattggagaacatggatgggaaatgcttctggtagtaaagaaggcaacacaagaggctggttcaaaatttgaactgctaggttttgcagctgtgcataacttctatcattatcctgagagtattcgcttacgaatcagccagatacttgtgttgccaccttatcagggtgaaggccatggtcttggtcttcttgaagcaatcaattatattgcacagtctgagaacatttacgatgttacaatagaaagcccttctgattacctgcagtatgtgcgatcatccattgactgcctccgtttgctcatgtttgatccgatcaaacctgcactcggtgctattgtcttgtctctgaaggagaccaacctgtcaaaaagggcccaaagtttgagaatggttccaccagctgacctgatggagactgtccgtcagaagctgaagataaacaagaaacagttcctccggtgctgggaaattctgatcttcctaagcctcgactctcaggatcataagagcatggacaacttcagggcctgcatatatgaccgcatgaagggggagatccttggcagtgcctctggaactaacaggaagcgtctgttgcagatgccaaccagtttcaataaggaggcatcttttgctgtgtattggacacaggagattgaggatgaggatgaacaaactgttgagcagcagccagaggatctcaagacgcaggagcaacagctcaatgagctcgtggacatccaaatcgaggagattgctggggtcgccaagaacgtcacttcacgttgcaaggataagatgacagagctggtggttcaatgaatctggggctagttgatcgaggtcgggactcgatgtcaacgagagcatggttgaactcatggagttcggatagattcaaggatggaaagctccatgcttgatggcggcacattgaacctcaagggcgcgcagcatggcagccaggcgccagggcctttcggtgctttttcgttcttcaaatccataggctatataaaacataatactccctctatttataaatatatgacaccgttaattttttcaaaaagatttgatcactcaccttaattttaaaaaataatgagctatcatttatttgaattttatattttaaataaatattttgaataaaataaagtttttgaaaaaagtcaacggtgtcatatatttgttggaggtgtatatagtctattgttggaggtttagaggagatcgtcctccattgatggcgtttg

SEQ ID NO: 220209 - DNA, 1868 bp, Zea Mays
gacaataatgtccttattttggagctcgcgccgcccgccgcccgccgccgcgcccgaacgcagccatcgattccccatttctttcccgcctcctcactcccgcctcttctactcccaaaatcccaaaaccctagctcgctaacgaccccaggcagacgcgccgtcctcccctcccccatggcgctcaagcagaaggacaccgacgccgccgccaccgccaccggtaccaagaagcgccgccgcgtcttcttctccgacaccgatgctggtgttgaggcaaatgagtgtatgaaagtgtttctagtatggaatccaggcgaggtgagctctgtagactgcactgctattcagccatttgacctaaaccatttttttggtgaagatggaaaaatatatggttacaaaaatcttaagataaatgtgtggataagtgcgaaatctttccatggatatgctgatgtttcatttgacgaaacatctgatggagggaaaggaataacagatctaaagcctgttcttcagaacatttttggagaaaacttggtagaaaaagaggaattcctgcatacattttcgaaggaatgtgaatatatcagaactgcagtgacaaatggtagtgccattaagcatgatggctcatatgaatcagatcctgcagttgagattgttcgagttgaactccaaggtgctgctgcatttctttattctcgtctggtacctcttgttcttcttctggttgaaggttccacgcctatagatattggagaacatggatgggaaatgcttctggtagtaaagaaggcaacacaagaggctggttcaaaatttgaactgctaggttttgcagctgtgcataacttctatcattatcctgagagtattcgcttacgaatcagccagatacttgtgttgccaccttatcagggtgaaggccatggtcttggtcttcttgaagcaatcaattatattgcacagtctgagaacatttacgatgttacaatagaaagcccttctgattacctgcagtatgtgcgatcatccattgactgcctccgtttgctcatgtttgatccgatcaaacctgcactcggtgctattgtcttgtctctgaaggagaccaacctgtcaaaaagggcccaaagtttgagaatggttccaccagctgacctgatggagactgtccgtcagaagctgaagataaacaagaaacagttcctccggtgctgggaaattctgatcttcctaagcctcgactctcaggatcataagagcatggacaacttcagggcctgcatatatgaccgcatgaagggggagatccttggcagtgcctctggaactaacaggaagcgtctgttgcagatgccaaccagtttcaataaggaggcatcttttgctgtgtattggacacaggagattgaggatgaggatgaacaaactgttgagcagcagccagaggatctcaagacgcaggagcaacagctcaatgagctcgtggacatccaaatcgaggagattgctggggtcgccaagaacgtcacttcacgttgcaaggataagatgacagagctggtggttcaatgaatctgggtgaggttcctacttcaaacgatgttaaaatgctgtcgtagcttatctggtgaggtctcttttatgggttggcttcttggtagaaagggaatgtttggttattgcactgtcatcgtagtgttagaaccaacacaagcataggcactgagtagattgtcacggcagattattatgtacttcaattctggaatatttgatgggaatgctattttagattgcttggtaaaaaaaacaacgctatttgttacaatgtaatgattaaccgattttgtttggat

SEQ ID NO: 220210 - DNA, 942 bp, Zea Mays
atgacatctcaccagacggactatcaatccatctaaaaatatataggagtgcaacggtgcgcggaggacaaggcggtgctgatcaccacgtacgagggcacccacagccaccagctgccgccgcaggccgccgcgatggccaagaccacctcagccgcggccgccatgctcctctccggcccggccgtcagccgcgacgcgggcgcgctcttcgccggccaccacgtcgcggcgccgctcttcgcccagtaccacccctacgcgtcggccgccacgctctccgcctccgcgccgttcccgacgatcaccctcgacctcacgcactcgccgccgccgccggccgcgggcctgctccagcaccgtctgcccacgccgcccgtcccggccatgccgttcccgatgccgtacggcttccctggtgctggtgggcacaggctggcggcggcgccggtgccagccccacacccaccggccggcgcgacgctgctgggtttggacggaaggaaccggtcggcactggacaccatgacggccgcgatcgccagcgaccccaactttaccacggcgctggcggccgcgctctcgacgatcatggccggagccggaggcgctgagccacaagctcctcacctaagcggcgccgctgacgcctccggagatggtggtaacggtagcgccggcactgggcccgccacggctgcggctgccggagcacgtgagactgcattgcatgcgcttttgcaaaggcttaatgacagcaggcaatgacattggaaccaaagctctcatgcaccgccatctgtgcataaatccgtatacacacatcggctttaatttgtacgcttaatgtataccatagagccctcttatatacttactacgttgtagagagttgtaaatggattataattgagcttttataaaggcaatttgaattttcac

SEQ ID NO: 220211 - DNA, 2011 bp, Zea Mays
cggccgcttcttcattcggtttttcttctttctgcagtactagtagtagcttgcatagttggacatctctctctctctctctctctctctctctagctagtacggcaccggtcgtcacaagctgtatatagccgtgtcttcctcgccattacccggcttgatttgatacctcctcgctccagcctacccatccatggacttggtgccgaaacaccagcagcagcagcagcagcgagggatcaaggaggaagaggagatgacggtctttgcggagcacggggaccagcaggcgacttccggggccggccacggcggcggcggcgggcgcaggagcgagatcaaggaggtggacttcttctcggccgccgccggcggtgccgtgtctcgccgcatcaccgacgaggacgacggcggggaagatggcggtcgagagcccgcaggagcagtagctcgtggctgccgtaacaccacggtcaacactgcactggacctgctgaccaggccggcagcgggcgacggcggcgaggggacggcggccagtggtcgtgacgacgatacagagatggacgtggcggcggtggagggggagctgcggcaggccggcgaggagaaccggcagctgcggcggatgctggaggagctgacccggagctacggcgcgctctaccaccagctcatccaagcccaggcggcccagcaccaccaccaccaggccagcggcgcagcgaagccgatgctaccgacgtcgggagtgcagttcatggaccccgccggccgcgtccctccgcctccggctccggcgatggcagcaggagcggcgttcagcggtgaacgggggggcgactcagaaggtggaagcggaagcggcggcgaagcgggcccgaacgatgggacggggacgcctgagcgcggcgagaacgccgataaccgggcgccggcgccggcggaggcgcctctgcggagggcaagggtgtccgtgcgcgcacggtccgaggccccaatgatcagcgatggatgccagtggaggaagtatgggcagaagatggccaagggtaacccatgccccagagcttactatcgctgcacaatggccacaggatgcccagtcagaaaacaggtgcaacggtgcgcggaggacaaggcggtgctgatcaccacgtacgagggcacccacagccaccagctgccgccgcaggccgccgcgatggccaagaccacctcagccgcggccgccatgctcctctccggcccggccgtcagccgcgacgcgggcgcgctcttcgccggccaccacgtcgcggcgccgctcttcgcccagtaccacccctacgcgtcggccgccacgctctccgcctccgcgccgttcccgacgatcaccctcgacctcacgcactcgccgccgccgccggccgcgggcctgctccagcaccgtctgcccacgccgcccgtcccggccatgccgttcccgatgccgtacggcttccctggtgctggtgggcacaggctggcggcggcgccggtgccagccccacacccaccggccggcgcgacgctgctgggtttggacggaaggaaccggtcggcactggacaccatgacggccgcgatcgccagcgaccccaactttaccacggcgctggcggccgcgctctcgacgatcatggccggagccggaggcgctgagccacaagctcctcacctaagcggcgccgctgacgcctccggagatggtggtaacggtagcgccggcactgggcccgccacggctgcggctgccggagcacgtgagactgcattgcatgcgcttttgcaaaggcttaatgacagcaggcaatgacattggaaccaaagctctcatgcaccgccatctgtgcataaatccgtatacacacatcggctttaatttgtacgcttaatgtataccatagagccctcttatatacttactacgttgtagagagttgtaaatggattataattgagcttttataaaggcaatttgaattttcac

SEQ ID NO: 220212 - DNA, 3890 bp, Zea Mays
cacacacctccctgacccggctgcgaatgtcgtcgcacgaggccgcgccaccgctccgtcccggctccgagccgccgcgccacccctcgccacctccccgagtcccacagccgcgacgcgcgtgtccccgtcgtgccaccactgcctccccatcgctgcctccccgaacccccgcagccacgacgcatgccgtcgtcatcgaacgaggccgaagccccaccacaccaccactccctccccctcgccgcctccccgaccggtcgcatccctgcagctcagaggctaccggtagacggagagaaccctgctcccttgcctaggattcccaaaaccctagcctcgacccgtatacacgaggacccccgacaatgaggaggctgctgcgacagctgcgccacgttcatggtcgacaaggtcatcgcgctcaccgcctcgagcacccccgacgacgaggaggctgctgcgacggccgcgccacgttcctggtcggcaaggtcatcgccctctaatacctcatgcgccattgttgcatcgtctatcccaaggttatctcagaggaccagccaagaacaaaaggagttgaacagatggaaaaaccatttcacaggattgaaagcatgttctttaccaaaacttgatttgagcacacacaaaataaataatgctaactaaactaaactcatttgccccgcatagtttcagttatacagaatacaactaagatcctataatataatccagttacagaggaggcaaaaagcagttttgtgttaacatttatgttgcttttaccactagcctactatactcgctcccaaaaagggaagcgtattttatagagcgaaaagccaaaccttacagactttgttcaacaattaatcaaattatataggagtttaggacatgtagaagcctcgagcaatgtctctgcccggtgcccagatagcaaaatgattgtggtgtttactgagacaccataggccagtaaaaaaatcgctggtgcatgaggatttgcaccactgcaataggttggtatgccgcacagccacaaccacacaggcatacagtcaagactatggttgttccaattataatcaagataaagtgaaaatgcagcatgttcctaatgcactgtatttgtcccattagcccaacaatatgtcacgtcccctctgaactatgaaggctatggtttaccagctgaatgttctgattagcttaaccgttgtagcatggagacttgcaaacataattagggacactattcttcgagtgcctctgttaattacagtgaggaattccctattgttttttctcagatgttttgtcgatactcgggattgagttgtgtgcctaggattccatgttttttgatttgagctttacttcccagttatacttctcattctttgggttttgtacctaatgacctgtatcgaaacatctatggttactaaattgttcttaatcagatcaggtataaacttgtcatcgtggctggggacaaaacgggtgaaactgagtttgttatgtttggccggataacacagcatgtcagcatctcgtgcggaaaacggctgcagtggtgtatgccctgtcaatagaatcagcggtgtattccctacaaaatctgacaatagcatcgacggtgtatgccctatcaccggcaaggatcatggtagcaacctcaaggaaagtcgtgatcatggtgaagaaaagggcaagggtccttgtgtggtaccagcaaaatgcccatttggttatgactccaacacttccaagctaggtctgcttagcttcactgtctgccagacactgctccatgaaagtagaaaatcgcatgtatatcatgctttaaagacagtccactatgtggtgccgatatagaattcaagctcttgttcaccgattcattgatggtcatgccagaatcaagcgatcacatgctacaggggatgtggaagcagcaggatttttgtgtctaaaacattggaagtgcaaagtcaaggctcactatgtatgtagacgatatcaaggagttaaaatgttcagaagatagacctatgttcacaacttggagctgtgttaggaatgcttggggattgttggacacatttatttggcatgaggcaaacataccatatgcagtatgggaagttaccagcactcacgataattaacatactatccttcagtgctatgctcgagttaccctgtggacctaacagatcctgagtatgatcacaagtctatatttgggaggacacattctgttgtggcattcttgccaaatttaaaagctggtaaaaagaagagcttgctaggagattcaaaagagcctgaagaccaagcaccacataaggtactggctttcagggacataaacactcaagctccaacacacatcctcatcatccccaaagtcaaggatggactaactggtctgtcaaaggaaaggatgacattaaaccacaagaatacatcacaatggccaaagcacatccttaagcgtggattgtctattcaagatgaaggcactcgagctgctattgcaacacaactccaacaaaatactcttgtttatttcttcatctaggtctacgacggatccatcctgctggacaatcgctcaagcatcgtgtcagagatgttcgccacacccaacaacaactcgatgtgcgggtaccccgtagtcgatgccgtcaaggcggtgctggaggaggtttgcctaggcatcgtctcatacgttgacatactggagctgagaaagggacaaaacaaagaacgaacttcaaatcaaagctaaagaagcggatattcaaaatcttaaaaagccaccacgtggccgctcctcatcctggtgctcctcaactgcatcaagagggcatcttggggaagaagcatggtgccaccaagagcgttgtcgttcggatgtttcgcgttgttgaccagtgtgtagaggatctcaagctatcagacacagttaatgcttaatccttagagctgcatataaccaagtggtgcttacctggatttgaggacctatgatgcttgtttatctcaagagtaatgtaggccagcgagtgctcgggcagatagaagagagagagagagagagagaggagatgcagcggctcacggggcgggacatgtgggacgtggaggagtgccagagcccgcgcatgggcagcgtcatcctcggcgtcggcggcaccagcaacaccgtctgcgtctgcatccccgccgccatgcccttcaacgaccccctccccgtcctctcccgcaccgtcgccggctactccaaccacaactccgtcggagggacatatttccaagccatgtcaagctgttcgtggagaacgacgcggtggcggcgctggccagtggaaccatgggcaagctgcacggatgtgtgctgatcgcagggacagggaccatagcgtatgggttcaccagtgatggtagggaagctcgagcagcaggtgcagggccagttctgggtgactgggccagttaacgaagtggagcacctgaactagcagtcacgtctgcaatatacacaccagcaaaacactcctgtaacactaaacagttcatgcatatccttgactgaagacgatgttgcaaaggtttcagacatcagctttggcgttgacaagaaacaagatgacgagtacaatgctcctgatgagtacaacgcagtgtataaaattgctttgtactacaacgcagtgtataagtttgctttgtactgcttgagaccatctctggaaggcgttcatattttgacgatgatgtgctcctatattttcctttctgaataccaaattctttaatatgtcctcttgtgtggaatcaagttcctaatttagctagagcaatacttgaaa

SEQ ID NO: 220213 - DNA, 4195 bp, Zea Mays
gccaaggagtccggcggaaggccgccggtgtgcgaaacagcgtcagcgtcgagaggagaaaaagtcaccgcgagtccaggatccatgctgaggcacttggtccggacgggccagctcgccgacgcgaggagcctattcgacgcgatgccgcgccgcgacgaggtcgcctacgcgactcttctctcgggctatgccgcggcagctgacttcccgggcgctatggcgctcttctcccgcttccgcgcctcctcctcccagccacacgacgccgcggatccgttcatcctcagccccgtcctcaaggcgtgcgcttccgctgccgccagcgcagggctcctccccctccctcacgccgccgcggcggccgctctgcacgcgttcgccgtccgctcctcctccctgccgtccgtgttcgtctccacggcgctcgcggacgcctacgccaaggccggccgcctcgacctggcgctgcaggtgctcgacgaaatgcccagcaggaacgtggtctcgtggaccacgctcgtcgcctcgctggcgcgtgctggccggcggcacgacgcgctccgccgcttcgccgagatgcgggcctccggcgtggcctgcgactcccacgcctgctcggcggctctcacggcgtgcgccgacgcggggctgctgccacgcggccgcgaggtgcacgcgctctgcgccaagctcggcctcgacgccgtgcccttcgtcgccaacgcgctcgcggcgctgtacgcgcggtgcggcgatgtcgaccgcgcgctggccgcggtcggccgcatgggctcgcacgacgttgccgtgtgcacaacgctgatcgcatcctacgtccagaccggccgcacggaggaagccatcgaggcgtttgtgagaatgcttcgcgatgagtcgtcaaattctgcttcaccaaatgagtatacgttctctgccgtaattgccgcgtgtccaaatatggatcgtgcatatcttggagagcagttacatgcacaagctgcacggagagggctatctcatgcccgctctgtggccaattcccttgtcaaactctattcccgccgtggccatctttcagctgctgatgctatcttccgggagagtgtcgtcaaggatgttgtctcctggagcacaattatatcaggatacacacaagaaggcctcgccgaggagtcttttgccttgttctcagaaatgcggcatcacagtagctgccctcggccgaatgagtttactcttgccagtctcttcagtgtgtgtgcaagtgctgcgtcgctggatactggacgccagctgcatgcactcgctgttgctgctgggcttgaacaccatgcaatggtcaggagtgcgcttgttaacatgtatggaaagggtggtagcatgtcagatgctaatgtcgtattttccaatcgcactaaagatgatgtgatttcatggactgcgatgatcgttgggcatgctgagcatggtcacagcaaagaggcttttgaactgtttgaggaaatgtgccgtatcgggctaaagccagaccatgttacgttcattggtgtactcactgcttgctctcacgcgggggaacttgagctcggattgagatacctcaatgcaatgaacaaaagctatgggctggagcctgaaaaggagcactacggttgtgttgttgatttgttagccagagctggtagaatacatgaggctgaggagttgattggaagaattgctgctgaggaaagagatggtgtggtttggacatccttgcttagggcatgtgctgctcgaggggcagaggaaactggaaagatagctgcagagaggatgatggaggcagagccatggggttcaggagcacatgtggtgatggccaacctctatgcaagcaaggggctgtggtgtgaggcagcacaggaacgccatttgatgaagcagaaaggtgttctaaaaggtgcagggtggtcatcagtcgaagttggaggggacgacaggggggttggagtgtttgtttcaggagatcggacaaatccccaagacagtgccatctacatgatgcttgagctgatgtactatggagccggaatggttcgacaaatccctgatcagttggatttaggatctgaaggggagctaacagtttactaagtcatcctgaaagaagcactgactaaatagagaaatttacatggtaccttgtcaatgatggaacatccatcggaggacaacataaggatacacattgtatcctgctcttcagttgcttcaacttcaagctataatacctgtccatttattgtatctattgttttttgtgggtggctttgccctattctaaatgcaccaactgttttttatttagctatttgatattttccctgctggacataaatcactacatttatggctgatgtatttctactaaatggaacatagtgtagcagctctagaacatggaaaaccttaaatgcttgtttatgattaatctaactctttttttattcatggctgttcagatacttcatgaagtgagaataaagcgggatagcaaaagggaggcttcgtgcttggtgcgagttgtctcactgggtcaccaggtcgcatgttcgaagcagtctcttcgcatttgtggggggaaggcttgcctcggtttacccccttccccagaccccactcatgtgggagactccggccctgggtctgccccttttcgctgcgatctgtattgtgccattcttgccagccatgggcgattcagtcatttccagtacaccaaatcttatagtcaaggaatgcaacaaaactgttttcatatcagaaatggtgttgaaaaagacgcaaaatttggaagagggcaatgcagaaagtttggcaatttttgaacatttttctgattctggtaatgatatgcaatctgaatatactgaagttgtcgctcattaggatgatgcctcgttagaaaaaaacagatgactttcatcataaggccttattctgagcatagccaacataaatcaaaatgggcataatttttcttacatgtatttctgcatgtggttgttcaacttatatggttcttaagaccctaacactgagtaaataagtcggaagtgcttatttgttcaacttatgtaagtgtttgttcagtttgaggatacgggcagtgtctggctattggctaaagccagaccatgttacattcattagtgtactcaccgcgtactcacacacgcaggggaagttgagatcaaactaagatacctcaatgcaacgaacaaaagctgcaggttggagcctaaaaatgagtactacagttgtgttgttgatttgttgggcagaaatgttaagttttccggtgcttctaggcccatcagtcactaaaccaatagaatctaagcagaccttccttcttgcaactggtatttgctgagctgaaatggtccgccatatccatgatcagttggatttagaatctgaagtggagctaaacagctaactgagtaatctcggaaggagcacttactgcaagggagaaatttacatgaggccttgccatcggaggacaatataaggtcttcataagatatctgcaaatcattcagaaatctagggtgcgctgatgacttccagtccaatcaagtattctaaaaaagaattatgtcccaaacaaactacaatacctgtggccagtacaggctaaatcgtgctcaagttagtatctgcatcagatttgtattttagtctaccaaactgatataaccttggtagttggtacattgctcaagtgacttggagcagagcagaatgtgaatatctgcctgatgatcccttttacagcaaaagcatgccagagtgtgtgtgtcgtattcattcgttttccagaagggagcccggccaccatatggaaggaaattcactcttcatagtcacaacagcatcagtgtattccgtgttgcacgtactgctctttaaatctgtacactgctagtaaaatatttcttgactgacttgctggatattcttgtgcagcctggtgatgttttctaatgttacagtaatagagttaattttcatcccttatgccaactgatcacatgttactttacagcattgacgatagagtgatgtaaaggttaatggtgtcgattctttgtacagccttttttttacttttttttgtctctgttgagatgccaagttttgg

SEQ ID NO: 220214 - DNA, 2940 bp, Zea Mays
agggttgcttccgccaccactcctacataccggtccctgtccctgtcgacccctcgaggcggatcccacgatggtgaagttctcgcgggagtacgaggccagcatcatccccgagtggaaggccgccttcgtcgactacaagggcctcaagaagctcgtcaagaggatcaagatcgcccgccgcgaccgcgctgcccgtagtaccagcaacgaccacgacgacgccaccaccaccacctatggcttctccgtcctcgaccccgtccgcgccctcgcctcccacttcaacaacgccacgcccccggcctcgccagagggcggcagcgacgacgccttgaggagcttggaatcggattcaggggagctcgtgagagccacggacaagcatgagcaagagtttgtggagagggcggacgaggagctggagaaggtgaacaagttctacgcggcgcaggaggcggacatgctggcgcgcggcgacgcgctcatcgagcagctccgcatcctggcggacgtcaagcggatcctcgccgaccacgcggcggcgtcgtcccggcgcggccgcgcgcggctcgcccggaccggcgggaactcgtcgccgccgtccgtggacggctccaacagcggccggcacctcctctcttctcccttcgtggcctcgtcgccgcagtccatgtcagacgggagcgtgcagctgcagcaggcgcgcgtggcggagggcgcggctgtggcggaggaggtgatggcggcgctggagcgcaacggcgtgagcttcgtgggcggcgggctgggcaaggccaagaaggacggcagcgggaagcagctcatgggggcgcgccgcgctgctgcagctgccggccacggtgcgcatcgacatcccgcccaccagccccggccgggccgcgctcaaggtgtgggaggagctcgtcaacgtgctccgcaaggacggcgccgaccccgccgccgccttcgtccaccgcaagaaggtccagcacgccgagaagagcatccgcgacgccttcctcgccctctaccgcggcctcgacctcctcaagaagttcagctccctcaacgtgaaggctttcaccaaaatactgaagaaattcgtcaaggtgtcggagcagcatcggaaaggagacctgttttcagagaaggtgaagaggtcgccgttcagcagctctgacaaggtgcttcagctggcggacgaggtggagtgcatcttcttgaggcatttcgcgggcaacgacaggaaggtggccatgaagtacctcaagccgcagcagcccaggaacacccacatggtcaccttcctcgtaggcctgttcacaggcacatttgtgtccctgttcatcatatactcggtcctagcccatgtcgccggcattttctcttcgaccggaaacacagcctacatggagatcgtttaccatgtcctcagcatgtttgcgctcatcagcctgcacgtcttcctgtacgggtgcaacctctccatgtggaagggcaccaggatcaaccacaacttcatcttcgacttctccagcaccgccctgacgcaccgggacgccttcctcatgtcggcgtccatcatgtgcaccgtcgtcgcggcgctggtcgtcaacctgttcctcaggaacgccggggcgacctacgccaacgcgctgcccggggcacttctgctgctgtcagcaggggttctgttctgcccattcaacattttctaccgctccacgcgcttctgcttcatgcgcgtcatgcgcaacatcgtgctgtcgccattctacaaggttctgatggcggatttcttcatggctgaccagctaaccagccagatcccactgctaagacacctcgagttcacggggtgctacttcatggctgaaacattcagaactcacgcgtatggaagctgtaccagcagctcccaatacaagaacctggcatacgtgctctcttttcctgccatactactggcgagcgatgcaggtacctggaagaaggccacgacatgaaccagcttgctaacgccggcaagtacgtatcagcgatggtggcagctgcggttaggttcaagtacgccgcgacgcctacgccgttctggatgtggatggtcattgcatcatctaccggcgccaccatctaccagctctactgggatttcgtcatggactggggcttcctgaacccaaaatccaagaacttttggctccgggatcagctcatcctcaagaacaagtcgatctactatgcttccatgatgctcaacctcgtgctgcgcctagcctgggccgagagcgtgatgaaactccgtctcggtatggtggagtctcgcctgctggatttctcgctcgcttcgctggaaatcatccgacgagggcactggaacttctacaggctggagaatgagcacttgaacaacgctggaaagttcagagcagtgaagactgtcccattaccgttccgtgagcttgaaactgactgatgaagacggagctccatgttgaacagcaggaatttagggggaagaattccaggaatggatacactgtcccctgcaagaactggtgtttaagtggtaataaaacgaatcggagagcgtaactgcacaagaccgagacgctgcagattttaggatggaataagctcaggcgggtgcgccagggtataacatgaggcgttctggtcaggagagatgatgtgcatttaactagctagtggtcgattgagaattgttgcatgtcaatcgactaacaagatcttaattttgtcgatcgtttaagttgtgaaaatgtatctgggaattggtgactgaaaaaaattgcatggaacgaaacatatggtcgttaactaatttatcattccaggggtaagaactagataacatctgctagcaagtactacagtgaaagcaagatgcttgacacggcagatggcatcacatgt

SEQ ID NO: 220215 - DNA, 3489 bp, Zea Mays
atgccatccgagctcagcacttccaatagccgtgtctcattctcatcaaatccacgatgcgagtggcagcgcgcgagcgcccattcccgttcctcctcgcccatcggcttctcgcggtctcgccccggcacctcgcactcccaccgcagtccaaaatcctcggcctcacaccctatgcctccgcctgttcttcgcctgttcgcggcagctccgccccgcgctctcggtggccgcgccagggcgcatcgtggcgatggcgggttcgcgcgcctgcgcctgcgcgtcagagcagcggctggggaggccgcgccggcgccttccagaacccagatgataatggataagatctctgctggcgaaggagtcggaggcgctggaggggcttactcatatagtgcgttgaaaagattggatcaaatatggtctagtatttgtgaagctcaagcagattccaaagtccctgaagttgttactcgggttgaagggctgttggctgattctgatcttggttctggttcagagatatttgatgtaattgtatgtggcggcacattaggtatatttgtagctactgctctcagttctaaaggccttcggattggaattatcgaaagaaacataatcaaagggagggaacaggagtggaatatttcaagaaaggagcttatggaaattgtagagattggtattctttcagaagcagaacttgaacaaataatttcaagtgatttcaatcctaatagatgtggatttgaagataaaggtgaaatttgggtggagaacattcttaatcttggtgtttcgcctgctaaacttgttgagaacatgaaagaacgcttcatttcttcgggaggagcaatatttgaggagaaaagtctatcaagcatttatgtctatgatgatctcgctgtactgaaacttagtgatggtgattctttgtcttgccgacttgttgttgatgctatgggaaatttttctccaatagtacggcagatccggtctggtagaaaaccagatggaatgtgccttgttgttggtgcttgcgctcatggattcgaaaaaaatacaacaagtgatattattttcagtagctcatcagtgaaaagagctgggaattcaggagtacagctcttttgggaggcttttcctgctggttctggtcccaatgaccgtactacatacatgttcacttatgttgatccaacatttggaggcccaaagctagaagaacttttggaagtgttttgggatcttatgcctgcttaccagttcttcacaacagtgggccctgttggctttgattttacaacaaaagtctgatgcgtccatggaagttcccttgtctattttataggatgtgcttcttcaaaatttggatataagaagagttatatttggaattttcccaacttatcgggatagccccttgccagctgcatttgaccgtatcttacaggttggcgatgctagtggaatacagtcacctgtttcttttggaggttttggaagcttgacgagacatcttggccgtttgtctagtggtttgtctgttgaattatccttttcttaatatataactgtttgattatcaaaaaaaaggaatatgtttgatctaatattaagaaaacagagcaaagagtgctgcagccaccggggccagtgccaatacagaaacggaatgcccgtgtagccacctatgtgtccagaaaaagttatttgcaccatcaaccacagaagcagcaaagagtgctgcagcattagggcatatacaacctcatttaatatgaagtctcttgaggggtctttagggggttagataaaaaaatacaaaagacgggctcttcacgaatattgtttatattgtctcttaactgcatttatagtctagaggcttgtatcacagagtcttttaagtgtctcttatacttagaaaaccgaaccagagtctcaaagttgtacatgccaggttgtacatgcccttagagtgaacaagtgactgcaggtccttctaagggccgtcattcctggccttccttaaccagagccacctcatgttcagcgagacagcgaccaacccaaagcttctaaattatggattccaagaccgccttggttgagtgacctgcagactctttcccaaccaacaagacaatgccctccttgtacgtttattcgacctttctagaggaacctcttctaattttatcaatgactttaaaaactcattcagagcagcgcaaatacggagaggctactttgaacccgttacctgactcagtgagacaactcttaccagtgcaccagacctgcccttctgcagtatcactttattgatgatgaattttggatagctctacatgtgctggtttcttatcatttgatttcacatacttcttttttttattttggggttaaggtatatgtgaagcagttgaaggtgatttcctggatgctcatagtttgcagctgctcaacccttacatgccaaacttaagtgcatcatggttgttccaacgagcgatgtcagtaaggccacatgtcaatgtttcaccaacctttatcaatgagcttctctttgctaattttcagtcaatgcagaaactaggggattcggtacttcggccatttctacaggatgtaatacagtttggacctcttgtgaaaactttggggctagtaatgatcactagaccacaaattttaccttccatatttaagcaggttggactgggagtcatccttgagtggtcaggccattttatgatgcttggttactacacattcctttctacctatattgatccgatcctgaggtcttgggtggaatccttgcccccacgggacaaatatcagtggaaacggtacctggaagcttggagatatggagccggtttagattaccgccaaggggaataaactgtttcactaaaaacacatgaaagtttcctcagaaacaaaattatgtatagatacatgaatatagcactgtcaggggaaagatgaatagagtacatatatgatctctgattgatttagttttccttttccagagcacaagattgaacatcaagtttagaatgtgtattatctagtttcacttgtaatttgcccactttactgaactgatggagtgaatatgtatagtactctagaatttcaaataatgctgaatggagctgagatgctcaatatttgttgatcaatgtatcaattatgtgaaataaaagtaaatgtccggtttcattcagattgcaagtgtaacaacaaaataaacagccatttacacatgttggtaaagagaattttgtgatttactttaccataagataattactaatgtaaataatagatgcctggaagttgtgaaatggtctatttagagccagttagagaaagatgtcagtgcagcaataaaccgacgctgtaagaagtgttgttatgtctcataatattccgttatcaggtccataggatgataggaggaccact

SEQ ID NO: 220216 - DNA, 2095 bp, Zea Mays
ctctgaaaatcctgattccaaagtccctgaagttgttactcgggttgaagggctgttggctgattctgatcttggttctggttcagagatatttgatgtaattgtatgtggcggcacattaggtatatttgtagctactgctctcagttctaaaggccttcggattggaattatcgaaagaaacataatcaaagggagggaacaggagtggaatatttcaagaaaggagcttatggaaattgtagagattggtattctttcagaagcagaacttgaacaaataatttcaagtgatttcaatcctaatagatgtggatttgaagataaaggtgaaatttgggtggagaacattcttaatcttggtgtttcgcctgctaaacttgttgagaacatgaaagaacgcttcatttcttcgggaggagcaatatttgaggagaaaagtctatcaagcatttatgtctatgatgatctcgctgtactgaaacttagtgatggtgattctttgtcttgccgacttgttgttgatgctatgggaaatttttctccaatagtacggcagatccggtctggtagaaaaccagatggaatgtgccttgttgttggtgcttgcgctcatggattcgaaaaaaatacaacaagtgatattattttcagtagctcatcagtgaaaagagctgggaattcaggagtacagctcttttgggaggcttttcctgctggttctggtcccaatgaccgtactacatacatgttcacttatgttgatccaacatttggaggcccaaagctagaagaacttttggaagtgttttgggatcttatgcctgcttaccaggatgtgcttcttcaaaatttggatataagaagagttatatttggaattttcccaacttatcgggatagccccttgccagctgcatttgaccgtatcttacaggttggcgatgctagtggaatacagtcacctgtttcttttggaggttttggaagcttgacgagacatcttggccgtttgtctagtggtatatgtgaagcagttgaaggtgatttcctggatgctcatagtttgcagctgctcaacccttacatgccaaacttaagtgcatcatggttgttccaacgagcgatgtcagtaaggccacatgtcaatgtttcaccaacctttatcaatgagcttctctttgctaattttcagtcaatgcagaaactaggggattcggtacttcggccatttctacaggatgtaatacagtttggacctcttgtgaaaactttggggctagtaatgatcactagaccacaaattttaccttccatatttaagcaggttggactgggagtcatccttgagtggtcaggccattttatgatgcttggttactacacattcctttctacctatattgatccgatcctgaggtcttgggtggaatccttgcccccacgggacaaatatcagtggaaacggtacctggaagcttggagatatggagccggtttagattaccgccaaggggaataaactgtttcactaaaaacacatgaaagtttcctcagaaacaaaattatgtatagatacatgaatatagcactgtcaggggaaagatgaatagagtacatatatgatctctgattgatttagttttccttttccagagcacaagattgaacatcaagtttagaatgtgtattatctagtttcacttgtaatttgcccactttactgaactgatggagtgaatatgtatagtactctagaatttcaaataatgctgaatggagctgagatgctcaatatttgttgatcaatgtatcaattatgtgaaataaaagtaaatgtccggtttcattcagattgcaagtgtaacaacaaaataaacagccatttacacatgttggtaaagagaattttgtgatttactttaccataagataattactaatgtaaataatagatgcctggaagttgtgaaatggtctatttagagccagttagagaaagatgtcagtgcagcaataaaccgacgctgtaagaagtgttgttatgtctcataatattccgttatcaggtccataggatgataggaggaccact

SEQ ID NO: 220217 - DNA, 781 bp, Zea Mays
ctgcttggacattgttggactgggagtcatccttgagtggtcaggccattttatgatgcttggttactacacattcctttctacctatattgatccgatcctgaggtcttgggtggaatccttgcccccacgggacaaatatcagtggaaacggtacctggaagcttggagatatggagccggtttagattaccgccaaggggaataaactgtttcactaaaaacacatgaaagtttcctcagaaacaaaattatgtatagatacatgaatatagcactgtcaggggaaagatgaatagagtacatatatgatctctgattgatttagttttccttttccagagcacaagattgaacatcaagtttagaatgtgtattatctagtttcacttgtaatttgcccactttactgaactgatggagtgaatatgtatagtactctagaatttcaaataatgctgaatggagctgagatgctcaatatttgttgatcaatgtatcaattatgtgaaataaaagtaaatgtccggtttcattcagattgcaagtgtaacaacaaaataaacagccatttacacatgttggtaaagagaattttgtgatttactttaccataagataattactaatgtaaataatagatgcctggaagttgtgaaatggtctatttagagccagttagagaaagatgtcagtgcagcaataaaccgacgctgtaagaagtgttgttatgtctcataatattccgttatcaggtccataggatgataggaggaccact

SEQ ID NO: 220218 - DNA, 1122 bp, Zea Mays
gtttcactgacatgtagcctccagccctgacccgcaacccatgggtccagatgtcatacatcaaaatcgctttctgctgtgtcgaaggatacctcgccgcttcgtcttccccgtcccctttcgcctttcccctcctatcgacaccaccatgtccaccaccaccgccactccgccacagttcgaatattcctagcttgagattgcaagaggtctccaagaggagggtaggggagccgagcgctcagctctaattttctccatctattgctaacagctcagacctcaggcaagggaggtacaatgccaagagcaaatgagatgttgagggcagattcaagaatgatggtggtctttggtgccttgtcatcgaaaccagagcaactgacatttgaagaatccctcatatttgtcaagaaagttaaagcccgtgactacatgctgtacctgtcattattcgacgttctcggcagaacggaattaccccagctcgacgcctaccgagaggtacgttacagcagatgtttcaaaaccacccagatctgcgcgaagagctcgagaggttcagaccgccgccgccgccgccggtgcctacctcaaagcaggcagcaaacaacaacatctggccctgggtcatcgtgtgcgctgctgtcccgttggtcgcagccagcctgctcccgtcactttgaaacccagtgctgtggcttgctcaacaccctgttggccaaaaaatggccgtctgatcgaagaaccgctgcatgcagtacatacattacatgtgcagtggaccgaaccggcctcctgttgctattcgtgccatcacaactgaatcacagtattgtctgtgtatatatattagagtagtgttctggaagggaacctgcgttcttggtcatcaggtaccactgggcaagaaatgtagtcggtacttgctggcggcgcggtgcaacggtttggccatttgggttgggctttaactgctaaaaatcaagcttgcattgtttgaatctccttttggcagccatgactgagcccaggtttgttgttgtgctgtgagttatgggatcatctcctgctgctgctgctgcttcttttttttttttccaaatcaatggtctgatcaac

SEQ ID NO: 220219 - DNA, 1234 bp, Zea Mays
cttcgtttagtttcactgacatgtagcctccagccctgacccgcaacccatgggtccagatgtcatacatcaaaatcgctttctgctgtgtcgaaggatacctcgccgcttcgtcttccccgtcccctttcgcctttcccctcctatcgacaccaccatgtccaccaccaccgccactccgccacagttcgaatattcctagcttgagattgcaagaggtctccaagaggagggtaggggagccgagcgctcagctctaattttctccatctattgctaacagctctggccaatcatataaaaaaacgttggttacaagccaaatggcacttcctggtagctgctgattttctatcgacaagatcagagctcagacctcaggcaagggaggtacaatgccaagagcaaatgagatgttgagggcagattcaagaatgatggtggtctttggtgccttgtcatcgaaaccagagcaactgacatttgaagaatccctcatatttgtcaagaaagttaaagcccgtgactacatgctgtacctgtcattattcgacgttctcggcagaacggaattaccccagctcgacgcctaccgagaggtacggtacgagtaccatcctctccctggccacacttgctgaaagcatgaatctgcgcgaagagctcgagaggttcagaccgccgccgccgccgccggtgcctacctcaaagcaggcagcaaacaacaacatctggccctgggtcatcgtgtgcgctgctgtcccgttggtcgcagccagcctgctcccgtcactttgaaacccagtgctgtggcttgctcaacaccctgttggccaaaaaatggccgtctgatcgaagaaccgctgcatgcagtacatacattacatgtgcagtggaccgaaccggcctcctgttgctattcgtgccatcacaactgaatcacagtattgtctgtgtatatatattagagtagtgttctggaagggaacctgcgttcttggtcatcaggtaccactgggcaagaaatgtagtcggtacttgctggcggcgcggtgcaacggtttggccatttgggttgggctttaactgctaaaaatcaagcttgcattgtttgaatctccttttggcagccatgactgagcccaggtttgttgttgtgctgtgagttatgggatcatctcctgctgctgctgctgcttcttttttttttttccaaatcaatggtctgatcaac

SEQ ID NO: 220220 - DNA, 3515 bp, Zea Mays
ctgggctttaacatgctgtgtattttgtacaaatactcacaacctggccctggacattttgatgtcgataccattaactaaaataaatagtttttcttcgatgtaaatgtccgtaaaatatttagttcctgaatttctttcttcctttctagtgtgactgtcccatctaatattctgaaggtgacatgtcattgttgggttgaaaatcacaaggggagagaaggaaaaaggcagggaatgggaggggaaagtacctaagccagctaggaagcaagcagctggaggcagagatgccaaccgcaatgtcctgtcatctttgctcatgaccaaatcggtcaaggtcgcccatggatggagatcacaggaggcaagccgccgccgcggtcaccgtcacgcaagtcagcccggcgcggcgcctgatcgcctggctgaggcttctcttccgggcgttcgttcatagatacggcaaggtcgcgagctggaacgcggcggggcgccctgtcttcgtcgtcctcgcggtcttcttcctccagaggagcctgcgccgccggtacctgtcatggaaggagtcgtcgcgtcttccgctgatggccgccgccgccgtcaccgtgcagacgaccgtcagggcgatggcggcgcagcgcgagctctctgtccggaagcagaccagagctgccacacgcatccaggcgcaatggcgtgcgcacagggcggtgtggagctacctgacgacgaagagagccgccgtcatctgccaacgtgcttggaggcaaagcgttgcacgcaaggagctcaggaagctcagactgtgtgtgcaggagaatctggagagggaaatgctggaggaggtgtgcaggctgcgtgagatggtggacgtgctccagcaggctgtcaatgacgccgagacgagggccgtcaacgagagggaggcggcgaaggatgcgatggcgcagttggaagcagcctcggcgatcgaagagaccgtggtgatggttgaggacactgagaaggtcaagtcgctgagtgccgaagttgaccgcctcaaggatttgctgggagctgaaatgagtgaaacttttgccgccaagaaggcgctttctgaagccgagctgaggaacgagaagctggccaggctgcttggagttgaggaagttaagaacaaacggcttcaagacaccctgaaaaggatggaggagaaggcttctagtctggacgaggaaaacagaatgctgcgacaggctgtggcgtcaaaccctgctattgtcaggtcgccatcgggcgaaaaccatgaagcacctggaattcaggcagctcctgataatgagaaatcaaggaatggtacagtgaagcctatagcagtggatcgggaggctaatgtccatgagaagggcgctgaacagcccagctcaaatggtcaagaagctgggaagcaacagcaagagcttctgatcaagtgcctatccgaagacctgggtttctcggtcggcaggcctatcgctgcatacctcatctacaggtgtctggtgcattggagatcatttgaagaagagaggagcgtggtctttgaccggattatccagaagattactgctgcgcttgaggcgcgagacaacaacgatgcactagcatactggctgtccaattcatgcgcgctcctggttcttcttcaaaggacactgaaaatcaacggggtagctgccttggctcgtcagaggcgaagaacgtcgtcacctctcaaggaaaaccaagatccagctcccgacggacagttgatctgtggactagcccaagtctaccaggttgaggccaagtacccagctatcgcgttcaagcagcagctcaccgcactgctggagaaggtctatgggatgatccggcacaacctgaagaaggaactgtcgccgcttctgggcctctgcattcaggcgccacgcacattcgtcgtcagtcccagaggatcgtgttcccaaggaacagatctggcgcaacaagcctccatggcgcattggcagagcatcatcaagatcttgacaaattctctcgatgttctgaaatcaaattacgtgcctccgttcctgatctgcaagatgttcacgcaagtcttctcgtttatcaatgtgcagctttttaacagccttctgctgcggcgtgagtgctgctcgttcagtaacggagagtacgtgaaggctgggctggatgagctagagcattggtgcttttggctgactgaagagtacgcaggatctgcatgggacgagctgaagcatatcaggcaggcagttaccctcttgatacttgacgacaagcatagccggagtctcgcggagatcacagacgacttctgcccagtgctgagcatgcagcaactgtaccggatcagcacgatgtactgcgacgacaagtttgggaccctgggcattccatcagaagtcgtctccagcatgcggaccaagatgatcgagggctcgtcgagcagcccgtcggcgcacgacgacatcaactcgttcctgctagacgatgacttcagcataccgttctccgtggatgacttcacgaagctgatagtgcacgtcgacgtagcggacatggatttgccaccgctcattcaggagagcagcggcggcggctccaaaatgggacattgaggagtgacaatatgcacgccttttttgtgtgtgttgcggtgatgtgcatagtgcgtgacatattgctctgagaccagggttttgtttttttcttcgtcgactggtcttccatttttctcccatatgactactacctgagtgagtagtgcctgtttgggtttgcgcgtgtgtatgattgtacagaactgagctgtggcatataaggtaaggaaagaaagcctgtgtgattcaattttttttatcaaaagagtgagtgatgcttgcaagtcaagctttcctttgccaagtgtgatctcagattctaactgctgtgacacctgtacttttgttgtttgtttgttttttttttttttttgaaagaagcctggcgctgatggcctccatttaactgttgagcatctgtcactcgctcaatagttaatggtctagagaaacattgtcgaccatctgtgtcactagaattgatgacttgttgtctatccttattgcctctgtttcaaccctgccagtgcgatttggatctggtcatggccggcgccatgcacagtaatgtggtcaataacaaatatgctaaactacatacatataacatataccatgttcatctaagataacatgtgaacagagtattatagatcgttatctctaaagtctaaacatatagtgcagcggaagaagaccataacgatatagtagaagttgtcgtacgtctgcacgtaccaccaacaacgatatgtttacccgtgcttctcatattcgtagccgatcaataccgctccaatagcagtagcgtctccaatccctagagagacatcaattaggttatgcgatgtctctcaaccatagcatatgagctctttagtgaacttt

SEQ ID NO: 220221 - DNA, 3471 bp, Zea Mays
gacattttgatgtcgataccattaactaaaataaatagtttttcttcgatgtaaatgtccgtaaaatatttagttcctgaatttctttcttcctttctagtgtgactgtcccatctaatattctgaaggtgacatgtcattgttgggttgaaaatcacaaggggagagaaggaaaaaggcagggaatgggaggggaaagtacctaagccagctaggaagcaagcagctggaggcagagatgccaaccgcaatgtcctgtcatctttgctcatgaccaaatcggtcaaggtcgcccatggatggagatcacaggaggcaagccgccgccgcggtcaccgtcacgcaagtcagcccggcgcggcgcctgatcgcctggctgaggcttctcttccgggcgttcgttcatagatacggcaaggtcgcgagctggaacgcggcggggcgccctgtcttcgtcgtcctcgcggtcttcttcctccagaggagcctgcgccgccggtacctgtcatggaaggagtcgtcgcgtcttccgctgatggccgccgccgccgtcaccgtgcagacgaccgtcagggcgatggcggcgcagcgcgagctctctgtccggaagcagaccagagctgccacacgcatccaggcgcaatggcgtgcgcacagggcggtgtggagctacctgacgacgaagagagccgccgtcatctgccaacgtgcttggaggcaaagcgttgcacgcaaggagctcaggaagctcagactgtgtgtgcaggagaatctggagagggaaatgctggaggaggtgtgcaggctgcgtgagatggtggacgtgctccagcaggctgtcaatgacgccgagacgagggccgtcaacgagagggaggcggcgaaggatgcgatggcgcagttggaagcagcctcggcgatcgaagagaccgtggtgatggttgaggacactgagaaggtcaagtcgctgagtgccgaagttgaccgcctcaaggatttgctgggagctgaaatgagtgaaacttttgccgccaagaaggcgctttctgaagccgagctgaggaacgagaagctggccaggctgcttggagttgaggaagttaagaacaaacggcttcaagacaccctgaaaaggatggaggagaaggcttctagtctggacgaggaaaacagaatgctgcgacaggctgtggcgtcaaaccctgctattgtcaggtcgccatcgggcgaaaaccatgaagcacctggaattcagctcctgataatgagaaatcaaggaatggtacagtgaagcctatagcagtggatcgggaggctaatgtccatgagaagggcgctgaacagcccagctcaaatggtcaagaagctgggaagcaacagcaagagcttctgatcaagtgcctatccgaagacctgggtttctcggtcggcaggcctatcgctgcatacctcatctacaggtgtctggtgcattggagatcatttgaagaagagaggagcgtggtctttgaccggattatccagaagattactgctgcgcttgaggcgcgagacaacaacgatgcactagcatactggctgtccaattcatgcgcgctcctggttcttcttcaaaggacactgaaaatcaacggggtagctgccttggctcgtcagaggcgaagaacgtcgtcacctctcaaggtgccacagcaggaaaaccaagatccagctcccgacggacagttgatctgtggactagcccaagtctaccaggttgaggccaagtacccagctatcgcgttcaagcagcagctcaccgcactgctggagaaggtctatgggatgatccggcacaacctgaagaaggaactgtcgccgcttctgggcctctgcattcaggcgccacgcacattcgtcgtcagtcccagaggatcgtgttcccaaggaacagatctggcgcaacaagcctccatggcgcattggcagagcatcatcaagatcttgacaaattctctcgatgttctgaaatcaaattacgtgcctccgttcctgatctgcaagatgttcacgcaagtcttctcgtttatcaatgtgcagctttttaacagccttctgctgcggcgtgagtgctgctcgttcagtaacggagagtacgtgaaggctgggctggatgagctagagcattggtgcttttggctgactgaagagtacgcaggatctgcatgggacgagctgaagcatatcaggcaggcagttaccctcttgatacttgacgacaagcatagccggagtctcgcggagatcacagacgacttctgcccagtgctgagcatgcagcaactgtaccggatcagcacgatgtactgcgacgacaagtttgggaccctgggcattccatcagaagtcgtctccagcatgcggaccaagatgatcgagggctcgtcgagcagcccgtcggcgcacgacgacatcaactcgttcctgctagacgatgacttcagcataccgttctccgtggatgacttcacgaagctgatagtgcacgtcgacgtagcggacatggatttgccaccgctcattcaggagagcagcggcggcggctccaaaatgggacattgaggagtgacaatatgcacgccttttttgtgtgtgttgcggtgatgtgcatagtgcgtgacatattgctctgagaccagggttttgtttttttcttcgtcgactggtcttccatttttctcccatatgactactacctgagtgagtagtgcctgtttgggtttgcgcgtgtgtatgattgtacagaactgagctgtggcatataaggtaaggaaagaaagcctgtgtgattcaattttttttatcaaaagagtgagtgatgcttgcaagtcaagctttcctttgccaagtgtgatctcagattctaactgctgtgacacctgtacttttgttgtttgtttgttttttttttttttttgaaagaagcctggcgctgatggcctccatttaactgttgagcatctgtcactcgctcaatagttaatggtctagagaaacattgtcgaccatctgtgtcactagaattgatgacttgttgtctatccttattgcctctgtttcaaccctgccagtgcgatttggatctggtcatggccggcgccatgcacagtaatgtggtcaataacaaatatgctaaactacatacatataacatataccatgttcatctaagataacatgtgaacagagtattatagatcgttatctctaaagtctaaacatatagtgcagcggaagaagaccataacgatatagtagaagttgtcgtacgtctgcacgtaccaccaacaacgatatgtttacccgtgcttctcatattcgtagccgatcaataccgctccaatagcagtagcgtctccaatccctagagagacatcaattaggttatgcgatgtctctcaaccatagcatatgagctctttagtgaacttt

SEQ ID NO: 220222 - DNA, 3466 bp, Zea Mays
gacattttgatgtcgataccattaactaaaataaatagtttttcttcgatgtaaatgtccgtaaaatatttagttcctgaatttctttcttcctttctagtgtgactgtcccatctaatattctgaaggtgacatgtcattgttgggttgaaaatcacaaggggagagaaggaaaaaggcagggaatgggaggggaaagtacctaagccagctaggaagcaagcagctggaggcagagatgccaaccgcaatgtcctgtcatctttgctcatgaccaaatcggtcaaggtcgcccatggatggagatcacaggaggcaagccgccgccgcggtcaccgtcacgcaagtcagcccggcgcggcgcctgatcgcctggctgaggcttctcttccgggcgttcgttcatagatacggcaaggtcgcgagctggaacgcggcggggcgccctgtcttcgtcgtcctcgcggtcttcttcctccagaggagcctgcgccgccggtacctgtcatggaaggagtcgtcgcgtcttccgctgatggccgccgccgccgtcaccgtgcagacgaccgtcagggcgatggcggcgcagcgcgagctctctgtccggaagcagaccagagctgccacacgcatccaggcgcaatggcgtgcgcacagggcggtgtggagctacctgacgacgaagagagccgccgtcatctgccaacgtgcttggaggcaaagcgttgcacgcaaggagctcaggaagctcagactgtgtgtgcaggagaatctggagagggaaatgctggaggaggtgtgcaggctgcgtgagatggtggacgtgctccagcaggctgtcaatgacgccgagacgagggccgtcaacgagagggaggcggcgaaggatgcgatggcgcagttggaagcagcctcggcgatcgaagagaccgtggtgatggttgaggacactgagaaggtcaagtcgctgagtgccgaagttgaccgcctcaaggatttgctgggagctgaaatgagtgaaacttttgccgccaagaaggcgctttctgaagccgagctgaggaacgagaagctggccaggctgcttggagttgaggaagttaagaacaaacggcttcaagacaccctgaaaaggatggaggagaaggcttctagtctggacgaggaaaacagaatgctgcgacaggctgtggcgtcaaaccctgctattgtcaggtcgccatcgggcgaaaaccatgaagcacctggaattcaggcagctcctgataatgagaaatcaaggaatggtacagtgaagcctatagcagtggatcgggaggctaatgtccatgagaagggcgctgaacagcccagctcaaatggtcaagaagctgggaagcaacagcaagagcttctgatcaagtgcctatccgaagacctgggtttctcggtcggcaggcctatcgctgcatacctcatctacaggtgtctggtgcattggagatcatttgaagaagagaggagcgtggtctttgaccggattatccagaagattactgctgcgcttgaggcgcgagacaacaacgatgcactagcatactggctgtccaattcatgcgcgctcctggttcttcttcaaaggacactgaaaatcaacggggtagctgccttggctcgtcagaggcgaagaacgtcgtcacctctcaagcaggaaaaccaagatccagctcccgacggacagttgatctgtggactagcccaagtctaccaggttgaggccaagtacccagctatcgcgttcaagcagcagctcaccgcactgctggagaaggtctatgggatgatccggcacaacctgaagaaggaactgtcgccgcttctgggcctctgcattcaggcgccacgcacattcgtcgtcagtcccagaggatcgtgttcccaaggaacagatctggcgcaacaagcctccatggcgcattggcagagcatcatcaagatcttgacaaattctctcgatgttctgaaatcaaattacgtgcctccgttcctgatctgcaagatgttcacgcaagtcttctcgtttatcaatgtgcagctttttaacagccttctgctgcggcgtgagtgctgctcgttcagtaacggagagtacgtgaaggctgggctggatgagctagagcattggtgcttttggctgactgaagagtacgcaggatctgcatgggacgagctgaagcatatcaggcaggcagttaccctcttgatacttgacgacaagcatagccggagtctcgcggagatcacagacgacttctgcccagtgctgagcatgcagcaactgtaccggatcagcacgatgtactgcgacgacaagtttgggaccctgggcattccatcagaagtcgtctccagcatgcggaccaagatgatcgagggctcgtcgagcagcccgtcggcgcacgacgacatcaactcgttcctgctagacgatgacttcagcataccgttctccgtggatgacttcacgaagctgatagtgcacgtcgacgtagcggacatggatttgccaccgctcattcaggagagcagcggcggcggctccaaaatgggacattgaggagtgacaatatgcacgccttttttgtgtgtgttgcggtgatgtgcatagtgcgtgacatattgctctgagaccagggttttgtttttttcttcgtcgactggtcttccatttttctcccatatgactactacctgagtgagtagtgcctgtttgggtttgcgcgtgtgtatgattgtacagaactgagctgtggcatataaggtaaggaaagaaagcctgtgtgattcaattttttttatcaaaagagtgagtgatgcttgcaagtcaagctttcctttgccaagtgtgatctcagattctaactgctgtgacacctgtacttttgttgtttgtttgttttttttttttttttgaaagaagcctggcgctgatggcctccatttaactgttgagcatctgtcactcgctcaatagttaatggtctagagaaacattgtcgaccatctgtgtcactagaattgatgacttgttgtctatccttattgcctctgtttcaaccctgccagtgcgatttggatctggtcatggccggcgccatgcacagtaatgtggtcaataacaaatatgctaaactacatacatataacatataccatgttcatctaagataacatgtgaacagagtattatagatcgttatctctaaagtctaaacatatagtgcagcggaagaagaccataacgatatagtagaagttgtcgtacgtctgcacgtaccaccaacaacgatatgtttacccgtgcttctcatattcgtagccgatcaataccgctccaatagcagtagcgtctccaatccctagagagacatcaattaggttatgcgatgtctctcaaccatagcatatgagctctttagtgaacttt

SEQ ID NO: 220223 - DNA, 3472 bp, Zea Mays
gacattttgatgtcgataccattaactaaaataaatagtttttcttcgatgtaaatgtccgtaaaatatttagttcctgaatttctttcttcctttctagtgtgactgtcccatctaatattctgaaggtgacatgtcattgttgggttgaaaatcacaaggggagagaaggaaaaaggcagggaatgggaggggaaagtacctaagccagctaggaagcaagcagctggaggcagagatgccaaccgcaatgtcctgtcatctttgctcatgaccaaatcggtcaaggtcgcccatggatggagatcacaggaggcaagccgccgccgcggtcaccgtcacgcaagtcagcccggcgcggcgcctgatcgcctggctgaggcttctcttccgggcgttcgttcatagatacggcaaggtcgcgagctggaacgcggcggggcgccctgtcttcgtcgtcctcgcggtcttcttcctccagaggagcctgcgccgccggtacctgtcatggaaggagtcgtcgcgtcttccgctgatggccgccgccgccgtcaccgtgcagacgaccgtcagggcgatggcggcgcagcgcgagctctctgtccggaagcagaccagagctgccacacgcatccaggcgcaatggcgtgcgcacagggcggtgtggagctacctgacgacgaagagagccgccgtcatctgccaacgtgcttggaggcaaagcgttgcacgcaaggagctcaggaagctcagactgtgtgtgcaggagaatctggagagggaaatgctggaggaggtgtgcaggctgcgtgagatggtggacgtgctccagcaggctgtcaatgacgccgagacgagggccgtcaacgagagggaggcggcgaaggatgcgatggcgcagttggaagcagcctcggcgatcgaagagaccgtggtgatggttgaggacactgagaaggtcaagtcgctgagtgccgaagttgaccgcctcaaggatttgctgggagctgaaatgagtgaaacttttgccgccaagaaggcgctttctgaagccgagctgaggaacgagaagctggccaggctgcttggagttgaggaagttaagaacaaacggcttcaagacaccctgaaaaggatggaggagaaggcttctagtctggacgaggaaaacagaatgctgcgacaggctgtggcgtcaaaccctgctattgtcaggtcgccatcgggcgaaaaccatgaagcacctggaattcaggcagctcctgataatgagaaatcaaggaatggtacagtgaagcctatagcagtggatcgggaggctaatgtccataagggcgctgaacagcccagctcaaatggtcaagaagctgggaagcaacagcaagagcttctgatcaagtgcctatccgaagacctgggtttctcggtcggcaggcctatcgctgcatacctcatctacaggtgtctggtgcattggagatcatttgaagaagagaggagcgtggtctttgaccggattatccagaagattactgctgcgcttgaggcgcgagacaacaacgatgcactagcatactggctgtccaattcatgcgcgctcctggttcttcttcaaaggacactgaaaatcaacggggtagctgccttggctcgtcagaggcgaagaacgtcgtcacctctcaaggtgccacagcaggaaaaccaagatccagctcccgacggacagttgatctgtggactagcccaagtctaccaggttgaggccaagtacccagctatcgcgttcaagcagcagctcaccgcactgctggagaaggtctatgggatgatccggcacaacctgaagaaggaactgtcgccgcttctgggcctctgcattcaggcgccacgcacattcgtcgtcagtcccagaggatcgtgttcccaaggaacagatctggcgcaacaagcctccatggcgcattggcagagcatcatcaagatcttgacaaattctctcgatgttctgaaatcaaattacgtgcctccgttcctgatctgcaagatgttcacgcaagtcttctcgtttatcaatgtgcagctttttaacagccttctgctgcggcgtgagtgctgctcgttcagtaacggagagtacgtgaaggctgggctggatgagctagagcattggtgcttttggctgactgaagagtacgcaggatctgcatgggacgagctgaagcatatcaggcaggcagttaccctcttgatacttgacgacaagcatagccggagtctcgcggagatcacagacgacttctgcccagtgctgagcatgcagcaactgtaccggatcagcacgatgtactgcgacgacaagtttgggaccctgggcattccatcagaagtcgtctccagcatgcggaccaagatgatcgagggctcgtcgagcagcccgtcggcgcacgacgacatcaactcgttcctgctagacgatgacttcagcataccgttctccgtggatgacttcacgaagctgatagtgcacgtcgacgtagcggacatggatttgccaccgctcattcaggagagcagcggcggcggctccaaaatgggacattgaggagtgacaatatgcacgccttttttgtgtgtgttgcggtgatgtgcatagtgcgtgacatattgctctgagaccagggttttgtttttttcttcgtcgactggtcttccatttttctcccatatgactactacctgagtgagtagtgcctgtttgggtttgcgcgtgtgtatgattgtacagaactgagctgtggcatataaggtaaggaaagaaagcctgtgtgattcaattttttttatcaaaagagtgagtgatgcttgcaagtcaagctttcctttgccaagtgtgatctcagattctaactgctgtgacacctgtacttttgttgtttgtttgttttttttttttttttgaaagaagcctggcgctgatggcctccatttaactgttgagcatctgtcactcgctcaatagttaatggtctagagaaacattgtcgaccatctgtgtcactagaattgatgacttgttgtctatccttattgcctctgtttcaaccctgccagtgcgatttggatctggtcatggccggcgccatgcacagtaatgtggtcaataacaaatatgctaaactacatacatataacatataccatgttcatctaagataacatgtgaacagagtattatagatcgttatctctaaagtctaaacatatagtgcagcggaagaagaccataacgatatagtagaagttgtcgtacgtctgcacgtaccaccaacaacgatatgtttacccgtgcttctcatattcgtagccgatcaataccgctccaatagcagtagcgtctccaatccctagagagacatcaattaggttatgcgatgtctctcaaccatagcatatgagctctttagtgaacttt

SEQ ID NO: 220224 - DNA, 3564 bp, Zea Mays
gacattttgatgtcgataccattaactaaaataaatagtttttcttcgatgtaaatgtccgtaaaatatttagttcctgaatttctttcttcctttctagtgtgactgtcccatctaatattctgaaggtgacatgtcattgttgggttgaaaatcacaaggggagagaaggaaaaaggcagggaatgggaggggaaagtacctaagccagctaggaagcaagcagctggaggcagagatgccaaccgcaatgtcctgtcatctttgctcatgaccaaatcggtcaaggtcgcccatggatggagatcacaggaggcaagccgccgccgcggtcaccgtcacgcaagtcagcccggcgcggcgcctgatcgcctggctgaggcttctcttccgggcgttcgttcatagatacggcaaggtcgcgagctggaacgcggcggggcgccctgtcttcgtcgtcctcgcggtcttcttcctccagaggagcctgcgccgccggtacctgtcatggaaggagtcgtcgcgtcttccgctgatggccgccgccgccgtcaccgtgcagacgaccgtcagggcgatggcggcgcagcgcgagctctctgtccggaagcagaccagagctgccacacgcatccaggcgcaatggcgtgcgcacagggcggtgtggagctacctgacgacgaagagagccgccgtcatctgccaacgtgcttggaggcaaagcgttgcacgcaaggagctcaggaagctcagactgtgtgtgcaggagaatctggagagggaaatgctggaggaggtgtgcaggctgcgtgagatggtggacgtgctccagcaggctgtcaatgacgccgagacgagggccgtcaacgagagggaggcggcgaaggatgcgatggcgcagttggaagcagcctcggcgatcgaagagaccgtggtgatggttgaggacactgagaaggtcaagtcgctgagtgccgaagttgaccgcctcaaggatttgctgggagctgaaatgagtgaaacttttgccgccaagaaggcgctttctgaagccgagctgaggaacgagaagctggccaggctgcttggagttgaggaagttaagaacaaacggcttcaagacaccctgaaaaggatggaggagaaggcttctagtctggacgaggaaaacagaatgctgcgacaggctgtggcgtcaaaccctgctattgtcaggtcgccatcgggcgaaaaccatgaagcacctggaattcaggcagctcctgataatgagaaatcaaggaatggtacagtgaagcctatagcagtggatcgggaggctaatgtccatgagaagggcgctgaacagcccagctcaaatggtcaagaagctgggaagcaacagcaagtatggcatcggctccgaacttttcagctctaccaccatttcgcgcgcggttcatgccacgcgatctgagcgtctttttaaacatctcgaaacgttcaggagcttctgatcaagtgcctatccgaagacctgggtttctcggtcggcaggcctatcgctgcatacctcatctacaggtgtctggtgcattggagatcatttgaagaagagaggagcgtggtctttgaccggattatccagaagattactgctgcgcttgaggcgcgagacaacaacgatgcactagcatactggctgtccaattcatgcgcgctcctggttcttcttcaaaggacactgaaaatcaacggggtagctgccttggctcgtcagaggcgaagaacgtcgtcacctctcaaggtgccacaggaaaaccaagatccagctcccgacggacagttgatctgtggactagcccaagtctaccaggttgaggccaagtacccagctatcgcgttcaagcagcagctcaccgcactgctggagaaggtctatgggatgatccggcacaacctgaagaaggaactgtcgccgcttctgggcctctgcattcaggcgccacgcacattcgtcgtcagtcccagaggatcgtgttcccaaggaacagatctggcgcaacaagcctccatggcgcattggcagagcatcatcaagatcttgacaaattctctcgatgttctgaaatcaaattacgtgcctccgttcctgatctgcaagatgttcacgcaagtcttctcgtttatcaatgtgcagctttttaacagccttctgctgcggcgtgagtgctgctcgttcagtaacggagagtacgtgaaggctgggctggatgagctagagcattggtgcttttggctgactgaagaggatctgcatgggacgagctgaagcatatcaggcaggcagttaccctcttgatacttgacgacaagcatagccggagtctcgcggagatcacagacgacttctgcccagtgctgagcatgcagcaactgtaccggatcagcacgatgtactgcgacgacaagtttgggaccctgggcattccatcagaagtcgtctccagcatgcggaccaagatgatcgagggctcgtcgagcagcccgtcggcgcacgacgacatcaactcgttcctgctagacgatgacttcagcataccgttctccgtggatgacttcacgaagctgatagtgcacgtcgacgtagcggacatggatttgccaccgctcattcaggagagcagcggcggcggctccaaaatgggacattgaggagtgacaatatgcacgccttttttgtgtgtgttgcggtgatgtgcatagtgcgtgacatattgctctgagaccagggttttgtttttttcttcgtcgactggtcttccatttttctcccatatgactactacctgagtgagtagtgcctgtttgggtttgcgcgtgtgtatgattgtacagaactgagctgtggcatataaggtaaggaaagaaagcctgtgtgattcaattttttttatcaaaagagtgagtgatgcttgcaagtcaagctttcctttgccaagtgtgatctcagattctaactgctgtgacacctgtacttttgttgtttgtttgttttttttttttttttgaaagaagcctggcgctgatggcctccatttaactgttgagcatctgtcactcgctcaatagttaatggtctagagaaacattgtcgaccatctgtgtcactagaattgatgacttgttgtctatccttattgcctctgtttcaaccctgccagtgcgatttggatctggtcatggccggcgccatgcacagtaatgtggtcaataacaaatatgctaaactacatacatataacatataccatgttcatctaagataacatgtgaacagagtattatagatcgttatctctaaagtctaaacatatagtgcagcggaagaagaccataacgatatagtagaagttgtcgtacgtctgcacgtaccaccaacaacgatatgtttacccgtgcttctcatattcgtagccgatcaataccgctccaatagcagtagcgtctccaatccctagagagacatcaattaggttatgcgatgtctctcaaccatagcatatgagctctttagtgaacttt

SEQ ID NO: 220225 - DNA, 1316 bp, Zea Mays
tgatggcatcctcagactgcttcaacagagcttcatacgcaggatctgcatgggacgagctgaagcatatcaggcaggcagttaccctcttgatacttgacgacaagcatagccggagtctcgcggagatcacagacgacttctgcccagtgctgagcatgcagcaactgtaccggatcagcacgatgtactgcgacgacaagtttgggaccctgggcattccatcagaagtcgtctccagcatgcggaccaagatgatcgagggctcgtcgagcagcccgtcggcgcacgacgacatcaactcgttcctgctagacgatgacttcagcataccgttctccgtggatgacttcacgaagctgatagtgcacgtcgacgtagcggacatggatttgccaccgctcattcaggagagcagcggcggcggctccaaaatgggacattgaggagtgacaatatgcacgccttttttgtgtgtgttgcggtgatgtgcatagtgcgtgacatattgctctgagaccagggttttgtttttttcttcgtcgactggtcttccatttttctcccatatgactactacctgagtgagtagtgcctgtttgggtttgcgcgtgtgtatgattgtacagaactgagctgtggcatataaggtaaggaaagaaagcctgtgtgattcaattttttttatcaaaagagtgagtgatgcttgcaagtcaagctttcctttgccaagtgtgatctcagattctaactgctgtgacacctgtacttttgttgtttgtttgttttttttttttttttgaaagaagcctggcgctgatggcctccatttaactgttgagcatctgtcactcgctcaatagttaatggtctagagaaacattgtcgaccatctgtgtcactagaattgatgacttgttgtctatccttattgcctctgtttcaaccctgccagtgcgatttggatctggtcatggccggcgccatgcacagtaatgtggtcaataacaaatatgctaaactacatacatataacatataccatgttcatctaagataacatgtgaacagagtattatagatcgttatctctaaagtctaaacatatagtgcagcggaagaagaccataacgatatagtagaagttgtcgtacgtctgcacgtaccaccaacaacgatatgtttacccgtgcttctcatattcgtagccgatcaataccgctccaatagcagtagcgtctccaatccctagagagacatcaattaggttatgcgatgtctctcaaccatagcatatgagctctttagtgaacttt

SEQ ID NO: 220226 - DNA, 1285 bp, Zea Mays
acggattgcctcctcgctactggtcgccaccggggaagccgcggctcccccgtcatccacgacttcgggaccatggccacctcgcactggcgctggcagatgggtctgctgtcccgtcactctgacctgctcaagacggccgacgacgacagggcgctcctctagtgtgccggcgccgagtttgcgctcacggctaacttgctcatgccgttggacgcgcccggcacacggtgcctcatggagttatccttgtatcggaggcagggcatcattaagttccacaacccttccccctcctcgtagaattgcttgtccctgttgatcgaagtgagactgaatcagggggcccgcactcgcacctcccacgacctctttccgccatggggctccggattccaccgtttgtcaggcatgagtagcgagcgatggactggcggatcccggtagagacctgaaccccgcgccaccaccatcgccacagcaggctacatgtttgttctcttgttctagacgcaagcagcagatgcgaaataggcatccgtctcatggtggggaaattgttcacagttgaggatgtcgtaattggtggcctattcgtgatatctcttcttctagagagtatgcaagacaaggatttgctttgggtcttgttgttgtgctcaaatcgattcgggcaatcaaggttcaggcaattatgaagttgtccctaatttatttgaacattcattttttatgaagggactggaagctaaggacaatattttggggcgccagtttggatttggagcaattgtgaggtctgaccgtgtttcacaacagtggacatgtgacaaaagctcacccatcgttaaggaatttgtgagtgtggatgtagaactcggtggcaagaaacgatacttgacagagcctgcagttgccgtgattttggaattagttaggaaggcatgatgctatcatatcagaagaatttttgctcaacttttggtgagcactggaagaggatagagtggtgaagacaatggcatagctatactgtcatgggcatcatagggagcgagaggcaacagccaggctgggataaggctagagaataagattgagatgagctgggataaggctagagaataagattgagatgagagaattgtggagagttggttagcagtagataagtccaagaaagtaggagttagttgagagtttgtatgagaagttggttagctatagggctatttataagccgcatggcagcagggaataaatcaagcaagatcattaccaaacc

SEQ ID NO: 220227 - DNA, 1210 bp, Zea Mays
ctcctcgctactggtcgccaccggggaagccgcggctcccccgtcatccacgacttcgggaccatggccacctcgcactggcgctggcagatgggtctgctgtcccgtcactctgacctgctcaagacggccgacgacgacagggcgctcctctagtgtgccggcgccgagtttgcgctcacggctaacttgctcatgccgttggacgcgcccggcacacggtgcctcatggagttatccttgtatcggaggcagggcatcattaagttccacaacccttccccctcctcgtagaattgcttgtccctgttgatcgaagtgagactgaatcagggggcccgcactcgcacctcccacgacctctttccgccatggggctccggattccaccgtttgtcaggcatgagtagcgagcgatggactggcggatcccggtagagacctgaaccccgcgccaccaccatcgccacagcaggctacatgtttgttctcttgttctagacgcaagcagcagatgcgaaataggcatccgtctcatggtggggaaattgttcacagttgaggatgtcgtaattggtggcctattcgtgatatctcttcttctagagagtatgcaagacaaggatttgctttgggtcttgttgttgtgctcaaatcgattcgggcaatcaagctaaggacaatattttggggcgccagtttggatttggagcaattgtgaggtctgaccgtgtttcacaacagtggacatgtgacaaaagctcacccatcgttaaggaatttgtgagtgtggatgtagaactcggtggcaagaaacgatacttgacagagcctgcagttgccgtgattttggaattagttaggaaggcatgatgctatcatatcagaagaatttttgctcaacttttggtgagcactggaagaggatagagtggtgaagacaatggcatagctatactgtcatgggcatcatagggagcgagaggcaacagccaggctgggataaggctagagaataagattgagatgagctgggataaggctagagaataagattgagatgagagaattgtggagagttggttagcagtagataagtccaagaaagtaggagttagttgagagtttgtatgagaagttggttagctatagggctatttataagccgcatggcagcagggaataaatcaagcaagatcattaccaaacc

SEQ ID NO: 220228 - DNA, 1510 bp, Zea Mays
acacatcacaccctaagttcctaatccaaatactatactctctctctctctctctctctctctctctctctctctctctctctctcctgtctgctcgctttcttctcgcgcggtgcgggagaaccggagaaccgccgcctcagctccgtctcgccgtggacgcagctgtgacttaaggcaattattggaatatcgaggatttgctgatggctggcactatcataatggatgattctgctgcaagcaccagtggtttgggggatcacaatgtctctgctgattccctttctgagtggcgctcctgcgaacatgttgataatgggatcccttcaacatcccctcccttttgggacaccgatagtgaagacgatgatcctggccaaaaccttgatgtggctgctcattatgctatgggatttggtttgattttacaagtgctattagcattatgccttgtgctcgtgctcatgtacagttgcctcaaattgtaaccccatggggcctagaccttcagatttatttgggcggtatacttggaaaatcgaaaacttttcaaaggagaagaagagagaaatgaaaagtgaaccgtttgaagctggtggctacaagtggtatattctagtttaccctcaaggatgcgatgtctccaatcacttgtcattgtttctttgcgttgctaatcatgaggaacttctcccaggatggggccattttgcccagtttactatagctgtgggcaatcttgatccaaagaaagttaaatattcagacacgctgcacaaattttggaagaaggaacatgattggggatggaaaaagtttatggagctatcaaagattcaagatggttttcttgttgatgatgttcttgaaatcatagctcaagttcaagttatcagagagaaagcagacagaccatttcgctgccttgatcgcccttatcgtcgagaacttctccgtgtctacatgacaaacatagagcaaatttaccgacgttttgttgaagaacgcagaaggaaacttatcaggcttattgaagacaaaatgaggtggtccagtttccgtgctttctggcttgcgattgacccaacaaccaaacatcgcatgtccagagagaagagtgacatcatattgaaaatggtggtgaagaatttttttgtcgagaaagacgtgacctcaacattagttatggatgctctatatacaggtttgaaggctcttgaggcctgtagcaatggcaagaaaggaatggtaacttcaattgacttggaggagctatcagcttctatggtccatgtcgatatggacatgtttgttttggctggtgacttcataactttgattgagagggcagctttagagcccttgtcttgtcaatctctgtcaccaaaaggtgacaaatgttcccaaacccgtgctaaggatggtggtactggagaaattaacaaagttcctattgagcttcaagaaaggcgtcttacggagcttggtcagaagatactgaaatatt

SEQ ID NO: 220229 - DNA, 1480 bp, Zea Mays
tgcgtgcgtgcgtgtgcgacaagggtcgagaataagaagccatttgctcctccaagggaggtacatgtccaggttacacattcaatgccacctcacaagattgaaattttcaagtcacttgatgattgggctagagataatatcttgacacatctcaagccagtcgagaagtgttggcagccacaggatttcctccctgacccagcatctgaaggatttcatgatgaagttaaggagctcagagaacgtgccaaggaaatccctgatgattattttgtttgtttggtgggagacatgattaccgaggaagctctaccaacataccagactatgcttaacaccctcgatggtgtcagagatgagacaggtgcaagccccactgcctgggctgtttggacgagggcatggactgctgaggagaacaggcatggtgatctgctcaacaagtatatgtacctcactgggagggtggatatgaggcagattgagaagacaattcagtatcttattggctctggaatggatcctaggactgagaataatccttatcttggtttcatctacacctccttccaagagcgggcgaccttcatctcacacgggaacactgctcgtcacgccaaggactttggcgacttaaagcttgcacaaatctgcggcatcattgcctcggatgagaagcgacatgaaactgcgtacaccaagatcgtggagaagctgtttgagatcgaccctgatggtaccgtggtcgctctggctgacatgatgaggaagaagatctcaatgcctgcccacctgatgtttgacgggcaggacgacaagctgttcgagcacttctccatggtcgcgcagaggcttggcgtttacactgccagggactacgccgacatcctcgagttcctcgtcgacaggtggaaggtggtgaacctgactggtctgtcgggtgaagggaacaaggcgcaggactacctttgcacccttgcttcaaggatcaggaggctggaggagagggcccagagcagagccaagaaagcaggcacgctgcctttcagctgggtatacggtagggacgtccaactgtgagatcggaaacctgctgcggactgcttagacaagacctgctgtgtctgcgttacatagttctccaggttttgaccagatggtcccgtgtcgtcttatagagcgataggagaacgtgttggtctgtggtgtagctttgttttttatttttatttttctgttttgatgtacaacctgtggccgcatgaactggggcgtggagatgggagcgaccatgccgttctttgtctgtcgctggcggtgtgtttcggtatgttatttcagtcgttcagatctgttaaaaattttgtgagctatgcagttcagttcagctctgttctgttcgttagataccctaggtttctccgtggcctgaattctgcagtgtcgaaaacaaagcagagctccaactgaagtgtag

SEQ ID NO: 220230 - DNA, 1507 bp, Zea Mays
agcgaggccgtttctgatgcgccagtccctttcagaattcctttgatgccggtcgagaataagaagccatttgctcctccaagggaggtacatgtccaggttacacattcaatgccacctcacaagattgaaattttcaagtcacttgatgattgggctagagataatatcttgacacatctcaagccagtcgagaagtgttggcagccacaggatttcctccctgacccagcatctgaaggatttcatgatgaagttaaggagctcagagaacgtgccaaggaaatccctgatgattattttgtttgtttggtgggagacatgattaccgaggaagctctaccaacataccagactatgcttaacaccctcgatggtgtcagagatgagacaggtgcaagccccactgcctgggctgtttggacgagggcatggactgctgaggagaacaggcatggtgatctgctcaacaagtatatgtacctcactgggagggtggatatgaggcagattgagaagacaattcagtatcttattggctctggaatggatcctaggactgagaataatccttatcttggtttcatctacacctccttccaagagcgggcgaccttcatctcacacgggaacactgctcgtcacgccaaggactttggcgacttaaagcttgcacaaatctgcggcatcattgcctcggatgagaagcgacatgaaactgcgtacaccaagatcgtggagaagctgtttgagatcgaccctgatggtaccgtggtcgctctggctgacatgatgaggaagaagatctcaatgcctgcccacctgatgtttgacgggcaggacgacaagctgttcgagcacttctccatggtcgcgcagaggcttggcgtttacactgccagggactacgccgacatcctcgagttcctcgtcgacaggtggaaggtggtgaacctgactggtctgtcgggtgaagggaacaaggcgcaggactacctttgcacccttgcttcaaggatcaggaggctggaggagagggcccagagcagagccaagaaagcaggcacgctgcctttcagctgggtatacggtagggacgtccaactgtgagatcggaaacctgctgcggactgcttagacaagacctgctgtgtctgcgttacatagttctccaggttttgaccagatggtcccgtgtcgtcttatagagcgataggagaacgtgttggtctgtggtgtagctttgttttttatttttatttttctgttttgatgtacaacctgtggccgcatgaactggggcgtggagatgggagcgaccatgccgttctttgtctgtcgctggcggtgtgtttcggtatgttatttcagtcgttcagatctgttaaaaattttgtgagctatgcagttcagttcagctctgttctgttcgttagataccctaggtttctccgtggcctgaattctgcagtgtcgaaaacaaagcagagctccaactgaagtgtag

SEQ ID NO: 220231 - DNA, 1465 bp, Zea Mays
gttcgtcctcgtcctccccgcgtatcatctgctctgcattctagaattgctcccggagtggtaccatgccatcttttaaatgcactgcacagggtagctggcgtgctaccccttagtctacggttgaagtgcctaactgcctatagtcatgggggtgattcatgttactactgtttagtctgcagcaggccagcagcggaggtgaagacgcgtgtttgctgtcgagggtcgagaataagaagccatttgctcctccaagggaggtacatgtccaggttacacattcaatgccacctcacaagattgaaattttcaagtcacttgatgattgggctagagataatatcttgacacatctcaagccagtcgagaagtgttggcagccacaggatttcctccctgacccagcatctgaaggatttcatgatgaagttaaggagctcagagaacgtgccaaggaaatccctgatgattattttgtttgtttggtgggagacatgattaccgaggaagctctaccaacataccagactatgcttaacaccctcgatggtgtcagagatgagacaggtgcaagccccactgcctgggctgtttggacgagggcatggactgctgaggagaacaggcatggtgatctgctcaacaagtatatgtacctcactgggagggtggatatgaggcagattgagaagacaattcagtatcttattggctctggaatggatcctaggactgagaataatccttatcttggtttcatctacacctccttccaagagcgggcgaccttcatctcacacgggaacactgctcgtcacgccaaggactttggcgacttaaagcttgcacaaatctgcggcatcattgcctcggatgagaagcgacatgaaactgcgtacaccaagatcgtggagaagctgtttgagatcgaccctgatggtaccgtggtcgctctggctgacatgatgaggaagaagatctcaatgcctgcccacctgatgtttgacgggcaggacgacaagctgttcgagcacttctccatggtcgcgcagaggcttggcgtttacactgccagggactacgccgacatcctcgagttcctcgtcgacaggtggaaggtggtgaacctgactggtctgtcgggtgaagggaacaaggcgcaggactacctttgcacccttgcttcaaggatcaggaggctggaggagagggcccagagcagagccaagaaagcaggcacgctgcctttcagctgggtatacggtagggaccgaccatgccgttctttgtctgtcgctggcggtgtgtttcggtatgttatttcagtcgttcagatctgttaaaaattttgtgagctatgcagttcagttcagctctgttctgttcgttagataccctaggtttctccgtggcctgaattctgcagtgtcgaaaacaaagcagagctccaactgaagtgtag

SEQ ID NO: 220232 - DNA, 1516 bp, Zea Mays
ctactgtttagtctgcagcaggccagcagcggaggtgaagacgcgtgtttgctgtcgagggtcgagaataagaagccatttgctcctccaagggaggtacatgtccaggttacacattcaatgccacctcacaagattgaaattttcaagtcacttgatgattgggctagagataatatcttgacacatctcaagccagtcgagaagtgttggcagccacaggatttcctccctgacccagcatctgaaggatttcatgatgaagttaaggagctcagagaacgtgccaaggaaatccctgatgattattttgtttgtttggtgggagacatgattaccgaggaagctctaccaacataccagactatgcttaacaccctcgatggtgtcagagatgagacaggtgcaagccccactgcctgggctgtttggacgagggcatggactgctgaggagaacaggcatggtgatctgctcaacaagtatatgtacctcactgggagggtggatatgaggcagattgagaagacaattcagtatcttattggctctggaatggatcctaggactgagaataatccttatcttggtttcatctacacctccttccaagagcgggcgaccttcatctcacacgggaacactgctcgtcacgccaaggactttggcgacttaaagcttgcacaaatctgcggcatcattgcctcggatgagaagcgacatgaaactgcgtacaccaagatcgtggagaagctgtttgagatcgaccctgatggtaccgtggtcgctctggctgacatgatgaggaagaagatctcaatgcctgcccacctgatgtttgacgggcaggacgacaagctgttcgagcacttctccatggtcgcgcagaggcttggcgtttacactgccagggactacgccgacatcctcgagttcctcgtcgacaggtggaaggtggtgaacctgactggtctgtcgggtgaagggaacaaggcgcaggactacctttgcacccttgcttcaaggatcaggaggctggaggagagggcccagagcagagccaagaaagcaggcacgctgcctttcagctgggtatacggtagggacgtccaactgtgagatcggaaacctgctgcggactgcttagacaagacctgctgtgtctgcgttacatagttctccaggttttgaccagatggtcccgtgtcgtcttatagagcgataggagaacgtgttggtctgtggtgtagctttgttttttatttttatttttctgttttgatgtacaacctgtggccgcatgaactggggcgtggagatgggagcgaccatgccgttctttgtctgtcgctggcggtgtgtttcggtatgttatttcagtcgttcagatctgttaaaaattttgtgagctatgcagttcagttcagctctgttctgttcgttagataccctaggtttctccgtggcctgaattctgcagtgtcgaaaacaaagcagagctccaactgaagtgtag

SEQ ID NO: 220233 - DNA, 1513 bp, Zea Mays
agtcatatcatgtcaattcaggaaacacgaggcacttcaaaaccatgattccatagggtcgagaataagaagccatttgctcctccaagggaggtacatgtccaggttacacattcaatgccacctcacaagattgaaattttcaagtcacttgatgattgggctagagataatatcttgacacatctcaagccagtcgagaagtgttggcagccacaggatttcctccctgacccagcatctgaaggatttcatgatgaagttaaggagctcagagaacgtgccaaggaaatccctgatgattattttgtttgtttggtgggagacatgattaccgaggaagctctaccaacataccagactatgcttaacaccctcgatggtgtcagagatgagacaggtgcaagccccactgcctgggctgtttggacgagggcatggactgctgaggagaacaggcatggtgatctgctcaacaagtatatgtacctcactgggagggtggatatgaggcagattgagaagacaattcagtatcttattggctctggaatggatcctaggactgagaataatccttatcttggtttcatctacacctccttccaagagcgggcgaccttcatctcacacgggaacactgctcgtcacgccaaggactttggcgacttaaagcttgcacaaatctgcggcatcattgcctcggatgagaagcgacatgaaactgcgtacaccaagatcgtggagaagctgtttgagatcgaccctgatggtaccgtggtcgctctggctgacatgatgaggaagaagatctcaatgcctgcccacctgatgtttgacgggcaggacgacaagctgttcgagcacttctccatggtcgcgcagaggcttggcgtttacactgccagggactacgccgacatcctcgagttcctcgtcgacaggtggaaggtggtgaacctgactggtctgtcgggtgaagggaacaaggcgcaggactacctttgcacccttgcttcaaggatcaggaggctggaggagagggcccagagcagagccaagaaagcaggcacgctgcctttcagctgggtatacggtagggacgtccaactgtgagatcggaaacctgctgcggactgcttagacaagacctgctgtgtctgcgttacatagttctccaggttttgaccagatggtcccgtgtcgtcttatagagcgataggagaacgtgttggtctgtggtgtagctttgttttttatttttatttttctgttttgatgtacaacctgtggccgcatgaactggggcgtggagatgggagcgaccatgccgttctttgtctgtcgctggcggtgtgtttcggtatgttatttcagtcgttcagatctgttaaaaattttgtgagctatgcagttcagttcagctctgttctgttcgttagataccctaggtttctccgtggcctgaattctgcagtgtcgaaaacaaagcagagctccaactgaagtgtag

SEQ ID NO: 220234 - DNA, 1537 bp, Zea Mays
attaatatgtacatggtgggggccacgtcataatttgtatgggacacagcatacgactgtagtcatgtaatatggaaaagggtcgagaataagaagccatttgctcctccaagggaggtacatgtccaggttacacattcaatgccacctcacaagattgaaattttcaagtcacttgatgattgggctagagataatatcttgacacatctcaagccagtcgagaagtgttggcagccacaggatttcctccctgacccagcatctgaaggatttcatgatgaagttaaggagctcagagaacgtgccaaggaaatccctgatgattattttgtttgtttggtgggagacatgattaccgaggaagctctaccaacataccagactatgcttaacaccctcgatggtgtcagagatgagacaggtgcaagccccactgcctgggctgtttggacgagggcatggactgctgaggagaacaggcatggtgatctgctcaacaagtatatgtacctcactgggagggtggatatgaggcagattgagaagacaattcagtatcttattggctctggaatggatcctaggactgagaataatccttatcttggtttcatctacacctccttccaagagcgggcgaccttcatctcacacgggaacactgctcgtcacgccaaggactttggcgacttaaagcttgcacaaatctgcggcatcattgcctcggatgagaagcgacatgaaactgcgtacaccaagatcgtggagaagctgtttgagatcgaccctgatggtaccgtggtcgctctggctgacatgatgaggaagaagatctcaatgcctgcccacctgatgtttgacgggcaggacgacaagctgttcgagcacttctccatggtcgcgcagaggcttggcgtttacactgccagggactacgccgacatcctcgagttcctcgtcgacaggtggaaggtggtgaacctgactggtctgtcgggtgaagggaacaaggcgcaggactacctttgcacccttgcttcaaggatcaggaggctggaggagagggcccagagcagagccaagaaagcaggcacgctgcctttcagctgggtatacggtagggacgtccaactgtgagatcggaaacctgctgcggactgcttagacaagacctgctgtgtctgcgttacatagttctccaggttttgaccagatggtcccgtgtcgtcttatagagcgataggagaacgtgttggtctgtggtgtagctttgttttttatttttatttttctgttttgatgtacaacctgtggccgcatgaactggggcgtggagatgggagcgaccatgccgttctttgtctgtcgctggcggtgtgtttcggtatgttatttcagtcgttcagatctgttaaaaattttgtgagctatgcagttcagttcagctctgttctgttcgttagataccctaggtttctccgtggcctgaattctgcagtgtcgaaaacaaagcagagctccaactgaagtgtag

SEQ ID NO: 220235 - DNA, 1473 bp, Zea Mays
aatgatcttaatatctgagtgcgcataaatatgttcattgcaaacaaactggagagtactgaggctcatcatcgcaggccttctgcttctgggggtcgagaataagaagccatttgctcctccaagggaggtacatgtccaggttacacattcaatgccacctcacaagattgaaattttcaagtcacttgatgattgggctagagataatatcttgacacatctcaagccagtcgagaagtgttggcagccacaggatttcctccctgacccagcatctgaaggatttcatgatgaagttaaggagctcagagaacgtgccaaggaaatccctgatgattattttgtttgtttggtgggagacatgattaccgaggaagctctaccaacataccagactatgcttaacaccctcgatggtgtcagagatgagacaggtgcaagccccactgcctgggctgtttggacgagggcatggactgctgaggagaacaggcatggtgatctgctcaacaagtatatgtacctcactgggagggtggatatgaggcagattgagaagacaattcagtatcttattggctctggaatggatcctaggactgagaataatccttatcttggtttcatctacacctccttccaagagcgggcgaccttcatctcacacgggaacactgctcgtcacgccaaggactttggcgacttaaagcttgcacaaatctgcggcatcattgcctcggatgagaagcgacatgatgaggaagaagatctcaatgcctgcccacctgatgtttgacgggcaggacgacaagctgttcgagcacttctccatggtcgcgcagaggcttggcgtttacactgccagggactacgccgacatcctcgagttcctcgtcgacaggtggaaggtggtgaacctgactggtctgtcgggtgaagggaacaaggcgcaggactacctttgcacccttgcttcaaggatcaggaggctggaggagagggcccagagcagagccaagaaagcaggcacgctgcctttcagctgggtatacggtagggacgtccaactgtgagatcggaaacctgctgcggactgcttagacaagacctgctgtgtctgcgttacatagttctccaggttttgaccagatggtcccgtgtcgtcttatagagcgataggagaacgtgttggtctgtggtgtagctttgttttttatttttatttttctgttttgatgtacaacctgtggccgcatgaactggggcgtggagatgggagcgaccatgccgttctttgtctgtcgctggcggtgtgtttcggtatgttatttcagtcgttcagatctgttaaaaattttgtgagctatgcagttcagttcagctctgttctgttcgttagataccctaggtttctccgtggcctgaattctgcagtgtcgaaaacaaagcagagctccaactgaagtgtag

SEQ ID NO: 220236 - DNA, 4511 bp, Zea Mays
ctaaaatatcatggctgtatcataactgttgttagggttgtacatgttccgctggttattgatccgcgatttgctggctcattcagcagcatcctgattcgttaggcgtgccgcgtgagccttgctcgctccaatcgatttcgtcgtcgtccgctcgtcgctagctccttcttggtcgctccttcgcccctgctacaatcgatttcgtcgtcttcagcgaggagctggggagtgattgaacgaagccagcgctccctccattgtcgccccgcagatcgatcgaagtcagcaaccagatcagaaagagcaaaagaggcgcccgagtctctacggcggaaagccatggacggcgccgccaactggcgtcccacgcagggagccgaccctgccaccgtcgctgctgtcggcggcgtcgaccctaacgcggctgcccccaccggaagcgactggcgcacccagcttcagcccgaggcgcgccagaggatcgtcaataagataatggagactctgaagaagcacctgccagtatcagtaccggaggggctgactgagcttcacaaaattgccgtgcgatttgaagagaaaatctatactgccgccaccagccagtctgattatctgaggaagatttctctgaaaatgctgtccatggaaagccagaaaaagacacaacagaaccctggaaatgctcaagtgattccaaatcaaaaccctcctggtccaggtagtaatccagcacagtcatcagctatcccgttgatgtctcagcaacagacacggcagccaaatgcttctacatccgttcaaggttctcttcctagtgttggtcagaacttgtcgagtgtcagccagacattgacgctgcagaatctgtctggcatgccacaaaataccatgaacaatggtttagcacaaggtactccacaagatatgtatgctgcacaaagacaaatggcaggtaggcagcagcagcaacaacaacagcaagcacataatcagtttatgtatcaacagcagaaattgttgatgaaccagaaattgcagcagaattcacgtatgcaaccacacattcagcagcagcaaactttgttgcagtcaacacagatgcaatcttcacagcagcccatggtgcaaatgtcatctggccttcagcctgggcagattgccattccacaaactcaatccatggcgatgcagtcagctacacagagtggtattcaacagaatgcactgaattcggtacaacaacctgtgcaatcgttactccagcagcctacaccgtctgtggtaaggcagcagcaacatccacagtccatgcaccagcagtcttctctgcagcaaactcaaccaactcaacagcccaacattcctttgcaacagcagccacaacaattaatgggccatcagtcaaatttacagcaaaatcagttagtgaatcaacagagtggtgctgtggagatgcaacagcaacaaaggctaccagttcagtcaactaatcttttgaatatgcatcaaacgcagcagatgatgaaccagcaatctatgcccttgcaccagccacaacaattggcaaaccagggaaatgtgtcaagtctaaatcagcagcagcagcagcttcttggaaccgtgccaaatgtccgtatgcatatgttacagcaacaaaagccaattcagcaaccacagcagcaacagcatgctcagcagacatcaatgggtttgatgcaacctcagtctcagcagaatcagcttcagcaacctcaacaacatatgatgtcgcagttccagtctcagcctaatcaaacgcagcaacaattgggaatgcaacaaaggctccagacttcagctggcatgctcttgcaacaaaataatattgatcaacaaaagcagtacgttcaggcacagaaggtcctccaagaagcacccagtacatctgtggattccactgctcaaactggtcatccagggacaggtgattcgcaagaggagttatatcaaatgattaagagtttaaaggaccaatactttgcggaattgaatgatgtgtacaataagatatccatgaagatacaaaatattgacaaccacatgcccgctcaaaagtcagcggagcagtatgaaaggctgaaaggctttaaaggaatgttggagcgcatattgcatttcctgcaagctaacaagagcagcattcagccaggttttagggaaaaaatctctattttcgagaggcaaattctcagtatcatgagttcacaaagaaggaagcctgtgcaggcacctggacagcaaacgtttcagcaatctggtgggcaagctcctagctctaatatgtcacagcagcatcagacttcccaaggtttgcagcagcatgatagtcatactaatcagatgcctcaagcaagtttaccaagtatgaacacaggagtaccgacctctggagcacctggcattcagcatgtacctgcgcctcaagcatcaaactttggtgttccaacaacacagcaaaatgtcacaaatgcaccgcaggctgcctctaatccggagaatgctcagggaaataattttaatcctgtgcagcatggttcaatgggtactgcattgcaacagggaagcactggtcccatgcagggtgcattgaatgcacagcatcagtccaatagtaacatgatatccaacaatgcaatgagtacaatgcagactaataccaatgccatgcaagcaaacgtgaattcattgcagcagctaaagcaacatcaggagcatcagatgatgcaaaatcagcaaatgaagcagcgtcagcagatgctgcagcagatgcagcaaaagaaaatacttcaacaacagctcccaatacaacaactacagaaacaacagcagcaagggccgattcaggttcaacaacttcattctggaaatgatgtgaatgagctaaaggtcaggcaaggagctgcaatcaaatctggaatgtatcaaccgctgaaccagcgtaactattatcagcagataaaacggggggatgtctttccaatttcttctccgcaaaacctccaagcatcgtccccacaaatttcacactattctcatgttgatcagcacagtctgttgcaatctcaagtgaaaaccgggacaccgttgcattcagctaactcaccatttgtcccatctccatctcctcctgttgccccatcaccggtcccactggattcagataaaccactctccaacctatcttcactcactagtgctgggcaggctggacatcagcaaacatcccttgcacctctaacacaatctatagctgttaacacaccaggtatatcagcgtcacccttgcttgcagaattcacaagtgctgatggaggtcaggttagcgtaccaactcaagttccaacaaaatcaagcgcagcagaaaggcctctcgatcgcttgcttaaagcattgagaacaacacagcctgagtcccttagtgctgcagttagcgatattggatctgtcgtgagtatgattgacaggattgctggatcagcgcctggtaatggttccagagctgctgtgggtgaagatcttgtcgctatgacaaagtgccgcttgcaagccaggaacttcataacccatgatgggagtggtgcatcaaagagaatgaagcgggacacaggtgctatgcctcttaatgtgtcatccgctggaagtttgaatgacagcttgaagcaatcatatactgttggcactccagagctacaatcaactgcaacctcacgtgtcaagtgtcaaagggctgaggtaaaccatgttctgttagaggagattcaggagataaacaaacagcttatagatacagagctccatgtctctgaggatgatgctgagtccttcactacatctgatatggccgaagggacagtcattaaatgcacattcactgctgttgctgttagccccagcttgaaatccatgtttgcttcagcgcagatgagtccaattttgccgttgaggttgcttgttcctggtagctacccaaaatgctccccggtgcttctagacaagtttcctgatgaacaatgcaggaactcggatgacctgtctacgaaggccaagtcaaagttcagtgtgttgctccggggtctagctgagcccatgtcattgcgagaaatcgcaaggacgtgggatgcttgcgcccggaaagtgattgcagagtatgcccagcaaactggaggaggcagtttcagctcgagctatggttgctgggaaagctgcgttggcgcttcataagtttattgtatctattactccgtagtatatttattattctttattacactaagcatttatgtgttgagcaaaagaaaataacagtttatcttccttttggtatcgagtcactgttagcttgataaataagatcgtgtacagtacagtgtatggagcaagcttgggtgcttcagcccggttaatatttactatcttgtatgctttgcctctacttacataacttgcgcggttaccttgtttttttg

SEQ ID NO: 220237 - DNA, 4502 bp, Zea Mays
aaaatatcatggctgtatcataactgttgttagggttgtacatgttccgctggttattgatccgcgatttgctggctcattcagcagcatcctgattcgttaggcgtgccgcgtgagccttgctcgctccaatcgatttcgtcgtcgtccgctcgtcgctagctccttcttggtcgctccttcgcccctgctacaatcgatttcgtcgtcttcagcgaggagctggggagtgattgaacgaagccagcgctccctccattgtcgccccgcagatcgatcgaagtcagcaaccagatcagaaagagcaaaagaggcgcccgagtctctacggcggaaagccatggacggcgccgccaactggcgtcccacgcagggagccgaccctgccaccgtcgctgctgtcggcggcgtcgaccctaacgcggctgcccccaccggaagcgactggcgcacccagcttcagcccgaggcgcgccagaggatcgtcaataagataatggagactctgaagaagcacctgccagtatcagtaccggaggggctgactgagcttcacaaaattgccgtgcgatttgaagagaaaatctatactgccgccaccagccagtctgattatctgaggaagatttctctgaaaatgctgtccatggaaagccagaaaaagacacaacagaaccctggaaatgctcaagtgattccaaatcaaaaccctcctggtccagtaatccagcacagtcatcagctatcccgttgatgtctcagcaacagacacggcagccaaatgcttctacatccgttcaaggttctcttcctagtgttggtcagaacttgtcgagtgtcagccagacattgacgctgcagaatctgtctggcatgccacaaaataccatgaacaatggtttagcacaaggtactccacaagatatgtatgctgcacaaagacaaatggcaggtaggcagcagcagcaacaacaacagcaagcacataatcagtttatgtatcaacagcagaaattgttgatgaaccagaaattgcagcagaattcacgtatgcaaccacacattcagcagcagcaaactttgttgcagtcaacacagatgcaatcttcacagcagcccatggtgcaaatgtcatctggccttcagcctgggcagattgccattccacaaactcaatccatggcgatgcagtcagctacacagagtggtattcaacagaatgcactgaattcggtacaacaacctgtgcaatcgttactccagcagcctacaccgtctgtggtaaggcagcagcaacatccacagtccatgcaccagcagtcttctctgcagcaaactcaaccaactcaacagcccaacattcctttgcaacagcagccacaacaattaatgggccatcagtcaaatttacagcaaaatcagttagtgaatcaacagagtggtgctgtggagatgcaacagcaacaaaggctaccagttcagtcaactaatcttttgaatatgcatcaaacgcagcagatgatgaaccagcaatctatgcccttgcaccagccacaacaattggcaaaccagggaaatgtgtcaagtctaaatcagcagcagcagcagcttcttggaaccgtgccaaatgtccgtatgcatatgttacagcaacaaaagccaattcagcaaccacagcagcaacagcatgctcagcagacatcaatgggtttgatgcaacctcagtctcagcagaatcagcttcagcaacctcaacaacatatgatgtcgcagttccagtctcagcctaatcaaacgcagcaacaattgggaatgcaacaaaggctccagacttcagctggcatgctcttgcaacaaaataatattgatcaacaaaagcagtacgttcaggcacagaaggtcctccaagaagcacccagtacatctgtggattccactgctcaaactggtcatccagggacaggtgattcgcaagaggagttatatcaaatgattaagagtttaaaggaccaatactttgcggaattgaatgatgtgtacaataagatatccatgaagatacaaaatattgacaaccacatgcccgctcaaaagtcagcggagcagtatgaaaggctgaaaggctttaaaggaatgttggagcgcatattgcatttcctgcaagctaacaagagcagcattcagccaggttttagggaaaaaatctctattttcgagaggcaaattctcagtatcatgagttcacaaagaaggaagcctgtgcaggcacctggacagcaaacgtttcagcaatctggtgggcaagctcctagctctaatatgtcacagcagcatcagacttcccaaggtttgcagcagcatgatagtcatactaatcagatgcctcaagcaagtttaccaagtatgaacacaggagtaccgacctctggagcacctggcattcagcatgtacctgcgcctcaagcatcaaactttggtgttccaacaacacagcaaaatgtcacaaatgcaccgcaggctgcctctaatccggagaatgctcagggaaataattttaatcctgtgcagcatggttcaatgggtactgcattgcaacagggaagcactggtcccatgcagggtgcattgaatgcacagcatcagtccaatagtaacatgatatccaacaatgcaatgagtacaatgcagactaataccaatgccatgcaagcaaacgtgaattcattgcagcagctaaagcaacatcaggagcatcagatgatgcaaaatcagcaaatgaagcagcgtcagcagatgctgcagcagatgcagcaaaagaaaatacttcaacaacagctcccaatacaacaactacagaaacaacagcagcaagggccgattcaggttcaacaacttcattctggaaatgatgtgaatgagctaaaggtcaggcaaggagctgcaatcaaatctggaatgtatcaaccgctgaaccagcgtaactattatcagcagataaaacggggggatgtctttccaatttcttctccgcaaaacctccaagcatcgtccccacaaatttcacactattctcatgttgatcagcacagtctgttgcaatctcaagtgaaaaccgggacaccgttgcattcagctaactcaccatttgtcccatctccatctcctcctgttgccccatcaccggtcccactggattcagataaaccactctccaacctatcttcactcactagtgctgggcaggctggacatcagcaaacatcccttgcacctctaacacaatctatagctgttaacacaccaggtatatcagcgtcacccttgcttgcagaattcacaagtgctgatggaggtcaggttagcgtaccaactcaagttccaacaaaatcaagcgcagcagaaaggcctctcgatcgcttgcttaaagcattgagaacaacacagcctgagtcccttagtgctgcagttagcgatattggatctgtcgtgagtatgattgacaggattgctggatcagcgcctggtaatggttccagagctgctgtgggtgaagatcttgtcgctatgacaaagtgccgcttgcaagccaggaacttcataacccatgatgggagtggtgcatcaaagagaatgaagcgggacacaggtgctatgcctcttaatgtgtcatccgctggaagtttgaatgacagcttgaagcaatcatatactgttggcactccagagctacaatcaactgcaacctcacgtgtcaagtgtcaaagggctgaggtaaaccatgttctgttagaggagattcaggagataaacaaacagcttatagatacagagctccatgtctctgaggatgatgctgagtccttcactacatctgatatggccgaagggacagtcattaaatgcacattcactgctgttgctgttagccccagcttgaaatccatgtttgcttcagcgcagatgagtccaattttgccgttgaggttgcttgttcctggtagctacccaaaatgctccccggtgcttctagacaagtttcctgatgaacaatggaactcggatgacctgtctacgaaggccaagtcaaagttcagtgtgttgctccggggtctagctgagcccatgtcattgcgagaaatcgcaaggacgtgggatgcttgcgcccggaaagtgattgcagagtatgcccagcaaactggaggaggcagtttcagctcgagctatggttgctgggaaagctgcgttggcgcttcataagtttattgtatctattactccgtagtatatttattattctttattacactaagcatttatgtgttgagcaaaagaaaataacagtttatcttccttttggtatcgagtcactgttagcttgataaataagatcgtgtacagtacagtgtatggagcaagcttgggtgcttcagcccggttaatatttactatcttgtatgctttgcctctacttacataacttgcgcggttaccttgtttttttg

SEQ ID NO: 220238 - DNA, 1491 bp, Zea Mays
cttattctcaagcttcatactatgtctctctgatattggaagataaaaaatggcctgtcgctgagaaacttgaagctctttctaagcttgaatcagatttttttgcaaagtttgtaccacacctactatcgaagacatttttggaatgttatgttcaagggaacattgaaccaagtgaagcaaaatctgtcgtacaagagatcgaaaacactatatttaatgcccccaattctttgttcaaatccatgtctccatcagagtatctgactaaaagagttgtcatgcttgaaaatgagttaaaatgctactaccaaactgagggattaaaccagaagaatcagaattcatcagttatccaatatattcaggtacatcaggatgacgccattttgaatatcaaacttgagctgttctctctaatagcaagccagccagccttcaaccagctgcgaactgttgaacagcttggatccgactatggagtcctggcactccaggtggttatacagtccacagtaaaggtacacgttaacctagagtagtttttttatttttgaaaagaacttatggtacttgttgctcctgctggtattttgttgcatgcctaggatccttcgtatcttgatggtagagttgatgaattcttcaagatgtttgaaagcaaaatctatgaactctccgacaaggacttcaagagaaatgtgaaatcactaattgattctaaactggagaagtttaaaaacttatgggaggaatcagatttctactggggagagattcaggcaggaactctgaagtttgatagggtcgagtctgaggtcactatgctaagagagctcaagaaagaagaattcatagagtacttcgaccagtacataaaagtggacgcgcctcaaaggaggacactaagcgtgcaagtcttcggcggcaaccattcggcagaattcaagacggcgatcgccgaagccgatccgcccaaaatgtacagaattacagacatattcggcttcaaacgatcgaggccgctgtacagctcactcaagggaggtccgggcaggatcaccatggactgacagccatcacgcagctattccctagttttcatgtacgtacgtagtgtaacggcctgttcatacgcctgaattccatcctgaatcctgcatcagattcgattgcacgattgatgctattcttaactgatggtttgttatgttaaccaataatgcacgacagcgtgtcactttctgggcagatatagggggctgtataaataaagtcatgtatgttcgcatgtctgtatgcatttcttctgacagctatgcattatgtacagttacagttacagttacatatccagtgcactaagaactagaaggcgccatgaggagcggagagaccaacacaaacagcatcttctacacaccataccaatatacagtttgggactgacagcccgtgccggacgccgtccggagaaccgtcaaggcgccg

SEQ ID NO: 220239 - DNA, 1412 bp, Zea Mays
ccgacaaccttattctcaagcttcatactatgtctctctgatattggaagataaaaaatggcctgtcgctgagaaacttgaagctctttctaagcttgaatcagatttttttgcaaagtttgtaccacacctactatcgaagacatttttggaatgttatgttcaagggaacattgaaccaagtgaagcaaaatctgtcgtacaagagatcgaaaacactatatttaatgcccccaattctttgttcaaatccatgtctccatcagagtatctgactaaaagagttgtcatgcttgaaaatgagttaaaatgctactaccaaactgagggattaaaccagaagaatcagaattcatcagttatccaatatattcaggtacatcaggatgacgccattttgaatatcaaacttgagctgttctctctaatagcaagccagccagccttcaaccagctgcgaactgttgaacagcttgggtatataacaagtctttctctgagatccgactatggagtcctggcactccaggatccttcgtatcttgatggtagagttgatgaattcttcaagatgtttgaaagcaaaatctatgaactctccgacaaggacttcaagagaaatgtgaaatcactaattgattctaaactggagaagtttaaaaacttatgggaggaatcagatttctactggggagagattcaggcaggaactctgaagtttgatagggtcgagtctgaggtcactatgctaagagagctcaagaaagaagaattcatagagtacttcgaccagtacataaaagtggacgcgcctcaaaggaggacactaagcgtgcaagtcttcggcggcaaccattcggcagaattcaagacggcgatcgccgaagccgatccgcccaaaatgtacagaattacagacatattcggcttcaaacgatcgaggccgctgtacagctcactcaagggaggtccgggcaggatcaccatggactgacagccatcacgcagctattccctagttttcatgtacgtacgtagtgtaacggcctgttcatacgcctgaattccatcctgaatcctgcatcagattcgattgcacgattgatgctattcttaactgatggtttgttatgttaaccaataatgcacgacagcgtgtcactttctgggcagatatagggggctgtataaataaagtcatgtatgttcgcatgtctgtatgcatttcttctgacagctatgcattatgtacagttacagttacagttacatatccagtgcactaagaactagaaggcgccatgaggagcggagagaccaacacaaacagcatcttctacacaccataccaatatacagtttgggactgacagcccgtgccggacgccgtccggagaaccgtcaaggcgccg

SEQ ID NO: 220240 - DNA, 1498 bp, Zea Mays
cttaatctcgctggcaggacgacgttggaaacttctgtcaaggactaccagaatttcaatttccgacaaccttattctcaagcttcatactatgtctctctgatattggaagataaaaaatggcctgtcgctgagaaacttgaagctctttctaagcttgaatcagatttttttgcaaagtttgtaccacacctactatcgaagacatttttggaatgttatgttcaagggaacattgaaccaagtgaagcaaaatctgtcgtacaagagatcgaaaacactatatttaatgcccccaattctttgttcaaatccatgtctccatcagagtatctgactaaaagagttgtcatgcttgaaaatgagttaaaatgctactaccaaactgagggattaaaccagaagaatcagaattcatcagttatccaatatattcaggtacatcaggatgacgccattttgaatatcaaacttgagctgttctctctaatagcaagccagccagccttcaaccagctgcgaactgttgaacagcttgggtatataacaagtctttctctgagatccgactatggagtcctggcactccaggtggttatacagtccacagtaaaggatccttcgtatcttgatggtagagttgatgaattcttcaagatgtttgaaagcaaaatctatgaactctccgacaaggacttcaagagaaatgtgaaatcactaattgattctaaactggagaagtttaaaaacttatgggaggaatcagatttctactggggagagattcaggcaggaactctgaagtttgatagggtcgagtctgaggtcactatgctaagagagctcaagaaagaagaattcatagagtacttcgaccagtacataaaagtggacgcgcctcaaaggaggacactaagcgtgcaagtcttcggcggcaaccattcggcagaattcaagacggcgatcgccgaagccgatccgcccaaaatgtacagaattacagacatattcggcttcaaacgatcgaggccgctgtacagctcactcaagggaggtccgggcaggatcaccatggactgacagccatcacgcagctattccctagttttcatgtacgtacgtagtgtaacggcctgttcatacgcctgaattccatcctgaatcctgcatcagattcgattgcacgattgatgctattcttaactgatggtttgttatgttaaccaataatgcacgacagcgtgtcactttctgggcagatatagggggctgtataaataaagtcatgtatgttcgcatgtctgtatgcatttcttctgacagctatgcattatgtacagttacagttacagttacatatccagtgcactaagaactagaaggcgccatgaggagcggagagaccaacacaaacagcatcttctacacaccataccaatatacagtttgggactgacagcccgtgccggacgccgtccggagaaccgtcaaggcgccg

SEQ ID NO: 220241 - DNA, 1527 bp, Zea Mays
cgggacgggccatgccgtcacagtgttttccacggatcacggctgcacggcaccgcccctcaccggtccatggaccgttcccacgcgggtctcgccaccctccgcggctccccctacaaaccgtaaccgcgacgcgaaccggccccaccgcaaccaccccccaatttctgagaaaatggcgagaagtgcgggaactaggaggcgtgtggctcgccagctcaagtccacacatcccattccttcataccgatggaagtcaaagcccatgaaaaagccgatgaaaaaatccaaccgaaagcaagtgttgccaaccttgcaaaagatggactgggaagatgccaattgctctgtgtgcatggaatacccacataatgctgtgctcatcctttgctcatcccatgataagggttgtcgtccttatatgtgtggaactagctaccgccactctaattgcttggatcagttcaagaaagcttacaccaagggggcattgcttgaggaagttcctgcaaatagtgttggctctaatctggattcggcgccattggctgcagaaaaaactgactccattgaccttgcatgtccattgtgtcgtggcaaggtgaaagggtggacggtggtggaaccagctcgaagctacctcaatggaaaacgaagaacatgcatgcaggatggttgctcatttgtggggacctacaaggagctccgcaagcatgtcaagttggaacaccctcttgcaaagccaagggaagttgatcctgtccttgagcaaaaatggagattgctcgagattgaaagagagcggcaagatgcgctcagcacgatcacggcaacaatgggcagagccgttgtttttggtgattatgtgctagacttggaggatggaatggactccgaggatgttgacagtgatgctgataatgatggccgtgggacagaaaacactcgtaggatgctactatttattatgcgccaagttgctcaacatcaccaaaaccaaaggctccagaatgcgactggtgcatctgacaatgctgaggacaattatgtggtgagcagtggtgccaatggaaccacaccatactcttaccccttggagggggaggacgagaatggtatggttgtggccggaggcagaagcactgatgtgctgagaccagagaggaggcgccgtcgtcgccgcaggaaccgtgggagattgtttttaggtgctaattgagaggacaggtggccaggtagggtttagccgccagaggagtacatacagaaatgcttccctggtgcctggcattcatcaattcctgtctcaatttacttgatcatgatcatgtaccaagtagttatcttaacatcagctcattgtcataaatttatggtatctcacattcttcgttgaaaaaggaaaacaccgcatccatctcttgcggtttgtgtagcatctatttctgtctattgcttttgttaaagcatttgtttggagatcgtattagattttttaagtgaaacatatctcgttcgatcaggttt

SEQ ID NO: 220242 - DNA, 1702 bp, Zea Mays
ccgcccttcccttggctacctctgtctgtctgtgtcttgtccagtccgggtctccagggctccggcaccggcaggcagagagctaccaaaccccaccaccacgaacggccgccgccgacgagacgggggcgcatggcgactgcatcctccttcaccgccatcttcttcagcagcgccttcgcggcctgcttcgcggaggtgtgcaccattcctttggacacagccaaagtgcggctccagctgcaaaggaaggcaccactaccgtcgccaccagtggctgcagcagctgctgctggaggcacgctagccacaatcatgtgcatcgccagggaggaaggggttgccgcgctctggaagggcgtcatccccggcctccaccgtcagttcctctatggcggcctccgcatcggcttgtatgagcctgtgaaggctttcttcgtcggaggcgctgttgtgggtgatgtcagtttactaagcaagatccttgctgcacttaccacaggtgtgatagcgattgttgtggcaaatccaactgatcttgtcaaagttaggttgcaagctgatggaaaagctaacactatcaagaggagttattctggagcccttaatgcatacgctacaataatcagacaggaaggtattggagctttgtggactggccttggtccaaatgtcgcacgcaatgccataattaacgctgccgagttggccagctatgatcagttcaaacagatgtttctaaaacttcctgggtttactgataacgtttttacgcatcttttagctggacttggtgctgggttttttgctgtttgcattggctctccggtggatgtggtgaaatcaagaatgatgggtgattcaacgtacagaagtactcttgactgttttaccaagacattaaagaatgatgtatggaatcctttccctgtttttttcttaatttcttgtgtctattgctctatactactacaaatctttttccacttgttcaaaattaagaagtcattccacttgggtctttgttgtcaagcttatatgtgtatgtgtccagtatgtcaatatccatctaccatgtacccttgtcactttaaacttccatattctgatgtacaacttgttcgcttggttttaatccgtatcggtttctactgcttatacaatatttttgtctctatggattacagctgcagcagtccaaacagtcggctttaatccgaagcgtattgtgctttgaccattaattcagttgaaaagttggttacagggacctggtgctttctacaagggattcattgcaaacttttgtcggattgggtcatggaatgtgataatgttcttaactctggaacaggtcaaaagattctttctatgaagagatgtctgcactgcaagtagggattgtgtgggacaagggtatgctgatatatatgggcggcataattgcatgattatttgaagctacaggtttgtcaaccaacagaaagcagccatatatgccatactgccacctacgtctggctcttagattacatatgacaatatgttctcatgttgcattttgattattatgtggcgatgctgtaatatttttgtatcacaaattgatcatacagaccactgtgttggtatattgtagagagcgacactgttcactacttcactgcaagttgacgttcatgccgaaacacttatgaagttt

SEQ ID NO: 220243 - DNA, 1375 bp, Zea Mays
ccgcccttcccttggctacctctgtctgtctgtgtcttgtccagtccgggtctccagggctccggcaccggcaggcagagagctaccaaaccccaccaccacgaacggccgccgccgacgagacgggggcgcatggcgactgcatcctccttcaccgccatcttcttcagcagcgccttcgcggcctgcttcgcggaggtgtgcaccattcctttggacacagccaaagtgcggctccagctgcaaaggaaggcaccactaccgtcgccaccagtggctgcagcagctgctgctggaggcacgctagccacaatcatgtgcatcgccagggaggaaggggttgccgcgctctggaagggcgtcatccccggcctccaccgtcagttcctctatggcggcctccgcatcggcttgtatgagcctgtgaaggctttcttcgtcggaggcgctgttgtgggtgatgtcagtttactaagcaagatccttgctgcacttaccacaggtgtgatagcgattgttgtggcaaatccaactgatcttgtcaaagttaggttgcaagctgatggaaaagctaacactatcaagaggagttattctggagcccttaatgcatacgctacaataatcagacaggaaggtattggagctttgtggactggccttggtccaaatgtcgcacgcaatgccataattaacgctgccgagttggccagctatgatcagttcaaacagctggacttggtgctgggttttttgctgtttgcattggctctccggtggatgtggtgaaatcaagaatgatgggtgattcaacgtacagaagtactcttgactgttttaccaagacattaaagaatgatctgcagcagtccaaacagtcggctttaatccgaagcgtattgtgctttgaccattaattcagttgaaaagttggttacagggacctggtgctttctacaagggattcattgcaaacttttgtcggattgggtcatggaatgtgataatgttcttaactctggaacaggtcaaaagattctttctatgaagagatgtctgcactgcaagtagggattgtgtgggacaagggtatgctgatatatatgggcggcataattgcatgattatttgaagctacaggtttgtcaaccaacagaaagcagccatatatgccatactgccacctacgtctggctcttagattacatatgacaatatgttctcatgttgcattttgattattatgtggcgatgctgtaatatttttgtatcacaaattgatcatacagaccactgtgttggtatattgtagagagcgacactgttcactacttcactgcaagttgacgttcatgccgaaacacttatgaagttt

SEQ ID NO: 220244 - DNA, 1322 bp, Zea Mays
ccgcccttcccttggctacctctgtctgtctgtgtcttgtccagtccgggtctccagggctccggcaccggcaggcagagagctaccaaaccccaccaccacgaacggccgccgccgacgagacgggggcgcatggcgactgcatcctccttcaccgccatcttcttcagcagcgccttcgcggcctgcttcgcggagccaaagtgcggctccagctgcaaaggaaggcaccactaccgtcgccaccagtggctgcagcagctgctgctggaggcacgctagccacaatcatgtgcatcgccagggaggaaggggttgccgcgctctggaagggcgtcatccccggcctccaccgtcagttcctctatggcggcctccgcatcggcttgtatgagcctgtgaaggctttcttcgtcggaggcgctgttgtgggtgatgtcagtttactaagcaagatccttgctgcacttaccacaggtgtgatagcgattgttgtggcaaatccaactgatcttgtcaaagttaggttgcaagctgatggaaaagctaacactatcaagaggagttattctggagcccttaatgcatacgctacaataatcagacaggaaggtattggagctttgtggactggccttggtccaaatgtcgcacgcaatgccataattaacgctgccgagttggccagctatgatcagttcaaacagatgtttctaaaacttcctgggtttactgataacgtttttacgcatcttttagctggacttggtgctgggttttttgctgtttgcattggctctccggtggatgtggtgaaatcaagaatgatgggtgattcaacgtacagaagtactcttgactgttttaccaagacattaaagaatgatggacctggtgctttctacaagggattcattgcaaacttttgtcggattgggtcatggaatgtgataatgttcttaactctggaacaggtcaaaagattctttctatgaagagatgtctgcactgcaagtagggattgtgtgggacaagggtatgctgatatatatgggcggcataattgcatgattatttgaagctacaggtttgtcaaccaacagaaagcagccatatatgccatactgccacctacgtctggctcttagattacatatgacaatatgttctcatgttgcattttgattattatgtggcgatgctgtaatatttttgtatcacaaattgatcatacagaccactgtgttggtatattgtagagagcgacactgttcactacttcactgcaagttgacgttcatgccgaaacacttatgaagttt

SEQ ID NO: 220245 - DNA, 1295 bp, Zea Mays
ccgcccttcccttggctacctctgtctgtctgtgtcttgtccagtccgggtctccagggctccggcaccggcaggcagagagctaccaaaccccaccaccacgaacggccgccgccgacgagacgggggcgcatggcgactgcatcctccttcaccgccatcttcttcagcagcgccttcgcggcctgcttcgcggaggtgtgcaccattcctttggacacagccaaagtgcggctccagctgcaaaggaaggcaccactaccgtcgccaccagtggctgcagcagctgctgctggaggcacgctagccacaatcatgtgcatcgccagggaggaaggggttgccgcgctctggaagggcgtcatccccggcctccaccgtcagttcctctatggcggcctccgcatcggcttgtatgagcctgtgaaggctttcttcgtcggaggcgctgttgtgggtgatgtcagtttactaagcaagatccttgctgcacttaccacaggtgtgatagcgattgttgtggcaaatccaactgatcttgtcaaagttaggttgcaagctgatggaaaagctaacactatcaagaggagttattctggagcccttaatgcatacgctacaataatcagacaggaaggtattggagctttgtggactggccttggtccaaatgtcgcacgcaatgccataattaacgctgccgagttggccagctatgatcagttcaaacagctggacttggtgctgggttttttgctgtttgcattggctctccggtggatgtggtgaaatcaagaatgatgggtgattcaacgtacagaagtactcttgactgttttaccaagacattaaagaatgatggacctggtgctttctacaagggattcattgcaaacttttgtcggattgggtcatggaatgtgataatgttcttaactctggaacaggtcaaaagattctttctatgaagagatgtctgcactgcaagtagggattgtgtgggacaagggtatgctgatatatatgggcggcataattgcatgattatttgaagctacaggtttgtcaaccaacagaaagcagccatatatgccatactgccacctacgtctggctcttagattacatatgacaatatgttctcatgttgcattttgattattatgtggcgatgctgtaatatttttgtatcacaaattgatcatacagaccactgtgttggtatattgtagagagcgacactgttcactacttcactgcaagttgacgttcatgccgaaacacttatgaagttt

SEQ ID NO: 220246 - DNA, 1416 bp, Zea Mays
cgcccttcccttggctacctctgtctgtctgtgtcttgtccagtccgggtctccagggctccggcaccggcaggcagagagctaccaaaccccaccaccacgaacggccgccgccgacgagacgggggcgcatggcgactgcatcctccttcaccgccatcttcttcagcagcgccttcgcggcctgcttcgcggaggtgtgcaccattcctttggacacagccaaagtgcggctccagctgcaaaggaaggcaccactaccgtcgccaccagtggctgcagcagctgctgctggaggcacgctagccacaatcatgtgcatcgccagggaggaaggggttgccgcgctctggaagggcgtcatccccggcctccaccgtcagttcctctatggcggcctccgcatcggcttgtgaaggctttcttcgtcggaggcgctgttgtgggtgatgtcagtttactaagcaagatccttgctgcacttaccacaggtgtgatagcgattgttgtggcaaatccaactgatcttgtcaaagttaggttgcaagctgatggaaaagctaacactatcaagaggagttattctggagcccttaatgcatacgctacaataatcagacaggaaggtattggagctttgtggactggccttggtccaaatgtcgcacgcaatgccataattaacgctgccgagttggccagctatgatcagttcaaacagatgtttctaaaacttcctgggtttactgataacgtttttacgcatcttttagctggacttggtgctgggttttttgctgtttgcattggctctccggtggatgtggtgaaatcaagaatgatgggtgattcaacgtacagaagtactcttgactgttttaccaagacattaaagaatgatctgcagcagtccaaacagtcggctttaatccgaagcgtattgtgctttgaccattaattcagttgaaaagttggttacagggacctggtgctttctacaagggattcattgcaaacttttgtcggattgggtcatggaatgtgataatgttcttaactctggaacaggtcaaaagattctttctatgaagagatgtctgcactgcaagtagggattgtgtgggacaagggtatgctgatatatatgggcggcataattgcatgattatttgaagctacaggtttgtcaaccaacagaaagcagccatatatgccatactgccacctacgtctggctcttagattacatatgacaatatgttctcatgttgcattttgattattatgtggcgatgctgtaatatttttgtatcacaaattgatcatacagaccactgtgttggtatattgtagagagcgacactgttcactacttcactgcaagttgacgttcatgccgaaacacttatgaagttt

SEQ ID NO: 220247 - DNA, 1268 bp, Zea Mays
gcccttcccttggctacctctgtctgtctgtgtcttgtccagtccgggtctccagggctccggcaccggcaggcagagagctaccaaaccccaccaccacgaacggccgccgccgacgagacgggggcgcatggcgactgcatcctccttcaccgccatcttcttcagcagcgccttcgcggcctgcttcgcggagccaaagtgcggctccagctgcaaaggaaggcaccactaccgtcgccaccagtggctgcagcagctgctgctggaggcacgctagccacaatcatgtgcatcgccagggaggaaggggttgccgcgctctggaagggcgtcatccccggcctccaccgtcagttcctctatggcggcctccgcatcggcttgtatgagcctgtgaaggctttcttcgtcggaggcgctgttgtgggtgatgtcagtttactaagcaagatccttgctgcacttaccacaggtgtgatagcgattgttgtggcaaatccaactgatcttgtcaaagttaggttgcaagctgatggaaaagctaacactatcaagaggagttattctggagcccttaatgcatacgctacaataatcagacaggaaggtattggagctttgtggactggccttggtccaaatgtcgcacgcaatgccataattaacgctgccgagttggccagctatgatcagttcaaacagctggacttggtgctgggttttttgctgtttgcattggctctccggtggatgtggtgaaatcaagaatgatgggtgattcaacgtacagaagtactcttgactgttttaccaagacattaaagaatgatggacctggtgctttctacaagggattcattgcaaacttttgtcggattgggtcatggaatgtgataatgttcttaactctggaacaggtcaaaagattctttctatgaagagatgtctgcactgcaagtagggattgtgtgggacaagggtatgctgatatatatgggcggcataattgcatgattatttgaagctacaggtttgtcaaccaacagaaagcagccatatatgccatactgccacctacgtctggctcttagattacatatgacaatatgttctcatgttgcattttgattattatgtggcgatgctgtaatatttttgtatcacaaattgatcatacagaccactgtgttggtatattgtagagagcgacactgttcactacttcactgcaagttgacgttcatgccgaaacacttatgaagttt

SEQ ID NO: 220248 - DNA, 1645 bp, Zea Mays
cttcccttggctacctctgtctgtctgtgtcttgtccagtccgggtctccagggctccggcaccggcaggcagagagctaccaaaccccaccaccacgaacggccgccgccgacgagacgggggcgcatggcgactgcatcctccttcaccgccatcttcttcagcagcgccttcgcggcctgcttcgcggaggtgtgcaccattcctttggacacagccaaagtgcggctccagctgcaaaggaaggcaccactaccgtcgccaccagtggctgcagcagctgctgctggaggcacgctagccacaatcatgtgcatcgccagggaggaaggggttgccgcgctctggaagggcgtcatccccggcctccaccgtcagttcctctatggcggcctccgcatcggcttgtatgagcctgtgaaggctttcttcgtcggaggcgctgttgtgggtgatgtcagtttactaagcaagatccttgctgcacttaccacaggtgtgatagcgattgttgtggcaaatccaactgatcttgtcaaagttaggttgcaagctgatggaaaagctaacactatcaagaggagttattctggagcccttaatgcatacgctacaataatcagacaggaaggtattggagctttgtggactggccttggtccaaatgtcgcacgcaatgccataattaacgctgccgagttggccagctatgatcagttcaaacagctggacttggtgctgggttttttgctgtttgcattggctctccggtggatgtggtgaaatcaagaatgatgggtgattcaacgtacagaagtactcttgactgttttaccaagacattaaagaatgatgtatggaatcctttccctgtttttttcttaatttcttgtgtctattgctctatactactacaaatctttttccacttgttcaaaattaagaagtcattccacttgggtctttgttgtcaagcttatatgtgtatgtgtccagtatgtcaatatccatctaccatgtacccttgtcactttaaacttccatattctgatgtacaacttgttcgcttggttttaatccgtatcggtttctactgcttatacaatatttttgtctctatggattacagctgcagcagtccaaacagtcggctttaatccgaagcgtattgtgctttgaccattaattcagttgaaaagttggttacagggacctggtgctttctacaagggattcattgcaaacttttgtcggattgggtcatggaatgtgataatgttcttaactctggaacaggtcaaaagattctttctatgaagagatgtctgcactgcaagtagggattgtgtgggacaagggtatgctgatatatatgggcggcataattgcatgattatttgaagctacaggtttgtcaaccaacagaaagcagccatatatgccatactgccacctacgtctggctcttagattacatatgacaatatgttctcatgttgcattttgattattatgtggcgatgctgtaatatttttgtatcacaaattgatcatacagaccactgtgttggtatattgtagagagcgacactgttcactacttcactgcaagttgacgttcatgccgaaacacttatgaagttt

SEQ ID NO: 220249 - DNA, 1672 bp, Zea Mays
cttcccttggctacctctgtctgtctgtgtcttgtccagtccgggtctccagggctccggcaccggcaggcagagagctaccaaaccccaccaccacgaacggccgccgccgacgagacgggggcgcatggcgactgcatcctccttcaccgccatcttcttcagcagcgccttcgcggcctgcttcgcggagccaaagtgcggctccagctgcaaaggaaggcaccactaccgtcgccaccagtggctgcagcagctgctgctggaggcacgctagccacaatcatgtgcatcgccagggaggaaggggttgccgcgctctggaagggcgtcatccccggcctccaccgtcagttcctctatggcggcctccgcatcggcttgtatgagcctgtgaaggctttcttcgtcggaggcgctgttgtgggtgatgtcagtttactaagcaagatccttgctgcacttaccacaggtgtgatagcgattgttgtggcaaatccaactgatcttgtcaaagttaggttgcaagctgatggaaaagctaacactatcaagaggagttattctggagcccttaatgcatacgctacaataatcagacaggaaggtattggagctttgtggactggccttggtccaaatgtcgcacgcaatgccataattaacgctgccgagttggccagctatgatcagttcaaacagatgtttctaaaacttcctgggtttactgataacgtttttacgcatcttttagctggacttggtgctgggttttttgctgtttgcattggctctccggtggatgtggtgaaatcaagaatgatgggtgattcaacgtacagaagtactcttgactgttttaccaagacattaaagaatgatgtatggaatcctttccctgtttttttcttaatttcttgtgtctattgctctatactactacaaatctttttccacttgttcaaaattaagaagtcattccacttgggtctttgttgtcaagcttatatgtgtatgtgtccagtatgtcaatatccatctaccatgtacccttgtcactttaaacttccatattctgatgtacaacttgttcgcttggttttaatccgtatcggtttctactgcttatacaatatttttgtctctatggattacagctgcagcagtccaaacagtcggctttaatccgaagcgtattgtgctttgaccattaattcagttgaaaagttggttacagggacctggtgctttctacaagggattcattgcaaacttttgtcggattgggtcatggaatgtgataatgttcttaactctggaacaggtcaaaagattctttctatgaagagatgtctgcactgcaagtagggattgtgtgggacaagggtatgctgatatatatgggcggcataattgcatgattatttgaagctacaggtttgtcaaccaacagaaagcagccatatatgccatactgccacctacgtctggctcttagattacatatgacaatatgttctcatgttgcattttgattattatgtggcgatgctgtaatatttttgtatcacaaattgatcatacagaccactgtgttggtatattgtagagagcgacactgttcactacttcactgcaagttgacgttcatgccgaaacacttatgaagttt

SEQ ID NO: 220250 - DNA, 664 bp, Zea Mays
tccgttcatgggctccaaattataaccaccacatgttgtggtggctcctccattcatctatatcgatcaggtcaagaattcactaacgggtcgcattgaggtttctgctcagaatgtgtggattggaaaaggaggagcctacaccggagagatcagaacaactggtggacatcggttgtcaatgggttattcttggacactcagagcgtagacatattattggtgaaaatgacgagtttattgggaagaaggctgcatatgcattgagccaaaatgttaaggttattgcctgcataggagagcttctggaagagagggaagcagggaaaacttttgaagtatgttttgagcagatgaaggcttttgcagatagtatttcaaactgggccgatgttgtgattgcatatgagcctgtttgggctattggaaccggaaaagttgctactcctgagcaagcccaggaagttcatgctgctgtacgcgattggttgacgaccaacatatcacctgatgttgcctctagcacccgaataatctatggaggttctgtgaatgcagccaactgtgcagagctagcaaagaaagaggatatcgatggttttcttgttggtggtgcctccttgaagcatatataggttataaaaccttcaagaagctgtcgaag

SEQ ID NO: 220251 - DNA, 2391 bp, Zea Mays
tatattatcgcgaagtgatacgtttgaagtatcaaatatacgattgtctctcacgttcccacattagggaaaaaaggaagaaaaaaaaataactccaccattcccttccctctcgcgagctcagatcacgcgaagcaaggaaaaaagaaaaatggcgcagctggtggagacgtacgcgtgctcgccggccacggaacgcggccgtggaatcctcctggccggggaccccaagacagacacgatcgcctactgcaccggccgcagcgttatcatccgccgcctcgatgcgcctctcgacgcttgggcctaccccgaccacgcctaccccacgaccgtcgcccgcttctcccccaacggcgagtgggtcgcctccgccgacgcctccggctgcgtccgcgtctggggccgctacggtgaccgcgctctcaaggccgagtttcggcccctctcgggacgcgtcgacgacctccgctggtcccccgacggcctacgcatcgtcgtctctggggacggcaagggcaagtccttcgtccgcgcatttgtgtgggactctggcagcactgttggtgaatttgatgggcactcaaagagggttctgagctgtgacttcaaaccaacacgtccatttcgcattgtgacatgtggtgaagattttctggctaacttctatgaaggaccaccattcaaatttaagcattccataagggatcactcaaattttgttaactgtatccggtatgctcctgatggtagtaagtttatcactgtgagttctgataagaagggtttgatatatgatggcaaaactggagaaaaaataggagaactttccactgaaggcaatcatacagggagcatatatgctgttagctggagtcctgacagtaaacaggttctaacagtttctgctgataaatctgcaaaagtatgggatatcatggaagatgcaagtgggaaattgaatcgaactttgtcttgccctggtataggaggtgtggatgatatgcttgttggttgtctctggcagaatgaccacctcgtgacagtctctcttggtgggacatttaatgtgttctctgcaagcaacccagaccaagaaccagttacatttgcaggacatttgaagactgttagttctttggtcttctttcctcaaagtagcccaagaactatactatctactagctatgatggtgtcatcatgaggtggatacagggtgttggatttggtggcagattggtgcgcagaaacaacactcaaataaaatgttttgctgcagtagaagaagagcttgttacctcaggttatgataataaggtcttcagaattcctcttaatggaaaccagtgtggagatgctgagtcagttgatataggcggtcagccaaatgctttgaaccttgcaattcagaaacctgaatttgcactgatcactactgattccgggattgtgttgctgcacaattcaaaagtcatttctacaacaaaagttaactatgccatcacgtcatcttcagtgtctcctgatggcacttatgctgtcgtgggtgctcaagatgggaaactgcgaatctattccatcagtggagatacactcacagaagaagctctgcttgagaagcaccggggtgctatcacttccttacattattcgccagatgtttctatgtttgcttctgctgataccaacagggaagctgttgtgtgggatcgagcaagtagagaggtcaagctgaagaacatgttgtaccacacagccaggataaactccctggcttggtcacctgacagtcgattggttgccactggctcactggacacctgtgcaattgtctacgagatagacaagccggtagccagtcgcgtcaccatcaagggagcccatcttggtggggttcatgggttaaccttcctcgacaatgatattctggtgactgccggtgaagatgcttgcattcgtgtttggaaggtggtgcagcaataggccgctcttcattctggtgtgcaatgagaatgtctgtgctgttgattggaataaactttttttttgttggtttggtggctgttactcacggggtcatagcatggaagactcctttgtaagtggatccggtatccctgcatctgattttgttaggagttgtgagaatatagggatactgttgttgctttttctaccccaggtccctaaaatagtcgttaataactgacttcgctgtggttaagtttttacgaacgttgactgtgctttcatatacttcatctgcatcgtaactgtatcatgcacataaatacttggaaacttttgctgcaagacatcgtttaaacgtgtattatgcggtggaacactgttaaaagcttaaaattcggctgcccagcgctgggctgctt

SEQ ID NO: 220252 - DNA, 2187 bp, Zea Mays
ccaaaagaaaaaccagactggtttcccgagcgcaggccgcaaccgcaaccactcctcccggccggcacaaaaccaaccgagcaccgcgcgcgcacagacacacactcaccagcaggcagcagctagctagctctctagcaacgagcacaaaacgagcaatgccgctagttccgtcccactccctcgcttcccatcccgcaccccatggaagggagcagcactagctagcgtgggacagggcggggtggtgtcgtggtgatggaagcgggcggcggcgcctcggaactcggcctgctcggcgccggatctggcaggctgctcaagcacgggcggggcgacgcggcggggggagaggaccacgggtgggtcgtcgtcgtcggcggcggcggcagggccaagcaggccaggaccgcgtccgtcggcaccggggacgcggcggccacggcggccgtgccgttcctgctgggctcctgcggcggccccggccacggcggggaacggatgctcagcttctcgtccgccgccgccgccgccccggatgatggcggtgccatgccgccgctgtactacgggaccccggcctcttgctcaggattgatgagctcggcgagggtgagaggccccttcacgccgccgcagtggatcgagctggagcaccaggccctgatctacaagtacctgtccgcgaacagccccgtacctcacagcctcctcgtccccatcaggaggagcgggagcctcgcatcgtctccctacccgcctccctacttcggcacgagcacattcgggtggggctccttccagctgggctactccggcaatgcggatctggagcctgggcggtgccgccggacggacggcaagaagtggcggtgctccagggacgcggtcgccgaccagaagtactgcgagcgacacatgaaccggggacgccatcgttcaagaaagcatgtggaagaccagcctggccatgccgcgaaagccatgtccgcggtggccgtggcggctgctgctgctgctgctacccagcatgctgctgctctggccggcgccggagctactgctgctgctggcctcgctgtcaatcggcaccggcagccggggaagagctatgccacgggtgcgactgatccatgctctctgcaatatagcagggaactggcgaacaaactgtcgaacgagagcgaaaacatgcaggactctgacaatgtctcgatgctgacttccatgaacacaggaaacactgcaggcagcgtgtttccgttctcgaaacagaacactgctcttttcgaagtgagcagctcaaggccagagtttggccttgttccatcggattcactgacgagttcacctcatagttccttgaagagtgtcaaaaatctgctcagctcacggagtctgagtgagcaccagagctccgcctccctgcaacactttgtggactggcccaggacgccacctgcccagggaggtctttcatggcccgaggcagaggacatgcccagagctcagaggtcccagctctcagtatccgctccaatggcatcctccgagctatcatcggcctccacatctcccatccacgaccacgagaagctgattctgtcacctctcaagctgggccgcgagtataccccatctggcgtcgtcagcgctgcagcgaacagatacgaggttagccagctagaagcgacctgggcgacgatgttccgcgactcttcgacgggcggcccgttgggggaggttctggccaagaacaacagcaacgcggaagcaagaggttgcccgtcggcggcgccacctctaaccgactactactgctgggattcaggccacggcatgcagtcgtcccccgtgggagttctgcagatctcggttcagttgtagtgagacatcccagcatccgcctcttgtgagcccgctgggttctggccatggaaaaagcgtgagggggagcatttaccacgtagtttgtcatttgagactgatctcctgtttctgtcacctgagttcttcttttgttgcccttatacctggctttgtaactctcaccttcgttggatcgtgataggcgccgtgatgtgtggtgtggctgggtttttggtgcgccgttgatgcgtagtaccatcatataaactagtggactggcgcgctccatcgcgcgcgtttgaatttagcaatacaaag

SEQ ID NO: 220253 - DNA, 1207 bp, Zea Mays
ctcatacctctcatgtacgaatgaattgagaaagagtgtttctgtctctgtccatcacgcggcataagcatgtacatctaagatctcagatttgtctacttttctgtttccatatgcatgcctataactacagatctttgattatatttattattagggaacgatagtaattggagtacgtacagtttcacacagttacttttaattagtagtggttcctaattaaagagaagccatgatttgaattctgacatgcaagtgaaacaaactgtcttgagcttagtgtggtttatttattttttatgttgcaacgttatttttcctctattttcttaatggcatataagcttcccaacaaacttacaagtaaaagagagtcaggtaggagaattaagaaaaaaaaaagaagtcaacgaacttgattacatggccctagctacgtacgtacaaacaaaggagagatatttttcctcgattttcttaatgaccgttgatgtcttcacaacatgtttcatatttgttttttgtcgttatcatatcgctaaaatatacagcacccccaattaatagtactctctctccatatatccaatcggttcccttgtgcgcgtcgtctacatttatttattaacaacagtttttcaacacgaattgaacggatgatgcatgaggcagcaggaccacccaagactggcccccgatcaaaccattcctgagaagcgccttgacagcctcggcacgccgacgccggacactgttggtgaaggtgtacatggaaggcgttgcgatcggccggaagctggacttgctcttgctggatggttgctgatgctatggagtaccatcaacgagttcctcacgagaagcctgcacatgttctcacctatgaagaccgggatggagactggatgatggttggggatgtaccgtgggagctcttccttggaagtgtgaagaaactgaggatttgcaagaacagataaatgctacagaaagattttgctggccacagagtggacatgcatgtgataccgaggctatatatactgatcgtgtacagtatactgaagaaaagtcaatcttgataccttccctagaaattaaattttggtattttttatgtttccttttctgttttctctgagtgccttgtaaataccatggctatttgttaaagaagaggcaatttgcgtgaagaatattataa

SEQ ID NO: 220254 - DNA, 398 bp, Zea Mays
acctccgccagagctcgaatgtggccatcccctggcggattgggcgaggaggaacggcgcaagagcaggccttgacggacggaggcggagcacagagcgatcgcgacgggggagggaaaggaggagagggactgcgggagaggcggaggaggagggaattcgaaatctggcttcttatatacggacggagacggagacggaggtgggagaagagggattatataggacggatcggatcctgttcattctcttccgcatgtcggtgccagttattgattctacccctccagattgccatttggttattggcatacaactgtcagctgtacaaggacgaccgcacacatctcatctcatctcctcccctccccctctcctttggatcatttgtcgttttc

SEQ ID NO: 220255 - DNA, 1716 bp, Zea Mays
cgagcagacgctgtcgtactggaccgtactcctctcttcctgtgctcctccatttcaattccatggctccgcctccgtctaactaattgatgatgaaaattggttcatcagtctcacgttggacgcatggagtatcgaagaggagtctgagatttgttctctgttcgtcagctatggaggagctgaagaacacgagcccacgaggcagcgcagggacaagaagtgccatattggagagatagctgcaaagtcatccgagcctagaatagccggttcaaaacgacgatgaaggcgttatccacgtcggcagaaattctccaagccgcccgatcgtgaatcaatggcattcattgcggtctcgatagcgtgtggaatacgactctcaccccctcgttccgaggagcgaggagcaggccgcctgcgtaatgtcgaagtactcgatcagcagcttctcttctcgacgtggcgcctccgccaccctcctccccgcgcgagtacctctggtctgggctccagcacgctgaattagtgcatcaaggttcatgactcagactgcatatggcactatcaaaacctgtttacacgaaacacggtgttatgaagtcaagttacaaatggagcatgttagcccaaataggaaaagaaagctaagtaccatagtaaatacattgttataatggtgtgcgccagaaaagaaaaaatttattaggtgcggccacaccctctcaacggcgtgtcacttcgcattgtggccactttgatccggatttagttaaaactctaaaagttggtccacgaagagatttggctaatcaaaggcacatcaggctgggatccagtcaattaaggttttgtcttacttacctcgggtgaagacaaggcttttttatgcactgaggttgctctcggttgcactgcagaaatatttaacatgcatcctacattatttggttactttatgaccaaggaatacttgatacagagaacgtcttgctctatcagagggtaccagctttaaatcaaaaaccaaatttcagagaaaaaaatacagatgccaatatcaatcttgggcccatctcctgtactgaaatcagcccaaacaacatggttccaagaaattgggtgtgctgtggcgaccgggctttccctacgggctggtcatcatttcgggagcgtcgtggctacctccggtgctgcggccagcgcgactaggccagatcgacccagcgcgatgacggctgtgcgcggcgtcctcggacatcgctccgccagctcaaatctccaagcgctcgagctcggaactcctccaaccggtcatcagctgccagcaatcgacctccatccgcagagcactcaccgaaaggtggctctggatatctcctgctctaacagctccacaaaaattgcattcaacacaggcgacaaacattcgagaacagaggtagtacaaaacatgtactgttgtacatgatatgctagtctataatcaagaacgatagcagacgccttcgcaacacgactcaggatacccgcacataggagctgctacagtgaactacctacgtcaaaagatggtgctggcaggattccgctcgaaaagatccctaggatatagtacgaccatagcataccgatgctaggtagagattcttagaccatttgtccttcacatgtttactagggaaattaattgtcctcagtgtctcttgggtttca

SEQ ID NO: 220256 - DNA, 1626 bp, Zea Mays
cgagcagacgctgtcgtactggaccgtactcctctcttcctgtgctcctccatttcaattccatggctccgcctccgtctaactaattgatgatgaaaattggttcatcagtctcacgttggacgcatggagtatcgaagaggagtctgagatttgttctctgttcgtcagctatggaggagctgaagaacacgagcccacgaggcagcgcagggacaagaagtgccatattggagagatagctgcaaagtcatccgagcctagaatagccggttcaaaacgacgatgaaggcgttatccacgtcggcagaaattctccaagccgcccgatcgtgaatcaatggcattcattgcggtctcgatagcgtgtggaatacgactctcaccccctcgttccgaggagcgaggagcaggccgcctgcgtaatgtcgaagtactcgatcagcagcttctcttctcgacgtggcgcctccgccaccctcctccccgcgcgagtacctctggtctgggctccagcacgctgaattagtgcatcaaggttcatgactcagactgcatatggcactatcaaaacctgtttacacgaaacacggtgttatgaagtcaagttacaaatggagcatgttagcccaaataggaaaagaaagctaaatcatactaatgtgtgctatgcccctttgagcatacctcgtgtcgaagcacgccatgtgcatagagaattgctaaaccagcaaagataattatcaacaggtaccatagtaaatacattgttataatggtgtgcgccagaaaagaaaaaatttattaggtgcggccacaccctctcaacggcgtgtcacttcgcattgtggccactttgatccggatttagttaaaactctaaaaggtacaaatcattctgccacttttttatccaagttggtccacgaagagatttggctaatcaaaggcacatcaggctgggatccagtcaattaaggttttgtcttacttacctcgggtgaagacaaggcttttttatgcactgaggttgctctcggttgcactgcagaaatatttaacatgcatcctacattatttggttactttatgaccaaggaatacttgatacagagaacgtcttgctctatcagagggtaccagctttaaatcaaaaaccaaatttcagagaaaaaaatacagatggtggctctggatatctcctgctctaacagctccacaaaaattgcattcaacacaggcgacaaacattcgagaacagaggtagtacaaaacatgtactgttgtacatgatatgctagtctataatcaagaacgatagcagacgccttcgcaacacgactcaggatacccgcacataggagctgctacagtgaactacctacgtcaaaagatggtgctggcaggattccgctcgaaaagatccctaggatatagtacgaccatagcataccgatgctaggtagagattcttagaccatttgtcctgcaatgaaacaagagtacattttgtcagaaccagccgtcagttgcagataagatactgaatgaggtactactgcaggcttgttaaccttcacatgtttactagggaaattaattgtcctcagtgtctcttgggtttca

SEQ ID NO: 220257 - DNA, 1846 bp, Zea Mays
cgagcagacgctgtcgtactggaccgtactcctctcttcctgtgctcctccatttcaattccatggctccgcctccgtctaactaattgatgatgaaaattggttcatcagtctcacgttggacgcatggagtatcgaagaggagtctgagatttgttctctgttcgtcagctatggaggagctgaagaacacgagcccacgaggcagcgcagggacaagaagtgccatattggagagatagctgcaaagtcatccgagcctagaatagccggttcaaaacgacgatgaaggcgttatccacgtcggcagaaattctccaagccgcccgatcgtgaatcaatggcattcattgcggtctcgatagcgtgtggaatacgactctcaccccctcgttccgaggagcgaggagcaggccgcctgcgtaatgtcgaagtactcgatcagcagcttctcttctcgacgtggcgcctccgccaccctcctccccgcgcgagtacctctggtctgggctccagcacgctgaattagtgcatcaaggttcatgactcagactgcatatggcactatcaaaacctgtttacacgaaacacggtgttatgaagtcaagttacaaatggagcatgttagcccaaataggaaaagaaagctaagtaagtgatctcgcaccaacttaattcagaacaagcaacaaaaaaggatgaatatcttactagatgtctaccttgtgatttgttcatgaaatttgtcatgaagatcatactaatgtgtgctatgcccctttgagcatacctcgtgtcgaagcacgccatgtgcatagagaattgctaaaccagcaaagataattatcaacaggtaccatagtaaatacattgttataatggtgtgcgccagaaaagaaaaaatttattaggtgcggccacaccctctcaacggcgtgtcacttcgcattgtggccactttgatccggatttagttaaaactctaaaagttggtccacgaagagatttggctaatcaaaggcacatcaggctgggatccagtcaattaagaaatatttaacatgcatcctacattatttggttactttatgaccaaggaatacttgatacagagaacgtcttgctctatcagagggtaccagctttaaatcaaaaaccaaatttcagagaaaaaaatacagatgccaatatcaatcttgggcccatctcctgtactgaaatcagcccaaacaacatggttccaagaaattgggtgtgctgtggcgaccgggctttccctacgggctggtcatcatttcgggagcgtcgtggctacctccggtgctgcggccagcgcgactaggccagatcgacccagcgcgatgacggctgtgcgcggcgtcctcggacatcgctccgccagctcaaatctccaagcgctcgagctcggaactcctccaaccggtcatcagctgccagcaatcgacctccatccgcagagcactcaccgaaaggtggctctggatatctcctgctctaacagctccacaaaaattgcattcaacacaggcgacaaacattcgagaacagaggtagtacaaaacatgtactgttgtacatgatatgctagtctataatcaagaacgatagcagacgccttcgcaacacgactcaggatacccgcacataggagctgctacagtgaactacctacgtcaaaagatggtgctggcaggattccgctcgaaaagatccctaggatatagtacgaccatagcataccgatgctaggtagagattcttagaccatttgtccttcacatgtttactagggaaattaattgtcctcagtgtctcttgggtttca

SEQ ID NO: 220258 - DNA, 1913 bp, Zea Mays
cgagcagacgctgtcgtactggaccgtactcctctcttcctgtgctcctccatttcaattccatggctccgcctccgtctaactaattgatgatgaaaattggttcatcagtctcacggtatcattaaatttgattcctatactatgcttgcgattctgtgtcatctgcttgttttttgttggattggaccaaacttttggacagttggacgcatggagtatcgaagaggagtctgagatttgttctctgttcgtcagctatggaggagctgaagaacacgagcccacgaggcagcgcagggacaagaagtgccatattggagagatagctgcaaagtcatccgagcctagaatagccggttcaaaacgacgatgaaggcgttatccacgtcggcagaaattctccaagccgcccgatcgtgaatcaatggcattcattgcggtctcgatagcgtgtggaatacgactctcaccccctcgttccgaggagcgaggagcaggccgcctgcgtaatgtcgaagtactcgatcagcagcttctcttctcgacgtggcgcctccgccaccctcctccccgcgcgagtacctctggtctgggctccagcacgctgaattagtgcatcaaggttcatgactcagactgcatatggcactatcaaaacctgtttacacgaaacacggtgttatgaagtcaagttacaaatggagcatgttagcccaaataggaaaagaaagctaagtaagtgatctcgcaccaacttaattcagaacaagcaacaaaaaaggatgaatatcttactagatgtctaccttgtgatttgttcatgaaatttgtcatgaagatcatactaatgtgtgctatgcccctttgagcatacctcgtgtcgaagcacgccatgtgcatagagaattgctaaaccagcaaagataattatcaacaggtaccatagtaaatacattgttataatggtgtgcgccagaaaagaaaaaatttattaggtgcggccacaccctctcaacggcgtgtcacttcgcattgtggccactttgatccggatttagttaaaactctaaaaggtacaaatcattctgccacttttttatccaagttggtccacgaagagatttggctaatcaaaggcacatcaggctgggatccagtcaattaagaaatatttaacatgcatcctacattatttggttactttatgaccaaggaatacttgatacagagaacgtcttgctctatcagagggtaccagctttaaatcaaaaaccaaatttcagagaaaaaaatacagatgggttccaagaaattgggtgtgctgtggcgaccgggctttccctacgggctggtcatcatttcgggagcgtcgtggctacctccggtgctgcggccagcgcgactaggccagatcgacccagcgcgatgacggctgtgcgcggcgtcctcggacatcgctccgccagctcaaatctccaagcgctcgagctcggaactcctccaaccggtcatcagctgccagcaatcgacctccatccgcagagcactcaccgaaaggtggctctggatatctcctgctctaacagctccacaaaaattgcattcaacacaggcgacaaacattcgagaacagaggtagtacaaaacatgtactgttgtacatgatatgctagtctataatcaagaacgatagcagacgccttcgcaacacgactcaggatacccgcacataggagctgctacagtgaactacctacgtcaaaagatggtgctggcaggattccgctcgaaaagatccctaggatatagtacgaccatagcataccgatgctaggtagagattcttagaccatttgtccttcacatgtttactagggaaattaattgtcctcagtgtctcttgggtttca

SEQ ID NO: 220259 - DNA, 1847 bp, Zea Mays
cgagcagacgctgtcgtactggaccgtactcctctcttcctgtgctcctccatttcaattccatggctccgcctccgtctaactaattgatgatgaaaattggttcatcagtctcacgttggacgcatggagtatcgaagaggagtctgagatttgttctctgttcgtcagctatggaggagctgaagaacacgagcccacgaggcagcgcagggacaagaagtgccatattggagagatagctgcaaagtcatccgagcctagaatagccggttcaaaacgacgatgaaggcgttatccacgtcggcagaaattctccaagccgcccgatcgtgaatcaatggcattcattgcggtctcgatagcgtgtggaatacgactctcaccccctcgttccgaggagcgaggagcaggccgcctgcgtaatgtcgaagtactcgatcagcagcttctcttctcgacgtggcgcctccgccaccctcctccccgcgcgagtacctctggtctgggctccagcacgctgaattagtgcatcaaggttcatgactcagactgcatatggcactatcaaaacctgtttacacgaaacacggtgttatgaagtcaagttacaaatggagcatgttagcccaaataggaaaagaaagctaaatcatactaatgtgtgctatgcccctttgagcatacctcgtgtcgaagcacgccatgtgcatagagaattgctaaaccagcaaagataattatcaacaggtaccatagtaaatacattgttataatggtgtgcgccagaaaagaaaaaatttattaggtgcggccacaccctctcaacggcgtgtcacttcgcattgtggccactttgatccggatttagttaaaactctaaaaggtacaaatcattctgccacttttttatccaagttggtccacgaagagatttggctaatcaaaggcacatcaggctgggatccagtcaattaaggttttgtcttacttacctcgggtgaagacaaggcttttttatgcactgaggttgctctcggttgcactgcagaaatatttaacatgcatcctacattatttggttactttatgaccaaggaatacttgatacagagaacgtcttgctctatcagagggtaccagctttaaatcaaaaaccaaatttcagagaaaaaaatacagatgccaatatcaatcttgggcccatctcctgtactgaaatcagcccaaacaacatggttccaagaaattgggtgtgctgtggcgaccgggctttccctacgggctggtcatcatttcgggagcgtcgtggctacctccggtgctgcggccagcgcgactaggccagatcgacccagcgcgatgacggctgtgcgcggcgtcctcggacatcgctccgccagctcaaatctccaagcgctcgagctcggaactcctccaaccggtcatcagctgccagcaatcgacctccatccgcagagcactcaccgaaaggtggctctggatatctcctgctctaacagctccacaaaaattgcattcaacacaggcgacaaacattcgagaacagaggtagtacaaaacatgtactgttgtacatgatatgctagtctataatcaagaacgatagcagacgccttcgcaacacgactcaggatacccgcacataggagctgctacagtgaactacctacgtcaaaagatggtgctggcaggattccgctcgaaaagatccctaggatatagtacgaccatagcataccgatgctaggtagagattcttagaccatttgtccttcacatgtttactagggaaattaattgtcctcagtgtctcttgggtttca

SEQ ID NO: 220260 - DNA, 1650 bp, Zea Mays
cgagcagacgctgtcgtactggaccttggacgcatggagtatcgaagaggagtctgagatttgttctctgttcgtcagctatggaggagctgaagaacacgagcccacgaggcagcgcagggacaagaagtgccatattggagagatagctgcaaagtcatccgagcctagaatagccggttcaaaacgacgatgaaggcgttatccacgtcggcagaaattctccaagccgcccgatcgtgaatcaatggcattcattgcggtctcgatagcgtgtggaatacgactctcaccccctcgttccgaggagcgaggagcaggccgcctgcgtaatgtcgaagtactcgatcagcagcttctcttctcgacgtggcgcctccgccaccctcctccccgcgcgagtacctctggtctgggctccagcacgctgaattagtgcatcaaggttcatgactcagactgcatatggcactatcaaaacctgtttacacgaaacacggtgttatgaagtcaagttacaaatggagcatgttagcccaaataggaaaagaaagctaaatcatactaatgtgtgctatgcccctttgagcatacctcgtgtcgaagcacgccatgtgcatagagaattgctaaaccagcaaagataattatcaacaggtaccatagtaaatacattgttataatggtgtgcgccagaaaagaaaaaatttattaggtgcggccacaccctctcaacggcgtgtcacttcgcattgtggccactttgatccggatttagttaaaactctaaaagttggtccacgaagagatttggctaatcaaaggcacatcaggctgggatccagtcaattaagaaatatttaacatgcatcctacattatttggttactttatgaccaaggaatacttgatacagagaacgtcttgctctatcagagggtaccagctttaaatcaaaaaccaaatttcagagaaaaaaatacagatgccaatatcaatcttgggcccatctcctgtactgaaatcagcccaaacaacatggttccaagaaattgggtgtgctgtggcgaccgggctttccctacgggctggtcatcatttcgggagcgtcgtggctacctccggtgctgcggccagcgcgactaggccagatcgacccagcgcgatgacggctgtgcgcggcgtcctcggacatcgctccgccagctcaaatctccaagcgctcgagctcggaactcctccaaccggtcatcagctgccagcaatcgacctccatccgcagagcactcaccgaaaggtggctctggatatctcctgctctaacagctccacaaaaattgcattcaacacaggcgacaaacattcgagaacagaggtagtacaaaacatgtactgttgtacatgatatgctagtctataatcaagaacgatagcagacgccttcgcaacacgactcaggatacccgcacataggagctgctacagtgaactacctacgtcaaaagatggtgctggcaggattccgctcgaaaagatccctaggatatagtacgaccatagcataccgatgctaggtagagattcttagaccatttgtccttcacatgtttactagggaaattaattgtcctcagtgtctcttgggtttca

SEQ ID NO: 220261 - DNA, 1501 bp, Zea Mays
cgagcagacgctgtcgtactggaccgtactcctctcttcctgtgctcctccatttcaattccatggctccgcctccgtctaactaattgatgatgaaaattggttcatcagtctcacggtatcattaaatttgattcctatactatgcttgcgattctgtgtcatctgcttgttttttgttggattggaccaaacttttggacagttggacgcatggagtatcgaagaggagtctgagatttgttctctgttcgtcagctatggaggagctgaagaacacgagcccacgaggcagcgcagggacaagaagtgccatattggagagatagctgcaaagtcatccgagcctagaatagccggttcaaaacgacgatgaaggcgttatccacgtcggcagaaattctccaagccgcccgatcgtgaatcaatggcattcattgcggtctcgatagcgtgtggaatacgactctcaccccctcgttccgaggagcgaggagcaggccgcctgcgtaatgtcgaagtactcgatcagcagcttctcttctcgacgtggcgcctccgccaccctcctccccgcgcgagtacctctggtctgggctccagcacgctgaattagtgcatcaaggtaccatagtaaatacattgttataatggtgtgcgccagaaaagaaaaaatttattaggtgcggccacaccctctcaacggcgtgtcacttcgcattgtggccactttgatccggatttagttaaaactctaaaaggtacaaatcattctgccacttttttatccaagttggtccacgaagagatttggctaatcaaaggcacatcaggctgggatccagtcaattaaggttttgtcttacttacctcgggtgaagacaaggcttttttatgcactgaggttgctctcggttgcactgcagaaatatttaacatgcatcctacattatttggttactttatgaccaaggaatacttgatacagagaacgtcttgctctatcagagggtaccagctttaaatcaaaaaccaaatttcagagaaaaaaatacagatggtggctctggatatctcctgctctaacagctccacaaaaattgcattcaacacaggcgacaaacattcgagaacagaggtagtacaaaacatgtactgttgtacatgatatgctagtctataatcaagaacgatagcagacgccttcgcaacacgactcaggatacccgcacataggagctgctacagtgaactacctacgtcaaaagatggtgctggcaggattccgctcgaaaagatccctaggatatagtacgaccatagcataccgatgctaggtagagattcttagaccatttgtcctgcaatgaaacaagagtacattttgtcagaaccagccgtcagttgcagataagatactgaatgaggtactactgcaggcttgttaaccttcacatgtttactagggaaattaattgtcctcagtgtctcttgggtttca

SEQ ID NO: 220262 - DNA, 549 bp, Zea Mays
gtgaatcctatgttgacttgattgccacaggctcagacgattcaattcaaatagtgaacgcattactagaagttacttctcttctcgaatttgccatttcctccatgacgtttaatttctggcattgccttaagcgtaacctcattcgaagggactctgatgtatcatatggattagatgtgacggttgaaattgagaaaaacagaagattacaaatatttcgtccaaagtttgaaactctggtgtctctgttttcgagttgaataccctgaggactaccacaccttttccgaggaagaccgcaaggattttagacatgttagatatggcatatgggagctgcaacaatgagcagaactccaagtggcaacctgtagaggctaccctgttttgtatacaagcaattgctagatcagtctcaattgaggagcgagaaattttaccacagattatgtcactgcttccctgccttcctcaacatgagcagttgctacaaacagtttgtttgaccattggagcattttcaaaatggattgatgctgcaccagc

SEQ ID NO: 220263 - DNA, 872 bp, Zea Mays
tgaatcctatgttgacttgattgccacaggctcagacgattcaattcaaatagtgaacgcattactagaagttacttctcttctcgaatttgccatttcctccatgacgtttaatttctggcattgccttaagcgtaacctcattcgaagggactctgatgtatcatatggattagatgtgacggttgaaattgagaaaaacagaagattacaaatatttcgtccaaagtttgaaactctggtgtctctggcatatgggagctgcaacaatgagcagaactccaagtggcaacctgtagaggctaccctgttttgtatacaagcaattgctagatcagtctcaattgaggagcgagaaattttaccacagattatgtcactgcttccctgccttcctcaacatgagcagttgctacaaacagttgatattctcaataagggtatgagtacatcagaggatacagctgcggctgcttctatggcctttaagtacatatgtgaagattgtaggacgaagttctcagggtccctggatggcctcttccagatataccatattgcaatcagtggagttggtggttataaagtttcttcagaggactcgttgcatttggttgaagccctaagtgtgattatcacaacgcttccaccagaatctgctagtagagccctggagttaatctgccagccagtaatcaatcccttgcaagaatttatccagcagggtgatcaagttcttcaacgagtccctgctcggcatttaactgtacatatagaccgactatcaagcattttcagtaatgtgaaacaaccagaagttgttgctgaagctgtatatagatattggccgacactcaagagtatctttgatc

SEQ ID NO: 220264 - DNA, 1655 bp, Zea Mays
gttcgatacacttcctcctcccatttccttctgttaaaaacagtatatggcccctgtttgtttaatcgataccgtccccacaagtgcagcaatttctcatccctcgtgtgccgtaaagccgatatccttcctatggcatgctccatctctggccccgtgctggttagctctgcatagggtccttgctgcgccccttctagggtttgcttgaaagtttggtgtggcctccgccctgctgccaccaccaccaggagagatgccacgaggctcgtcgagcaggggcgcaagagggggcgtcggaaggaatcagggaaggggtgctagaggaaaggattctggtggccacacaaccaaagatacccatggtaatcgtgctgaaggaaaacatggtaacaagcatggcaattctctgtctcctgaccttgtttgcaagagcaaaaggattcctaagaaaagaacacttgacgaagattctgatgatggagatggtgaaatacgctatctacaaaaactcaaaggggcaaaagttgcaccagatcctgtgaacactggtcataaagcttatgatttcgttgatgacgcactcaagaaaaaagagctaaccaagctttctaaaaataagagcatcccatatgaagtggacgaagacttcagaatgtctcggtctggcaggaatggtaggaagaagttaggggatgacaatgagtttatagaagatgaggaatctgagatggaggaaaagagtgggctaaagaaagctgattcacctcaagatgtgaagattgaaacccctggtcttacaacaagacagcgagcccttcaaagcaggggtgggaatggtgaaagctttattgaatttcccgatggattaccagcagcttcgtcaagaaagcaaaaggagaagctctcagatgtggagctacaagccaaaaaggcagaagctgcacagagacgtaagatgcaagttgagaaggcagagaaagaacaacaggctgaagcaatgaggaagatactgggtctagattctgagaagaaaaaggaagagaagaagctgaaagaacgggaaaacagggaaaaacaagcgaaattggaagaatgcaagaaaaactgcgtccggactgtcatgggcccaaccggaactgtgattacattccctgagagcatggggcttcctagcatatttaactccaagcctgtcagctatccacctccaagggagaagtgtgcaggcccgtcgtgcacaaacccgtacaagtaccgcgactccaagacgctgctccctctctgcagcctggcgtgctacaaggctgtccagggccgccctcctgaccagggaaccgacgctgcccaggggagtggaggtggccaggaaagcgctgggaagcaagcatgatgaatctagctacctgacgcgattgaaccgtgaccgtcagttggctggagaagtgtatgttaacatgtccagctcgctggtgtgtggtttcctttggcagtagtctaacaatcaacctgacaaaagatggggtgatcgcctgcccgtcgtgaaccaagccgggttttgttaatggcggttcgagtttaaacccatggtgtggtcggatcggtgtatgagactagtcgagaaatatgaagggggaaaaaaacttgtacagcaa

SEQ ID NO: 220265 - DNA, 523 bp, Zea Mays
gtccgttgcagatggcgactggcggctagggttttctgcacgagcgatcaccacgcatctggcgaggccatcaaggatgtgctttcagtctttcacctaggagcttggcgatgactaccaggctgcgccaccaaacggccgttatgaaactatgtttcatcaagctgcacccatttcaactgcaggaccatatgttttatttcttgacatatgattgtgatgtcctaattattcgttgaattgtatttatttttgttattgacgcatgttacttgaggactacttcatttactgttttatttaaatgttttatcactatttatatctaaaatgtattttgaattgttattttgaaatctaacttgtaccttattttaagaccttcattctcatcggactcattttatatcatttcagaagcaagaaaaatgtaaggatgctgaacttagtgcaatagatttttttaaggacatgcattgcaacaaaaagaaaggttttagtgaaaatattgagaaagctattg

SEQ ID NO: 220266 - DNA, 2953 bp, Zea Mays
tcgctgttgctctctccagtagtcccgttgagtgacctcccctgcgcgacaactagggcgaccgccgccgccccacgcctgctggccaggtcttcggcggaccctttgccgtcgacgggcatccaccacaccagatggtatatgctttcgcctaggagcaggctttttaaatggacttttagaggctggtgccagtgccacagaaagttcaggtttttccaattgtcaactaggaaatgacgtctcttcagaagaatcaacaacaattgatattctgcagaagatgttccttccatcaagtggtccatggcatgcgaataacgagttagcagggaactatcaaaaacaaagagattcgagtgcctggaacagagctgaacagaaacgtctgaaagaggagttgactagtgttgttgccaagttggaagaaagcaaacaaaaactggcagtactgaaagcacagggagacaataagcaagcaacaccgatccttgttcctatgctgggaaagaaaactgcagaaaaggtgggagataaacaaacagaactgcaagatcttgaagctacccacaaggagttaatggaatcgatttcaaagcgtctggaggaaattagaagactgcatacagagagaattggaattttgaacaatttagcgacttttcagaatatactgacggatttcaaaagcattcactcttccaaagcttttcaacttgtcaatgaccaacttcagaagtcacaagcagaactggatggtcaccaaacattgttagagaaattacaggttgacatggatacctttgtttggagagaaaggcaatttaatcaaaaagttgatttggctgaaatctcccagaaggtttctgcatactatgtatctagaattgctgatcttgaaaaggatgtccagaaactatgtaatgaaaagaatatgcttgtgctgaaacttgaaggggctttgagagaacctggtcggaatcaggttatctcagaatttaaagctctggtgtcatcgctaccgagggaaatgggtgctgtgcaaactgaactgtccaaacacaaggatgcttccttacagttgcattctttgcgagcagaagttcattcactttctagtatccgaaccagaaaggaacaagaaattgaagaaacatcaagatctgctcatgctggatctgatataagccaacttcaatctctggtccatgagctgagggaaaatacacaggagcttaaactatttgtggagttgtataagcatgactccgctgattccagacagctgatggaatcgagagacagggaacttgctgaattggctggagtccatgttctcagatattctcttaatgaaagtaaattagagcagcgtgtaattgcagccaatgaagctgaagcaatctctcagcagagactggcaactgccgaagctgaggttgctgaattagggcagaagctagaaacttctaggagaaatctagtgaaacaatctgatatactgaagtctaaacatgaagaatgtgaagcgtacatggtggagatcgagagcattggccatgcctatgaagacataatgtcacaaaatcaacaattgctacagcagattattgaaagagatgatcataataccaaggtatggcgacatggcgttgagattttcagtgggcttttaaaacttttcatggagggtgttaaagcaaaacagtcacacgatgctttgcatttggaagtgtgctcgttgcaaagaaatttgcagcatgcaagcactttgatggatctgtgcaaccagaaacttatccacctggaggacaagctaagaggttggtcagagcggttgaggagactgtcagaggatggaatgcagcaatctatttcattgggcatttctcaaacaaagcttaccggtatgcatggggaagctccaaagctcgggcaggcattgaatgttctacaagcgaaggttgggagcaatcggctggaagttgctgagctgcttatagaactagagacggagaggtttagtaaaaagagattagacgatgatttggatctaatgtcaagcaaagctagttctctaagagagaaggcggataattctcaagtccttcaaaaacttctccatgaggctaaggagtacaggggaatactgaagtgtggtatttgtcatgacaggcagaaagaggttgtgattgccaaatgctaccatctcttctgcaaccagtgcatacagaagtcgcttggtagccgtcagaagagaaggttggcgcctgtgtcgcacacaccagaactgcctggtgctctactgattcccggtatatgtgcagcatctcagaggctacgttaccaaaaggttcttaggtctactgagaagcattcacagttcagtagtagatcacagttgccagagacattttccaacaagcagagatagaggccgagatgtcagggcaaccttattaaatgacgggctctttaaatgacgggctctgggataactgaaaaaaaaatacaagacacgagcacgagcccttcctgagcagcccatctccatacatattccatctccatatatattggtttctaactatatttatggtctagagtcttagaattaatattatttcttaattatatttatagtgtaaagtctcgtagttatatcagtttcttaactgtcttttatatttagaaaaccgaaccaccgtcttagagctatacatgccctcatgtatgtggatggctgcagctgagctgctcaagccaagccggggtcgacgagtacttcgtgaacgaggtgtgccattcgtggtaatggcaccagcttgagcgccttatgtgtcgggttacccggccttttctcgccaccgctctcgctcccaccggtggatggtttctttctgcactgcacccgcgtactttgcacctatttctctggaaaaaaggaggccta

SEQ ID NO: 220267 - DNA, 3448 bp, Zea Mays
ctggtgttcacagctgttcgctgttgctctctccagtagtcccgttgagtgacctcccctgcgcgacaactagggcgaccgccgccgccccacgcctgctggccaggtcttcggcggaccctttgccgtcgacgggcatccaccacaccaggcactggttgaaaacagattttgttggcgctcctggagttcatacttatgtactttcctttctcaaatcataacatatcttaggcagttaaagcttagctgaatgccaacttgcctccacgtgcaagatcccagaaacattgctatgtctcgtccgcttgattttgctgtgcttaattacaaaaatcaaaggcttgcggaacaactggaagtccacaaatttgagttccgtgctcttgagagtagatttaatgatttaaaagagaaacagaggacacataatgagacacttatcctagtagaaaattattgggagcgagtgtttgtagttctctgctcctttcgaaattatatttatgatgacaagagatttacatgcatatctccagaactagctgtttaccaattgatgattgttaaagggcaggctttgtgccggatgctcccacacaagtgggatggtatatgctttcgcctaggagcaggctttttaaatggacttttagaggctggtgccagtgccacagaaagttcaggtttttccaattgtcaactaggaaatgacgtctcttcagaagaatcaacaacaattgatattctgcagaagatgttccttccatcaagtggtccatggcatgcgaataacgagttagcagggaactatcaaaaacaaagagattcgagtgcctggaacagagctgaacagaaacgtctgaaagaggagttgactagtgttgttgccaagttggaagaaagcaaacaaaaactggcagtactgaaagcacagggagacaataagcaagcaacaccgatccttgttcctatgctgggaaagaaaactgcagaaaaggtgggagataaacaaacagaactgcaagatcttgaagctacccacaaggagttaatggaatcgatttcaaagcgtctggaggaaattagaagactgcatacagagagaattggaattttgaacaatttagcgacttttcagaatatactgacggatttcaaaagcattcactcttccaaagcttttcaacttgtcaatgaccaacttcagaagtcacaagcagaactggatggtcaccaaacattgttagagaaattacaggttgacatggatacctttgtttggagagaaaggcaatttaatcaaaaagttgatttggctgaaatctcccagaaggtttctgcatactatgtatctagaattgctgatcttgaaaaggatgtccagaaactatgtaatgaaaagaatatgcttgtgctgaaacttgaaggggctttgagagaacctggtcggaatcaggttatctcagaatttaaagctctggtgtcatcgctaccgagggaaatgggtgctgtgcaaactgaactgtccaaacacaaggatgcttccttacagttgcattctttgcgagcagaagttcattcactttctagtatccgaaccagaaaggaacaagaaattgaagaaacatcaagatctgctcatgctggatctgatataagccaacttcaatctctggtccatgagctgagggaaaatacacaggagcttaaactatttgtggagttgtataagcatgactccgctgattccagacagctgatggaatcgagagacagggaacttgctgaattggctggagtccatgttctcagatattctcttaatgaaagtaaattagagcagcgtgtaattgcagccaatgaagctgaagcaatctctcagcagagactggcaactgccgaagctgaggttgctgaattagggcagaagctagaaacttctaggagaaatctagtgaaacaatctgatatactgaagtctaaacatgaagaatgtgaagcgtacatggtggagatcgagagcattggccatgcctatgaagacataatgtcacaaaatcaacaattgctacagcagattattgaaagagatgatcataataccaagcttttcatggagggtgttaaagcaaaacagtcacacgatgctttgcatttggaagtgtgctcgttgcaaagaaatttgcagcatgcaagcactttgatggatctgtgcaaccagaaacttatccacctggaggacaagctaagaggttggtcagagcggttgaggagactgtcagaggatggaatgcagcaatctatttcattgggcatttctcaaacaaagcttaccggtatgcatggggaagctccaaagctcgggcaggcattgaatgttctacaagcgaaggttgggagcaatcggctggaagttgctgagctgcttatagaactagagacggagaggtttagtaaaaagagattagacgatgatttggatctaatgtcaagcaaagctagttctctaagagagaaggcggataattctcaagtccttcaaaaacttctccatgaggctaaggagtacaggggaatactgaagtgtggtatttgtcatgacaggcagaaagaggttgtgattgccaaatgctaccatctcttctgcaaccagtgcatacagaagtcgcttggtagccgtcagaagaggtgcccgtcttgtggactaagcttcggtgttaacgatgtgaaacctatctatatatgaaacagaaggttggcgcctgtgtcgcacacaccagaactgcctggtgctctactgattcccggtatatgtgcagcatctcagaggctacgttaccaaaaggttcttaggtctactgagaagcattcacagttcagtagtagatcacagttgccagagacattttccaacaagcagagatagaggccgagatgtcagggcaaccttattaaatgacgggctctttaaatgacgggctctgggataactgaaaaaaaaatacaagacacgagcacgagcccttcctgagcagcccatctccatacatattccatctccatatatattggtttctaactatatttatggtctagagtcttagaattaatattatttcttaattatatttatagtgtaaagtctcgtagttatatcagtttcttaactgtcttttatatttagaaaaccgaaccaccgtcttagagctatacatgccctcatgtatgtggatggctgcagctgagctgctcaagccaagccggggtcgacgagtacttcgtgaacgaggtgtgccattcgtggtaatggcaccagcttgagcgccttatgtgtcgggttacccggccttttctcgccaccgctctcgctcccaccggtggatggtttctttctgcactgcacccgcgtactttgcacctatttctctggaaaaaaggaggccta

SEQ ID NO: 220268 - DNA, 4094 bp, Zea Mays
ggaatttgccctcctggtgttcacagctgttcgctgttgctctctccagtagtcccgttgagtgacctcccctgcgcgacaactagggcgaccgccgccgccccacgcctgctggccaggtcttcggcggaccctttgccgtcgacgggcatccaccacaccagggttttgcacattaatgaagacttaaaagttccagaacaaagcactaagggtgctcgaaggaaaaatgctttaggttaggcagttaaagcttagctgaatgccaacttgcctccacgtgcaagatcccagaaacattgctatgtctcgtccgcttgattttgctgtgcttaattacaaaaatcaaaggcttgcggaacaactggaagtccacaaatttgagttccgtgctcttgagagtagatttaatgatttaaaagagaaacagaggacacataatgagacacttatcctagtagaaaattattgggagcgactcgtagcagagctgggtatagtccctgtttgcaaaagtgaatcttcacattcaagctgcagtacaggaaacaacaatatacggaaggatggtatatgctttcgcctaggagcaggctttttaaatggacttttagaggctggtgccagtgccacagaaagttcaggtttttccaattgtcaactaggaaatgacgtctcttcagaagaatcaacaacaattgatattctgcagaagatgttccttccatcaagtggtccatggcatgcgaataacgagttagcagggaactatcaaaaacaaagagattcgagtgcctggaacagagctgaacagaaacgtctgaaagaggagttgactagtgttgttgccaagttggaagaaagcaaacaaaaactggcagtactgaaagcacagggagacaataagcaagcaacaccgatccttgttcctatgctgggaaagaaaactgcagaaaaggtgggagataaacaaacagaactgcaagatcttgaagctacccacaaggagttaatggaatcgatttcaaagcgtctggaggaaattagaagactgcatacagagagaattggaattttgaacaatttagcgacttttcagaatatactgacggatttcaaaagcattcactcttccaaagcttttcaacttgtcaatgaccaacttcagaagtcacaagcagaactggatggtcaccaaacattgttagagaaattacaggtggttcctggttgacatggatacctttgtttggagagaaaggcaatttaatcaaaaagttgatttggctgaaatctcccagaaggtttctgcatactatgtatctagaattgctgatcttgaaaaggatgtccagaaactatgtaatgaaaagaatatgcttgtgctgaaacttgaaggggctttgagagaacctggtcggaatcaggttatctcagaatttaaagctctggtgtcatcgctaccgagggaaatgggtgctgtgcaaactgaactgtccaaacacaaggatgcttccttacagttgcattctttgcgagcagaagttcattcactttctagtatccgaaccagaaaggaacaagaaattgaagaaacatcaagatctgctcatgctggatctgatataagccaacttcaatctctggtccatgagctgagggaaaatacacaggagcttaaactatttgtggagttgtataagcatgactccgctgattccagacagctgatggaatcgagagacagggaacttgctgaattggctggagtccatgttctcagatattctcttaatgaaagtaaattagagcagcgtgtaattgcagccaatgaagctgaagcaatctctcagcagagactggcaactgccgaagctgaggttgctgaattagggcagaagctagaaacttctaggagaaatctagtgaaacaatctgatatactgaagtctaaacatgaagaatgtgaagcgtacatggtggagatcgagagcattggccatgcctatgaagacataatgtcacaaaatcaacaattgctacagcagattattgaaagagatgatcataataccaagcttttcatggagggtgttaaagcaaaacagtcacacgatgctttgcatttggaagtgtgctcgttgcaaagaaatttgcagcatgcaagcactttgatggatctgtgcaaccagaaacttatccacctggaggacaagctaagaggttggtcagagcggttgaggagactgtcagaggatggaatgcagcaatctatttcattgggcatttctcaaacaaagcttaccggtatgcatggggaagctccaaagctcgggcaggcattgaatgttctacaagcgaaggttgggagcaatcggctggaagttgctgagctgcttatagaactagagacggagaggtttagtaaaaagagattagacgatgatttggatctaatgtcaagcaaagctagttctctaagagagaaggcggataattctcaagtccttcaaaaacttctccatgaggctaaggagtacaggggaatactgaagtgtggtatttgtcatgacaggcagaaagaggttgtgattgccaaatgctaccatctcttctgcaaccagtgcatacagaagtcgcttggtagccgtcagaagaggtgcccgtcttgtggactaagcttcggtgttaacgatgtgaaacctatctatatatgaaacagaaggttggcgcctgtgtcgcacacaccagaactgcctggtgctctactgattcccggtatatggtaggccgccatggcggcggttcagttggtgatgtagcataagcttctctaggtacattgcacaccccccaaaaaaaaagtaagacgctgcatgtgattgctggtacccgctggcatatatgatgctggtgttacctcaagcgtctctcgcaaagtatgccttgcctttgcccagtctggtagaatagcctgacctcttcaaccattgcttattttttattcattgggagaaaaagacccaacaagtgaggatattgatgcttcccgcaatagtgagcaatgtttatatttgtagctttagttagttccattggtgtagccgacagtaaggatatagtttcatttcattttttatttttcctttttgaaatatactggttagccagtttgtatgtttcaggagattgacaatagtgagattccgttaataaaaaagaagtgagattccagattcatgacttgcttctgtgtgggcttcaaccaggaaagaaaacactgctgtttctaccacagtgagctgtttctgcagatcctgacgagacggtgtgccggccgagcctttagcgagccagcctttccttgccgcaacagggtcgccttcctgactcatgtggtcggcaaccaagacttttctactagcatcagctccagtacatctacgttgccatgcctgtgcagtgcagcatctcagaggctacgttaccaaaaggttcttaggtctactgagaagcattcacagttcagtagtagatcacagttgccagagacattttccaacaagcagagatagaggccgagatgtcagggcaaccttattaaatgacgggctctttaaatgacgggctctgggataactgaaaaaaaaatacaagacacgagcacgagcccttcctgagcagcccatctccatacatattccatctccatatatattggtttctaactatatttatggtctagagtcttagaattaatattatttcttaattatatttatagtgtaaagtctcgtagttatatcagtttcttaactgtcttttatatttagaaaaccgaaccaccgtcttagagctatacatgccctcatgtatgtggatggctgcagctgagctgctcaagccaagccggggtcgacgagtacttcgtgaacgaggtgtgccattcgtggtaatggcaccagcttgagcgccttatgtgtcgggttacccggccttttctcgccaccgctctcgctcccaccggtggatggtttctttctgcactgcacccgcgtactttgcacctatttctctggaaaaaaggaggccta

SEQ ID NO: 220269 - DNA, 1157 bp, Zea Mays
acaggatagtgaggataaggggggcactctttcgttgggccagcgctgcatgcttccttgcttgcttttttgtcgcgcctgcttctcccccctctgcctcttggtgctgcttcctggtgggggaagggaaggagaaggctgtgtgcgtcctgcgccgataacgcgatggtgtccattgtcactgaggtatgggcgctcgctggatgcggcccggcgtccaaggcggcggcggtagcggtagcggcgcaggagttgccggcgcagcatccttctcctgccgcagcgggaggagggaaggccaagaagagagccgtgccagtgtcgttcagaggcgtcagcagcggcggtggtcaggaccaccagcgtgaggccgccgccgtcgtcgtcgggcggcggcgcggcctcgcgtcgtgcgcgctcgccgccgtcgccgcctcgttctccgcccgcgctgaccgccccgcgcgggcgcttgtcctcgaggaagacgacgacatcgagctgctggagcgcgtgaaggaggacaggaagaagcggctgcagaagcagggcatcatcagctcctccggcgccgagaccggacctcatctacaggctcagcaaagtcgggcaggccattgacaacgacgacctcccagccgcgagcagcgtgctgggaccaagctcagacgcccagtgggtgcagaacatcaatgcagctttctccaagctcagctcaagcccggagcagaggaacgtggtcgacagcttcaacagctcgctggccacactgtttacatcagtgagcaagctcgaccctgaatcctccaagtcggcgttcgtgtcgtccgcgacggcgttggagaaatggatcgcgttagctggactgggcggccagctcaagggctactgatgcgtgcgaggggaagagaagcactgggttgttctatgtttgggtccggcatttgtgaatctcctgaagagggtaccgtgaccgagaactgagttcagataggcatgctatgctcatcaagaaactgtgactgtttttgagactctgctgttacttacaagtggtaggaaacgaagttgtcttgtatcttgttgtccagtttaactttcgaaattccaaagcagctggcgtttattttttttaaatccaaaaattgttgcatgcc

SEQ ID NO: 220270 - DNA, 735 bp, Zea Mays
gtgttacatagtaatacaaataactttcttttgaggcagtgtaaccacagatgcctttatccccttccattccgattttttgttgaattcaggttcttgatgatgttctaatctacaaatgtgttagaagatggtcggatcctgtgtgactggcaagatttaccatttaaaaactatgcccccggagaatgaggagaattctatccgacttattacacgttctgatgccacatttgagaagtatcgtacaactgacctgttacctagggggaaacactgcatgactgttgttggtatccttgtctgatatgaggcggagcgagcgattcttgcaggaggagagagtgattctcctagaggtggaggaggatgaagtggtgatagacttcaagccaactccaagtgtcgtgtcgacctctgcctccgctccctgcacacatccctcccggtcgtcttcaaggtccagacctcctccccgctcaagttcctcatcagcacgttgcgtggtgtcatgtcgccgctttcctcagtgtccatacgcgtcgtgcgaggcatcccgcttcatctctaatcacctttatgtgcacatcgtccatatgtgacccccttctccatataatttcaacaagttttactcttttgggctccgtgtaagttcattagtaaaatctctactaattattaatgctgcaaagttaacctgtcattctgtgttatatatattttttattggta

SEQ ID NO: 220271 - DNA, 757 bp, Zea Mays
cattgtgttacatagtaatacaaataactttcttttgaggcagtgtaaccacagatgcctttatccccttccattccgattttttgttgaattcaggttcttgatgatgttctaatctacaaatgtgttagaagatggtcggatcctgtgtgactggcaagatttaccatttaaaaactatgcccccggagaatgaggagaattctatccgacttattacacgttctgatgccacatttgagaagagccagaactgagcacctacaacccttttaatatcgtacaactgacctgttacctagggggaaacactgcatgactgttgttgatatgaggcggagcgagcgattcttgcaggaggagagagtgattctcctagaggtggaggaggatgaagtggtgatagacttcaagccaactccaagtgtcgtgtcgacctctgcctccgctccctgcacacatccctcccggtcgtcttcaaggtccagacctcctccccgctcaagttcctcatcagcacgttgcgtggtgtcatgtcgccgctttcctcagtgtccatacgcgtcgtgcgaggcatcccgcttcatctctaatcacctttatgtgcacatcgtccatatgtgacccccttctccatataatttcaacaagttttactcttttgggctccgtgtaagttcattagtaaaatctctactaattattaatgctgcaaagttaacctgtcattctgtgttatatatattttttattggta

SEQ ID NO: 220272 - DNA, 748 bp, Zea Mays
ctgacattgtgttacatagtaatacaaataactttcttttgaggcagtgtaaccacagatgcctttatccccttccattccgattttttgttgaattcaggttcttgatgatgttctaatctacaaatgtgttagaagatggtcggatcctgtgtgactggcaagatttaccatttaaaaactatgcccccggagaatgaggagaattctatccgacttattacacgttctgatgccacatttgagaagagccagaactgagcacctacaacccttttaaggggaaacactgcatgactgttgttggtatccttgtctgatatgaggcggagcgagcgattcttgcaggaggagagagtgattctcctagaggtggaggaggatgaagtggtgatagacttcaagccaactccaagtgtcgtgtcgacctctgcctccgctccctgcacacatccctcccggtcgtcttcaaggtccagacctcctccccgctcaagttcctcatcagcacgttgcgtggtgtcatgtcgccgctttcctcagtgtccatacgcgtcgtgcgaggcatcccgcttcatctctaatcacctttatgtgcacatcgtccatatgtgacccccttctccatataatttcaacaagttttactcttttgggctccgtgtaagttcattagtaaaatctctactaattattaatgctgcaaagttaacctgtcattctgtgttatatatattttttattggta

SEQ ID NO: 220273 - DNA, 2335 bp, Zea Mays
gcgtgtgcttgcgggtatcagttcaggatgccattggcgagaaggtgctggaggcaagttctgtggaggatttgatatcaacgttttcacaaaggttcatcagactggggatgtatcacttatgccggacgtatccgtcgagcttgtgtcaaacatgatggaagagggaaaaaaaccttctgttgcagccattcaaggtcttgcattgggtggtggcctagagttgactatgctcaacttggattgccagagctaacccttggcatcatccctggatttggaggtacccagcgtttgccgaggcttgtaggtctacccaaagcaattgaaatgatgctgcaaagtaagttcattacggcaaaggaagggaaggaacgtggtttgattgatgccctttgctctcctgatgaattgataaagacatcacgtctttgggctctggaaattgctaattgccgtaaaccttggatgaggtctcttggcagaacagataggcttggaccactctctgaagctcgtgctgtgttaaatgcagcaagacagcaagcaatgaagatcgcaccaaacatgccacaaaaccaggcctgcctggatgtgatggaggaaggcatattatgtggaggccaagctggtgttttgaaggaggccatggttttcaaggagctggtgatagcaccaacatcaaaggctcttgtctatgttttctttgctaacgttccacgacaaaggtgccaggtgtaactgatgttcaactgaaaccaaggccaattagaaaagttgctgttattggtggtggtctgatgggatctggaattgccacatcacttcttgttagcaacatttctgttgtgctcaaggaagtaaaccctcagtttctgcaaaggggagagaaaacaatagcaggtaatcttgagggcctggtcaaaagaggttcactaacaaaggataggatgcacaaggccatggcccttctcaagggtgctttggattattcagatttcaaggatgttgatatggttattgaggctgttatcgagaagattcctttgaagcaatcaatatttgctgacattgagaaaatctgtccaaaacattgcatacttgcaacaaacacatccaccattgatttgaatgttgttggcaagaagacaaattctcaagatagaattataggggctcactttttcagccctgctcatattatgcccttgcttgaaattgttcggacggagaagacatcaccacaagctatccttgatctcatcaccattgggaagataataaagaaagtccctattgtggtcggcaactgcacaggatttgcagtcaaccttacattttttccttacacacagggttctcatcttctagttagtcttggtattgatgttttcagaattgatcgagtaataagcacctttggcatgccaatgggaccttttcaactccaagatgtggctgggtatggagttgccttggcagtaaaggatatctacgctgatgcctttggagaaagaaatttggactctgaccttgtggatttgatggtaaaggatggacgacaaggaaaggtgaacggcaaaggttactacatttatgagaagggtgggaagccaaagccagatcctagtgttaagcatgttatcgaggagtaccgaaagcacgcaaacacaatgcctggtggaaagcctgttactttaacggatcaagatattttggagatgattttcttcccagttgtgaatgaggcatgcagggttatggatgaaaatgttgtaattcgagcttctgatcttgatattgcttctgttcttggaatgggctttcctaaatacaggggtggtcttgtcttctgggctgacactgttggagcaccttacatacattctaagctaagcaagtgggctgaaatttatggccccttcttcaaaccatcatcatatttggaacagcgagctaagagtggtgtaccattgagcgcaccaggagcttcgcagcaaggttcggcgaggtcacgcatgtgaggtgctgtccagcattgagcagaataatgcagaatacttgcgggatgagccattgacggctgcttcgctgatcaaaacacctccgtgaacacaaacatgaggcacagaagaaatgatgaaaaataaagggattgtaacagttttggtgcctttgactgtaactggcagagtttctggggacagagtggcatggattaattgcacctgatcactctgtatgtcgctgtcatgtgtgcaatgttcaatacgtacgtaataaagaatggaaatatatgccgcaatcagtgcgtcgtcttctcgagttaatcgct

SEQ ID NO: 220274 - DNA, 2697 bp, Zea Mays
atatcggccgctccccttgagagccagctcatcagccgagtggttgtgccgtggaagctttcgtttaccgttcccatcccccgtcgtctctcctctccttcccactctcccacccgtcctccattgctcccttcctctctctcgcggagtcgctgcgatctagccaccgagcacgagcgtcctactcgccgcggaccttgctcatggccgcggggtcgatccgggtcaccatggaggtgggcgccgacggcgtcgcgctcatcaccatcgccaacccgcccgtcaacgcgctccaccccatcatcatcgcggggctcaaggacaagtacgcggaggccttgcgccgtgacgacgttaaggcaatcgtgctcactggtgctggaggcaagttctgtggaggatttgatatcaacgttttcacaaaggttcatcagactggggatgtatcacttatgccggacgtatccgtcgagcttgtgtcaaacatgatggaagagggaaaaaaaccttctgttgcagccattcaaggtcttgcattgggtggtggcctagagttgactatgggttgtcatgctcggatatctactcctgaagctcaacttggattgccagagctaacccttggcatcatccctggatttggaggtacccagcgtttgccgaggcttgtaggtctacccaaagcaattgaaatgatgctgcaaagtaagttcattacggcaaaggaagggaaggaacgtggtttgattgatgccctttgctctcctgatgaattgataaagacatcacgtctttgggctctggaaattgctaattgccgtaaaccttggatgaggtctcttggcagaacagataggcttggaccactctctgaagctcgtgctgtgttaaatgcagcaagacagcaagcaatgaagatcgcaccaaacatgccacaaaaccaggcctgcctggatgtgatggaggaaggcatattatgtggaggccaagctggtgttttgaaggaggccatggttttcaaggagctggtgatagcaccaacatcaaaggctcttgtctatgttttctttgctaacgttccacgacaaaggtgccaggtgtaactgatgttcaactgaaaccaaggccaattagaaaagttgctgttattggtggtggtctgatgggatctggaattgccacatcacttcttgttagcaacatttctgttgtgctcaaggaagtaaaccctcagtttctgcaaaggggagagaaaacaatagcaggtaatcttgagggcctggtcaaaagaggttcactaacaaaggataggatgcacaaggccatggcccttctcaagggtgctttggattattcagatttcaaggatgttgatatggttattgaggctgttatcgagaagattcctttgaagcaatcaatatttgctgacattgagaaaatctgtccaaaacattgcatacttgcaacaaacacatccaccattgatttgaatgttgttggcaagaagacaaattctcaagatagaattataggggctcactttttcagccctgctcatattatgcccttgcttgaaattgttcggacggagaagacatcaccacaagctatccttgatctcatcaccattgggaagataataaagaaagtccctattgtggtcggcaactgcacaggatttgcagtcaaccttacattttttccttacacacagggttctcatcttctagttagtcttggtattgatgttttcagaattgatcgagtaataagcacctttggcatgccaatgggaccttttcaactccaagatgtggctgggtatggagttgccttggcagtaaaggatatctacgctgatgcctttggagaaagaaatttggactctgaccttgtggatttgatggtaaaggatggacgacaaggaaaggtgaacggcaaaggttactacatttatgagaagggtgggaagccaaagccagatcctagtgttaagcatgttatcgaggagtaccgaaagcacgcaaacacaatgcctggtggaaagcctgttactttaacggatcaagatattttggagatgattttcttcccagttgtgaatgaggcatgcagggttatggatgaaaatgttgtaattcgagcttctgatcttgatattgcttctgttcttggaatgggctttcctaaatacaggggtggtcttgtcttctgggctgacactgttggagcaccttacatacattctaagctaagcaagtgggctgaaatttatggccccttcttcaaaccatcatcatatttggaacagcgagctaagagtggtgtaccattgagcgcaccaggagcttcgcagcaaggttcggcgaggtcacgcatgtgaggtgctgtccagcattgagcagaataatgcagaatacttgcgggatgagccattgacggctgcttcgctgatcaaaacacctccgtgaacacaaacatgaggcacagaagaaatgatgaaaaataaagggattgtaacagttttggtgcctttgactgtaactggcagagtttctggggacagagtggcatggattaattgcacctgatcactctgtatgtcgctgtcatgtgtgcaatgttcaatacgtacgtaataaagaatggaaatatatgccgcaatcagtgcgtcgtcttctcgagttaatcgct

SEQ ID NO: 220275 - DNA, 1828 bp, Zea Mays
cggctccggctcatatatcggccgctccccttgagagccagctcatcagccgagtggttgtgccgtggaagctttcgtttaccgttcccatcccccgtcgtctctcctctccttcccactctcccacccgtcctccattgctcccttcctctctctcgcggagtcgctgcgatctagccaccgagcacgagcgtcctactcgccgcggaccttgctcatggccgcggggtcgatccgggtcaccatggaggtgggcgccgacggcgtcgcgctcatcaccatcgccaacccgcccgtcaacgcgctccaccccatcatcatcgcggggctcaaggacaagtacgcggaggccttgcgccgtgacgacgttaaggcaatcgtgctcactggtgctggaggcaagttctgtggaggatttgatatcaacgttttcacaaaggttcatcagactggggatgtatcacttatgccggacgtatccgtcgagcttgtgtcaaacatgatggaagagggaaaaaaaccttctgttgcagccattcaaggtcttgcattgggtggtggcctagagttgactatgctcaacttggattgccagagctaacccttggcatcatccctggatttggaggtacccagcgtttgccgaggcttgtaggtctacccaaagcaattgaaatgatgctgcaaagtaagttcattacggcaaaggaagggaaggaacgtggtttgattgatgccctttgctctcctgatgaattgataaagacatcacgtctttgggctctggaaattgctaattgccgtaaaccttggatgaggtctcttggcagaacagataggcttggaccactctctgaagctcgtgctgtgttaaatgcagcaagacagcaagcaatgaagatcgcaccaaacatgccacaaaaccaggcctgcctggatgtgatggaggaaggcatattatgtggaggccaagctggtgttttgaaggaggccatggttttcaaggagctggtgatagcaccaacatcaaaggctcttgtctatgttttctttgctaacgttccacgacaaaggtgccaggtgtaactgatgttcaactgaaaccaaggccaattagaaaagttgctgttattggtggtggtctgatgggatctggaattgccacatcacttcttgttagcaacatttctgttgtgctcaaggaagtaaaccctcagtttctgcaaaggggagagaaaacaatagcaggtaatcttgagggcctggtcaaaagaggttcactaacaaaggataggatgcacaaggccatggcccttctcaagggtgctttggattattcagatttcaaggatgttgatatggttattgaggctgttatcgagaagattcctttgaagcaatcaatatttgctgacattgagaaaatctgtccaaaacattgcatacttgcaacaaacacatccaccattgatttgaatgttgttggcaagaagacaaattctcaagatagaattataggggctcactttttcagccctgctcatattatgcccttgcttgaaattgttcggacggagaagacatcaccacaagctatccttgatctcatcaccattgggaagataataaagaaagtccctattgtggtcggcaactgcacaggatttgcagtcaaccttacattttttccttacacacagggttctcatcttctagttagtcttggtattgatgttttcagaattgatcgagtaataagcacctttggcatgccaatgggaccttttcaatgggaatcaagcatttacctggacaaagaataaaaaac

SEQ ID NO: 220276 - DNA, 1278 bp, Zea Mays
aacagatggaggccggcctgcgcgcgctaggccaccgctacttcggcggcggcggcggtggcctcggtgggttcgcggccgcgcgtgccacccggctccggcgccagcgccagcgccgcatggccgccttctgctccctcgctgttaatggagatgggaatggcgccgcgggtggccccgtggggagcggcgtcgaggtggcgcgcgccaggaggatgctccatgtcgtgctcgtctcgccgctgataccaggaaatacagggtccattgcaaggacatgtgcagcatctgcagttggcctgcatcttgtcggggtaagccattaggctataaggtagacgacacgaagttgaagcgcgcgggattggattattggccatacgttgttgtcaagattcatgactcttgggaccacttctgtgattatttcatgaaacaggaaggagataaaaggctgttggcgttcaccaaaagaggcacacacatccattcagatttctcctacaggccaggggactggctagtcttcggttccgaaacaaaagggttgcctcagcaagccctcgaggattgctgcagagaaggcctaggcggcgggaccctccggattcccatggtggagacctacgtccggtgcctgaacctctccgtcagcgtcggagtcgcgctgtacgaagccgctagacagctgaactatgaacagcttcagtaccagcctgatgagctcccagaggaggcgcaggagcttttcccggcagaggacatttatgcgtgaaaacctctgcccgagaacaattacacgttacacgcattgatcacctcatttttgtgtgtgtgtgtgtgtactgtttgccgtgacacatgattgagctggagggaccacgcactgcacgattctgttgcgaattcaattccaggccgagtccttgtccagacggtgttgacatgctcattcaaaatggtgtacctgatctgcttggaagaatcgttttagtgccatgtataatttcgcagtcagaactcagaaggtgattagagtatgctgcgatggggtctcgttctgacttcttttttgtgtgtgtactggttactgaaccataagctttgttaactgcaactggacgctgcgtcctgttgcttctctgtcagtgtgtgtggtgaggaaggaaggttggtgcgggagctttactgccattcaaaaccttgtccctctggtcacgcagctcacaggtcggatagtaccctatccgtagctgtccccgaccagtgaaattattg

SEQ ID NO: 220277 - DNA, 1451 bp, Zea Mays
aacagatggaggccggcctgcgcgcgctaggccaccgctacttcggcggcggcggcggtggcctcggtgggttcgcggccgcgcgtgccacccggctccggcgccagcgccagcgccgcatggccgccttctgctcccgtgagtggcaagggattcccccacttcccccctccacttcctaccgctccggcgtgtctgtgtatctgacgtccctccccacgctcgcaaacgtctctgcagtcgctgttaatggagatgggaatggcgccgcgggtggccccgtggggagcggcgtcgaggtggcgcgcgccaggaggatgctccatgtcgtgctcgtctcgccgctgataccaggaaatacagggtccattgcaaggacatgtgcagcatctgcagttggcctgcatcttgtcggggtaagccattaggctataaggtagacgacacgaagttgaagcgcgcgggattggattattggccatacgttgttgtcaagattcatgactcttgggaccacttctgtgattatttcatgaaacaggaaggagataaaaggctgttggcgttcaccaaaagaggcacacacatccattcagtaagtagccgctgcttcttcaagtaggactgtagtatatcctcgccgtcgccacaatgaaaactgtcgctgatttctcctacaggccaggggactggctagtcttcggttccgaaacaaaagggttgcctcagcaagccctcgaggattgctgcagagaaggcctaggcggcgggaccctccggattcccatggtggagacctacgtccggtgcctgaacctctccgtcagcgtcggagtcgcgctgtacgaagccgctagacagctgaactatgaacagcttcagtaccagcctgatgagctcccagaggaggcgcaggagcttttcccggcagaggacatttatgcgtgaaaacctctgcccgagaacaattacacgttacacgcattgatcacctcatttttgtgtgtgtgtgtgtgtactgtttgccgtgacacatgattgagctggagggaccacgcactgcacgattctgttgcgaattcaattccaggccgagtccttgtccagacggtgttgacatgctcattcaaaatggtgtacctgatctgcttggaagaatcgttttagtgccatgtataatttcgcagtcagaactcagaaggtgattagagtatgctgcgatggggtctcgttctgacttcttttttgtgtgtgtactggttactgaaccataagctttgttaactgcaactggacgctgcgtcctgttgcttctctgtcagtgtgtgtggtgaggaaggaaggttggtgcgggagctttactgccattcaaaaccttgtccctctggtcacgcagctcacaggtcggatagtaccctatccgtagctgtccccgaccagtgaaattattg

SEQ ID NO: 220278 - DNA, 1360 bp, Zea Mays
tgcagcacaaagcagttcggaccgaaggcccacggcccgtttcccttccgccttatccctccgatcgctgtcggattattcgagagcaacagatggaggccggcctgcgcgcgctaggccaccgctacttcggcggcggcggcggtggcctcggtgggttcgcggccgcgcgtgccacccggctccggcgccagcgccagcgccgcatggccgccttctgctccctcgctgttaatggagatgggaatggcgccgcgggtggccccgtggggagcggcgtcgaggtggcgcgcgccaggaggatgctccatgtcgtgctcgtctcgccgctgataccaggaaatacagggtccattgcaaggacatgtgcagcatctgcagttggcctgcatcttgtcgggccattaggctataaggtagacgacacgaagttgaagcgcgcgggattggattattggccatacgttgttgtcaagattcatgactcttgggaccacttctgtgattatttcatgaaacaggaaggagataaaaggctgttggcgttcaccaaaagaggcacacacatccattcagatttctcctacaggccaggggactggctagtcttcggttccgaaacaaaagggttgcctcagcaagccctcgaggattgctgcagagaaggcctaggcggcgggaccctccggattcccatggtggagacctacgtccggtgcctgaacctctccgtcagcgtcggagtcgcgctgtacgaagccgctagacagctgaactatgaacagcttcagtaccagcctgatgagctcccagaggaggcgcaggagcttttcccggcagaggacatttatgcgtgaaaacctctgcccgagaacaattacacgttacacgcattgatcacctcatttttgtgtgtgtgtgtgtgtactgtttgccgtgacacatgattgagctggagggaccacgcactgcacgattctgttgcgaattcaattccaggccgagtccttgtccagacggtgttgacatgctcattcaaaatggtgtacctgatctgcttggaagaatcgttttagtgccatgtataatttcgcagtcagaactcagaaggtgattagagtatgctgcgatggggtctcgttctgacttcttttttgtgtgtgtactggttactgaaccataagctttgttaactgcaactggacgctgcgtcctgttgcttctctgtcagtgtgtgtggtgaggaaggaaggttggtgcgggagctttactgccattcaaaaccttgtccctctggtcacgcagctcacaggtcggatagtaccctatccgtagctgtccccgaccagtgaaattattg

SEQ ID NO: 220279 - DNA, 4526 bp, Zea Mays
ctggacgcggacgcgacggcgaggtgacccgatgacgtgcgcagcgtagcagcagccaacagtggactccccgacgccctgcccggctgtcccgtctcgaccaccagcaccagttcagcccatccaccgccaccacctcagacgctcctagtcaccactcgctgtcctcggcttctcctaaaagctcgacgcgatggcgacgctggtgcggccgcccgcgctgcacgtccgcgccgtgagcggcggcgggaacaaggacagggtggcgccgcagcggccttggtggggcgggaacaagcccatctcaccgcgccagtcgggcgggagcggggcgcgaggaggcgcgggcggcggcggcgtcgcgctggaccaggtgctaggtgtgctccgccgcgacggcgaattcgtccaggccgccgtcggcgccccgctccgcgacgtcttctggctccgcttccttgagaagaagcagcggaagcagcagcagccgagacctaagcacaagcctttccggcagcagcaggaagaggaggaggtggtagtggtggacgagtcgcccccggccttcccgcccccctcgtacccgtcagggttgtcgtgcgtggagctaatggcggccgacttccaggccctcaaggtgtacgccggtagcgcgcggcactctctcgcgcgccgattcctcggtagcaatagcaagggaaagtctgaacagcaacctaaacccaaaccccaggagcagcagaaagagcagcaacatatacttcaggccccagccttccctccgccctcctacccaccaggattatcctgtatggagttgatgatggctgaccttgaagccctgaaactgtacatcaactactattcggccatcctgactacgccgctcccccagcattatgatcctgacctccttgcccagtacttcgcctcacgtccgcatatccttgcctctcgcgtcattcagatactcttcacatttctctcagctgtggtgaagatgcggatttcaaaaagagctcagttaaccacagatgctacctatagtagtggtaacagcggcaacgggtttgatgatactcaatatatggtcggccaacttctcaaggagacatttcttaaccttgggcctacttttattaaagttggacaatcactttctacaagacctgatatcataggttcagagatttgtgaggttaggcccttgctgagttgcatgaaagggttcctactttcccaagagaggatgcaatgaagatcattgagggagaatttgggtgccctgtgtcgcatatgttcagttatgtttcagatgagcctgtagcatctgcttcctttggacaggtctaccaggggcgcacagttgatggttctcttgttgcaataaaggttcagcggccagaccttctaccttctgtactgagagacatctatattctacgccttgggcttgctttcatacggaagatagccaagcgaagaagtaacatttctctttatggtgatgagttgggtagaggtttcgtcggcgagttggactacaatattgaagctgctaatgctaccaaatttatggaggttcattccagatatcctttcatgctagttcctaaggttcttaaacaacttactcgaaagagggttttaacaatggagtgggtggctggtgagaaccccaaggatttgctttctttgtctaaaggagtttctgaaaaatttactcaagcttcagataatcagaagttggaagcaaaatctcgccttcttgacctggtcaataaaggtgtagaggcatcgctagtgcagcttcttgagacaggcttgttgcatgctgatcctcatcctggtaacttgcgttatactcctgaaggccgtgttgggtttctagattttggtttgctgtgcatgatggagaggaaacatcagcgtgctatgcttgcaagcatagtgcacatagtaaatggtgattgggcttccgtcgtttatgatttgactgaaatggatgtagttccaccaaaaaccaatctacgtcgtgtgacaatggtgcttggaaaaatttggtctgtggcatttaaatatcacttccgtatgccaccttactacacacttgttctccggtcacttgcctctttggaaggactagccgtggcagcagatgggactttcaaaacatttcaagcagcatacccatatgttgttcggaagcttctgtccgaaaattcacttgaaacaagaagactcttgaatcaggcaatttttaacaaaaggaaagagttccaatggcagaagattgacgcgtttctaaaattggcttcagcaaggaccaacttcaagtataacagtgaagttttgccagagcctgacatgaagtccatgaatgtggctagccttgtggagatcagtgatgcatattcacttgaccgtgctatagctacaccagagagagcattgcatactgcaaacctgtgtgtgaggcttttattatctaaggagagcattgtgattaggagacttattatgacagcgaatgcaaaatctcttgcccgtgatctgatctccagagatgctttgatgttccgggtgctccttagtaaggttattgcggatgttgtctaccaatggatgttgagtgccacaggcttgaaacgagttatggagaccaagatccagacgcccatgaccacaggaaagaacgagggacatctggtgctggctgaagaaccatcgaccctgatggtactccaggcggcagtaaaagaccgaaggattcagctcatgttcaccaagtttgtgagggagttgagagaggagcccgtcttgatgattagggtgagctggaacgtgttcctcatctcggtctcatctgccgctgtaggcctgcaccgtttcttggtgttcttcttgaaggaggatggtgccaggttcttggatgacaaggtcaagaaaatgaagatttggctgatggagttctcgaagcggacggctaatctggagattcaaggaattctgtgaatgttggtggcttttggttgaaggatttaatagctgcttcgcactctggtttttggagttactttctgcatcgagtgaatccagttcctgtttacgctggctgtctgagcttgcttggctgctggtgttcccagagatttataaaaacagggttttcctccgtcattccgccgcagctagtatataatagatggttcttggttgttcatgtactgtgtagctgtatataatagaaacattgcaggatcagtgagtaattctgtggccgagtaaagtgcagtggtggaaggcatgtgttacctactggatataaatatgatgatgtgaatgttcagttgaaaaacttgggtgacatgaactgatgaactatagctgatgcctccactttagaaatttagctgttttagtttgtctaaaatcaaacctttctttgacaagtaacttgcataaactcgggcgaaatcgtttgggtagatcatagatgtttgtaaatttgtccgattattaacatgaacagtggtagccggtgtaatcatttcccaccacaaaaggtcagtgcgaaatgggctgtaaggctggatccgacgacacattggaccctttatgtcaagtcatgggcccgtcgtactgggaacccacggcccacgatggggcaattgcttcgtgtccattgcgtctctcttctcgacggagctcgagtcgggtctgagaggtggacggagtttcggattcggaggtgatctgacctgtgaggggctgaggaggaggaggaggaggaggaggaggagggatggggcggcggcagaagcggcaggctttgatggcggcattcgcgttggcgctgctcatgggcaccgccgtctacttccgcatctgggcccgccagtccagcgacccctacttcaccgctgacgaccgcgaggagctccggaggcaatttgaacaagcaaacctagaagccatggatgaatctgccgaatggaggatgcaatatgacaaagaagtagagaaaaacaggcagttgcatgatgagctttcaaaggttaaggcctcattagctggcacagcccggcgtcttgagttgttgcagaaggataacgagttgcagaagaggcagactgaatcgctgaggcagcaatgcaattgcactctccattgaaagttatgcaagattaaggacatggaaggagtttttcagcttctttggcggattagctatttttttccaacaccaagggaggaaaaccagattgagttctaggaatgagaactggcatatgaaaatgattgagaacatatatagtgtatagaccatagtgttcgtcctttataccaatggtgagctgcacagttcatccaaagtgatcggtgggaacttcattggtgacaatgcaaagcgcagaagtcaaaacgtaaaagatggcgccaagtttgaaatctgggaccgtgccaatacttattggcaggaaacttaataatccatattgtattatcgatacttgcaattcctt

SEQ ID NO: 220280 - DNA, 4521 bp, Zea Mays
ctggacgcggacgcgacggcgaggtgacccgatgacgtgcgcagcgtagcagcagccaacagtggactccccgacgccctgcccggctgtcccgtctcgaccaccagcaccagttcagcccatccaccgccaccacctcagacgctcctagtcaccactcgctgtcctcggcttctcctaaaagctcgacgcgatggcgacgctggtgcggccgcccgcgctgcacgtccgcgccgtgagcggcggcgggaacaaggacagggtggcgccgcagcggccttggtggggcgggaacaagcccatctcaccgcgccagtcgggcgggagcggggcgcgaggaggcgcgggcggcggcggcgtcgcgctggaccaggtgctaggtgtgctccgccgcgacggcgaattcgtccaggccgccgtcggcgccccgctccgcgacgtcttctggctccgcttccttgagaagaagcagcggaagcagcagcagccgagacctaagcacaagcctttccggcagcagcaggaagaggaggaggtggtagtggtggacgagtcgcccccggccttcccgcccccctcgtacccgtcagggttgtcgtgcgtggagctaatggcggccgacttccaggccctcaaggtgtacgccggtagcgcgcggcactctctcgcgcgccgattcctcggtagcaatagcaagggaaagtctgaacagcaacctaaacccaaaccccaggagcagcagaaagagcagcaacatatacttcaggccccagccttccctccgccctcctacccaccaggattatcctgtatggagttgatgatggctgaccttgaagccctgaaactgtacatcaactactattcggccatcctgactacgccgctcccccagcattatgatcctgacctccttgcccagtacttcgcctcacgtccgcatatccttgcctctcgcgtcattcagatactcttcacatttctctcagctgtggtgaagatgcggatttcaaaaagagctcagttaaccacagatgctacctatagtagtggtaacagcggcaacgggtttgatgatactcaatatatggtcggccaacttctcaaggagacatttcttaaccttgggcctacttttattaaagttggacaatcactttctacaagacctgatatcataggttcagagatttgtgaggcccttgctgagttgcatgaaagggttcctactttcccaagagaggatgcaatgaagatcattgagggagaatttgggtgccctgtgtcgcatatgttcagttatgtttcagatgagcctgtagcatctgcttcctttggacaggtctaccaggggcgcacagttgatggttctcttgttgcaataaaggttcagcggccagaccttctaccttctgtactgagagacatctatattctacgccttgggcttgctttcatacggaagatagccaagcgaagaagtaacatttctctttatggtgatgagttgggtagaggtttcgtcggcgagttggactacaatattgaagctgctaatgctaccaaatttatggaggttcattccagatatcctttcatgctagttcctaaggttcttaaacaacttactcgaaagagggttttaacaatggagtgggtggctggtgagaaccccaaggatttgctttctttgtctaaaggagtttctgaaaaatttactcaagcttcagataatcagaagttggaagcaaaatctcgccttcttgacctggtcaataaaggtgtagaggcatcgctagtgcagcttcttgagacaggcttgttgcatgctgatcctcatcctggtaacttgcgttatactcctgaaggccgtgttgggtttctagattttggtttgctgtgcatgatggagaggaaacatcagcgtgctatgcttgcaagcatagtgcacatagtaaatggtgattgggcttccgtcgtttatgatttgactgaaatggatgtagttccaccaaaaaccaatctacgtcgtgtgacaatggtgcttggaaaaatttggtctgtggcatttaaatatcacttccgtatgccaccttactacacacttgttctccggtcacttgcctctttggaaggactagccgtggcagcagatgggactttcaaaacatttcaagcagcatacccatatgttgttcggaagcttctgtccgaaaattcacttgaaacaagaagactcttgaatcaggcaatttttaacaaaaggaaagagttccaatggcagaagattgacgcgtttctaaaattggcttcagcaaggaccaacttcaagtataacagtgaagttttgccagagcctgacatgaagtccatgaatgtggctagccttgtggagatcagtgatgcatattcacttgaccgtgctatagctacaccagagagagcattgcatactgcaaacctgtgtgtgaggcttttattatctaaggagagcattgtgattaggagacttattatgacagcgaatgcaaaatctcttgcccgtgatctgatctccagagatgctttgatgttccgggtgctccttagtaaggttattgcggatgttgtctaccaatggatgttgagtgccacaggcttgaaacgagttatggagaccaagatccagacgcccatgaccacaggaaagaacgagggacatctggtgctggctgaagaaccatcgaccctgatggtactccaggcggcagtaaaagaccgaaggattcagctcatgttcaccaagtttgtgagggagttgagagaggagcccgtcttgatgattagggtgagctggaacgtgttcctcatctcggtctcatctgccgctgtaggcctgcaccgtttcttggtgttcttcttgaaggaggatggtgccaggttcttggatgacaaggtcaagaaaatgaagatttggctgatggagttctcgaagcggacggctaatctggagattcaaggaattctgtgaatgttggtggcttttggttgaaggatttaatagctgcttcgcactctggtttttggagttactttctgcatcgagtgaatccagttcctgtttacgctggctgtctgagcttgcttggctgctggtgttcccagagatttataaaaacagggttttcctccgtcattccgccgcagctagtatataatagatggttcttggttgttcatgtactgtgtagctgtatataatagaaacattgcaggatcagtgagtaattctgtggccgagtaaagtgcagtggtggaaggcatgtgttacctactggatataaatatgatgatgtgaatgttcagttgaaaaacttgggtgacatgaactgatgaactatagctgatgcctccactttagaaatttagctgttttagtttgtctaaaatcaaacctttctttgacaagtaacttgcataaactcgggcgaaatcgtttgggtagatcatagatgtttgtaaatttgtccgattattaacatgaacagtggtagccggtgtaatcatttcccaccacaaaaggtcagtgcgaaatgggctgtaaggctggatccgacgacacattggaccctttatgtcaagtcatgggcccgtcgtactgggaacccacggcccacgatggggcaattgcttcgtgtccattgcgtctctcttctcgacggagctcgagtcgggtctgagaggtggacggagtttcggattcggaggtgatctgacctgtgaggggctgaggaggaggaggaggaggaggaggaggagggatggggcggcggcagaagcggcaggctttgatggcggcattcgcgttggcgctgctcatgggcaccgccgtctacttccgcatctgggcccgccagtccagcgacccctacttcaccgctgacgaccgcgaggagctccggaggcaatttgaacaagcaaacctagaagccatggatgaatctgccgaatggaggatgcaatatgacaaagaagtagagaaaaacaggcagttgcatgatgagctttcaaaggttaaggcctcattagctggcacagcccggcgtcttgagttgttgcagaaggataacgagttgcagaagaggcagactgaatcgctgaggcagcaatgcaattgcactctccattgaaagttatgcaagattaaggacatggaaggagtttttcagcttctttggcggattagctatttttttccaacaccaagggaggaaaaccagattgagttctaggaatgagaactggcatatgaaaatgattgagaacatatatagtgtatagaccatagtgttcgtcctttataccaatggtgagctgcacagttcatccaaagtgatcggtgggaacttcattggtgacaatgcaaagcgcagaagtcaaaacgtaaaagatggcgccaagtttgaaatctgggaccgtgccaatacttattggcaggaaacttaataatccatattgtattatcgatacttgcaattcctt

SEQ ID NO: 220281 - DNA, 2562 bp, Zea Mays
ctggacgcggacgcgacggcgaggtgacccgatgacgtgcgcagcgtagcagcagccaacagtggactccccgacgccctgcccggctgtcccgtctcgaccaccagcaccagttcagcccatccaccgccaccacctcagacgctcctagtcaccactcgctgtcctcggcttctcctaaaagctcgacgcgatggcgacgctggtgcggccgcccgcgctgcacgtccgcgccgtgagcggcggcgggaacaaggacagggtggcgccgcagcggccttggtggggcgggaacaagcccatctcaccgcgccagtcgggcgggagcggggcgcgaggaggcgcgggcggcggcggcgtcgcgctggaccaggtgctaggtgtgctccgccgcgacggcgaattcgtccaggccgccgtcggcgccccgctccgcgacgtcttctggctccgcttccttgagaagaagcagcggaagcagcagcagccgagacctaagcacaagcctttccggcagcagcaggaagaggaggaggtggtagtggtggacgagtcgcccccggccttcccgcccccctcgtacccgtcagggttgtcgtgcgtggagctaatggcggccgacttccaggccctcaaggtgtacgccggtagcgcgcggcactctctcgcgcgccgattcctcggtagcaatagcaagggaaagtctgaacagcaacctaaacccaaaccccaggagcagcagaaagagcagcaacatatacttcaggccccagccttccctccgccctcctacccaccaggattatcctgtatggagttgatgatggctgaccttgaagccctgaaactgtacatcaactactattcggccatcctgactacgccgctcccccagcattatgatcctgacctccttgcccagtacttcgcctcacgtccgcatatccttgcctctcgcgtcattcagatactcttcacatttctctcagctgtggtgaagatgcggatttcaaaaagagctcagttaaccacagatgctacctatagtagtggtaacagcggcaacgggtttgatgatactcaatatatggtcggccaacttctcaaggagacatttcttaaccttgggcctacttttattaaagttggacaatcactttctacaagacctgatatcataggttcagagatttgtgaggcccttgctgagttgcatgaaagggttcctactttcccaagagaggatgcaatgaagatcattgagggagaatttgggtgccctgtgtcgcatatgttcagttatgtttcagatgagcctgtagcatctgcttcctttggacaggtctaccaggggcgcacagttgatggttctcttgttgcaataaaggttcagcggccagaccttctaccttctgtactgagagacatctatattctacgccttgggcttgctttcatacggaagatagccaagcgaagaagtaacatttctctttatggtgatgagttgggtagaggtttcgtcggcgagttggactacaatattgaagctgctaatgctaccaaatttatggaggttcattccagatatcctttcatgctagttcctaaggttcttaaacaacttactcgaaagagggttttaacaatggagtgggtggctggtgagaaccccaaggatttgctttctttgtctaaaggagtttctgaaaaatttactcaagcttcagataatcagaagttggaagcaaaatctcgccttcttgacctggtcaataaaggtgtagaggcatcgctagtgcagcttcttgagacaggcttgttgcatgctgatcctcatcctggtaacttgcgttatactcctgaaggccgtgttgggtttctagattttggtttgctgtgcatgatggagaggaaacatcagcgtgctatgcttgcaagcatagtgcacatagtaaatggtgattgggcttccgtcgtttatgatttgactgaaatggatgtagttccaccaaaaaccaatctacgtcgtgtgacaatggatttagaggatgcattaggcgaggtaacctttgaagatggcattccagaaatcaagtttagtaaggcgggtacttcactctattataggttcaattcagtgcagtggtggcttgatatcttcgtacctatattttatttcaaaagaagcaccgtacctaatgcagttcttttcacattgcttttgcccttgtttattgctgcatataccttttaggtgcttggaaaaatttggtctgtggcatttaaatatcacttccgtatgccaccttactacacacttgttctccggtcacttgcctctttggaaggactagccgtggcagcagatgggactttcaaaacatttcaagcagcatacccatatgttgttcggaagcttctgtccgaaaattcacttgaaacaagaagactcttgaatcaggcaatttttaacaaaaggaaagagttccaatggcagaagattgacgcgtttctaaaattggcttcagcaaggatgatatgcatgtgccaactgctaac

SEQ ID NO: 220282 - DNA, 2444 bp, Zea Mays
tgccgcacagagaaatgtgtggccacctcctgatgcatcgagtgtggaaaaaccttgcaatgaaatggaaaaatgttttgaaggaaatggcaccgctgaggtccacaggcagattctttcaacgccatccttcagctatctgcttactgattttcctacttgtgttgtacaagtacttcttcggctggttcaccctcatcgtcaccacatcacctatcttcctaatcgctggcatctttcttggaatcgtcctggtgtacggtgaaccgaacaaccctgaaaaagatcatgtctacaaaaaaaatgataatactcggagtttgaatatccatgatagcagcaaatctattaggggtgtacctcttcctagaattccgtctggtgaagagagagcgccgaagcacaaaaacagtgttaagaaaattaggaagcagtctcgtggtgtagcctcttcttctgaaccaggatcaagtgaatcaggtggttcagatactgatattgctccaatgctccatgcatttcatcatcttaggtcgggcagcaattcgtcaaattcctctcaagatggtgactctgacagtagcaccgaagatacaacagagaatcaacagggcaacgacggcaggatatcccgcgaggggaaacaacatgttaaagttgttgcatggactgctgatgaccagaagaacataataaaaatcgggtgcttggagattgagcgtaaccaaaggttggagaccctaattgctaggcgtcgggcaaggaaatacgcagacaggaacttggcagagtttggcagcactgattccttacccactattgaagagctatcaaagttcaatgttcaaattcctgctgtttttgctcctaggaaaaatccttttgatcttccttacaatgaagataacttcccagattctgctccatctgcagtgttggaaacgagatacccatttgatctaccaagtgagcaagcaaacgagagcagctcttatggagccaactcaagccatgatgaacctattcccgtagcatgtcatttacagagtgcactgttgaggaggcatgagagcttcactgaaggagcaccattccttagtgactttttgcaagatacacagccttcccgattcagaccatacttcatgacggaaaaaatggctaacgaggaaatgacagatccagttcttgaaggagaaactagtgaaaagagcaactctaaggccagctctgctcaagactcggatagtacttcttcagttgctgaccaagaaagccagaaggatgttctagaggattgctcaaaccaaggacaacaatcttctttcagtcaaacagaggaacatgcacatatagctcggcatgcaagggaggtttctctttcccttgacatggaaccacctgtcttaattagtgattcctctgatgatgacatatcactgtctggtgaacatataaatgattgggaggaagcacaacagagtgaaaattttagtttgtcccagaatacatggcaagaggatcctaatgtcatgcaacaccatcaagaaatagatatcacaagcaatggattgaatcaaatgtcaccacattcgaatgatcttgagttgacgtcgtcatcaactgaaactactgatgatccttttgaagtgaatgacattgaaccaccagctaaggaagtggtggtcgttgatgatacccacgttgtggatcctgtatatgattcaagtccttcgggaagcgagaggcctgcacctactggtttagtaattgacggacctgtcctaaaagatggtcatgcttgtactcttgttgttgaagcaaccatcgaagaagggggttcatcatcaagaatggaggtttcttccagtgaggtagctggacctagtttgagttctgtggagcaaagcgaatccccagagaaagaagcctctgagataagagagcagtccatggttggccatgtcgaagcacatggaggttctgtcagccatgctgatccttcagtatctgatataagttctcagccgagtactgaaagttcaacaaatggtgattctggcagtggtgtaacaccatccttcacaaacgcagttctttagtttcttcataaaaaaaatgacagcggcaccgatcgagcatcatcaggttggtcgtcttcagcagtacttcgagctaggcgacttttgtgtggggcgagttcattgctgaggaaaccactgggagggtatatgtttgttgcaggaaatttcttagtgcttcaaagggactaggcaacattagcattattagcactgcactgtaaaaatggctagatatggttgttgcttaatttggccagcactctcgtttgtgaataccttgtggatccgacagtcaattttgtgccgtaaattaattgttaatttgctgcttcgagtaccttagtctatggattgcctttg

SEQ ID NO: 220283 - DNA, 3204 bp, Zea Mays
cttggatcttgcaatgcttttgacgaaagcagtgtcaattcccagaacatgggaacttgatcttttttccccacactagtcgaaccaatttgcatgcaggtcatgcttcttggatttgtacttcttggacgatctcttgaagaaagtgcaaggcttaaggcatccagcgatatgaatgagctcatttcactgttatcacctcagtcgaggttaattgttacttcctcaagtgacaacccttctgcggacagtagtttgaattctgatgcgatcacagtcgaggttcctgttgatgatgtccgtgttggagactcaatattggtcctgccgggagagactatacctgtagatggtaatgtcattgaaggatcaagttttgttgacgaatcaatgcttactggagagtccttgcctgtagccaaggagactgggcttcctgtattttcaggaactgtgaactgggatggcccgctaaagattagagcaacatgtactggaccatcatcaacaatagctaagatagtccgcatggttgaggatgcccaagcacgtgaagctcctgttcaaaggctcgcagattccatcgcaggaccatttgtgtatactgttatgacgttggctgcaacaaccttttccttctggtattacattggcacacacttatttcctgaggttcttctgaatgatattgctggtccggatggggattcattacttttgagtataaagcttgctgtggatgtattagttgtttcctgtccttgtgcacttggattagctacacctacagctatcttaataggaacttccctaggtgctaaaagagggttactggttagaggaggtgatgttttagagcgtttggctggaatagatactcttgtgcttgataaaacagggacgcttacagaaggaaaaccagtagtgacttctattgcttctctggcatatgaggagacagaggtccttcgtcttgctgctgcagtggagaaaacagcattgcacccaattgcaaatgctataatgaacaaggctgaactactcaagttggatattccgatcacaagtggtcagcttacatcgcctggatttggttgtttggctgaagtagatgggagtttagttgcagtgggcactttggattgggtgcatgatcgttttgaaactaaagcatcgccaactgaactgagagaccttagaaaccggctggagtttatgttgtcaagtgaagcatcatcatcaaaccagtcgaagtcaattgcttatgttggccgtgagggagaaggaattataggtgctattgctatatcagatattttacgagaagatgcaaacttaactgtggagaggttgcagcaggaaagcattacaacgttcctgctgtcaggggataggggagaagcagtgacaagcattgggaggaccattggaatcaggaatgaaaacataaagtcttccctgactccgcaagacaaagcaagcattatatcaactttgcaagcgaagggacacagagttgcaatggttggtgatggaataaacgatgccccgtctttagcagccgcagatgttggaatagccatgcgaactcattcaaaagagaacgctgcctctgatgcagcttcagttgttctactaggcaacagactttctcaggtggtagatgcgctatccctgtcgaaggcaacgatggcaaaagttcaccaaaatttggcctgggcagtggcatataacatagtagccattccaattgccgctggagtgctgctgccacaatatgatttcgccatgacaccatctctctcaggggggttgatggcccttagctcaatctttgttgtcagcaattctttgcttctgcagctgcatgggtcgtttcagaacacagaaaaacggcagggtgatctgagctcaagattaaactgaattgttgggtttagtttgacccagccgaaggacagtggtattgaattatagagggttctgatactggttttccagctccggctaattgaactgagtcagaactataagtagcaagctattcgtgtcagtagtagcatgttcctgtactgtttgtcaacccaactatagtagcaagtatgacccagaaggacaataatctaccacggccttcaaaaacattgtaaattagtaatggtactgctgtaagcctgtaaacaaagttaaggcgtatgactatcgttcatggtctagcaatgtgcaacaagctataagcttcatttcacacaggtatgggaagttcagtcaacagaactagtcgaatagcaagcagtacacatagcaactatggccacactataatggcaatcatacccctgaacaatagcatagctaggagattactggcgattcttctacttctacttctacttccatgtgttggttgttctaggcttctagcactcttcgtatccatcgttgttggcccagtgcaccttcttgccgctgctgctccgcatcaccttctcgtcgacggccttcaccccggcctccgcagctgccgccgactcggcctgcacacgcgccatcttcctccctcgctttctcgccgcggccgccttctccgtctcggcctcctggtactccctcgcccaacgccggctcagcacgcatgttgcagctagcgcgacggcctgcgccatgaacatggccagcagcagtagctcctcgaggaacgccagcacgaactgctcccggcgatccctggcggagccgaggaggcggaggctgtggtcgtggcggaggaagaaggccagggaggccagtgcgtggccggacagcgcggcgagcgcgagcgccgtgctcgcggcgaggcagaggtgggtgagctgcgcgtggagcgctgcgagtgcggagagcagggtggtggcgtgcacggagacgagcgcccagccgaagggcgtcggccgcgggcggaggaggaagaccgggccgagcgcggcggcggcgaggacgaggagggagaggttgaggagccagaccagtaggttgggaagagaggagcatctccgtaggctcgagttctcggtggcggacgccattgctttactgggtgcttgtgttctcagtgcgacagtgatcgtgtgagtctgatctgttgctgaatgctgagttcagaggagcggggaagtgcgtggcgcgtggggtaaggtttatacagagtgggaagactgaccgttg

SEQ ID NO: 220284 - DNA, 3502 bp, Zea Mays
gggggctggggagagcgcgcgcaagtggagggagatggcggccaggaaggaggaactcctggtgcggagccggggccgagtcgcgttcgcgtggacgctcgtcgcgctctgctgcggctcgcacgcgtcccacatcctgcactcgctcggtatccatgtcggccacggaacgtttttggatctgttgcataatccttatgtgaaatgtggcattgctacaactgctttgtttgggcctggaagagatatactctttgatggttttagagcattcaagcaaggttccccgaacatgaactctctagtaggatttggatctgcagctgcatttactatcagtgctgtgtccttgctgaaccctgactgggagtggaattcaaccttttttgatgaaccggtcatgcttcttggatttgtacttcttggacgatctcttgaagaaagtgcaaggcttaaggcatccagcgatatgaatgagctcatttcactgttatcacctcagtcgaggttaattgttacttcctcaagtgacaacccttctgcggacagtagtttgaattctgatgcgatcacagtcgaggttcctgttgatgatgtccgtgttggagactcaatattggtcctgccgggagagactatacctgtagatggtaatgtcattgaaggatcaagttttgttgacgaatcaatgcttactggagagtccttgcctgtagccaaggagactgggcttcctgtattttcaggaactgtgaactgggatggcccgctaaagattagagcaacatgtactggaccatcatcaacaatagctaagatagtccgcatggttgaggatgcccaagcacgtgaagctcctgttcaaaggctcgcagattccatcgcaggaccatttgtgtatactgttatgacgttggctgcaacaaccttttccttctggtattacattggcacacacttatttcctgaggttcttctgaatgatattgctggtccggatggggattcattacttttgagtataaagcttgctgtggatgtattagttgtttcctgtccttgtgcacttggattagctacacctacagctatcttaataggaacttccctaggtgctaaaagagggttactggttagaggaggtgatgttttagagcgtttggctggaatagatactcttgtgcttgataaaacagggacgcttacagaaggaaaaccagtagtgacttctattgcttctctggcatatgaggagacagaggtccttcgtcttgctgctgcagtggagaaaacagcattgcacccaattgcaaatgctataatgaacaaggctgaactactcaagttggatattccgatcacaagtggtcagcttacatcgcctggatttggttgtttggctgaagtagatgggagtttagttgcagtgggcactttggattgggtgcatgatcgttttgaaactaaagcatcgccaactgaactgagagaccttagaaaccggctggagtttatgttgtcaagtgaagcatcatcatcaaaccagtcgaagtcaattgcttatgttggccgtgagggagaaggaattataggtgctattgctatatcagatattttacgagaagatgcaaacttaactgtggagaggttgcagcaggaaagcattacaacgttcctgctgtcaggggataggggagaagcagtgacaagcattgggaggaccattggaatcaggaatgaaaacataaagtcttccctgactccgcaagacaaagcaagcattatatcaactttgcaagcgaagggacacagagttgcaatggttggtgatggaataaacgatgccccgtctttagcagccgcagatgttggaatagccatgcgaactcattcaaaagagaacgctgcctctgatgcagcttcagttgttctactaggcaacagactttctcaggtggtagatgcgctatccctgtcgaaggcaacgatggcaaaagttcaccaaaatttggcctgggcagtggcatataacatagtagccattccaattgccgctggagtgctgctgccacaatatgatttcgccatgacaccatctctctcaggggggttgatggcccttagctcaatctttgttgtcagcaattctttgcttctgcagctgcatgggtcgtttcagaacacagaaaaacggcagggtgatctgagctcaagattaaactgaattgttgggtttagtttgacccagccgaaggacagtggtattgaattatagagggttctgatactggttttccagctccggctaattgaactgagtcagaactataagtagcaagctattcgtgtcagtagtagcatgttcctgtactgtttgtcaacccaactatagtagcaagtatgacccagaaggacaataatctaccacggccttcaaaaacattgtaaattagtaatggtactgctgtaagcctgtaaacaaagttaaggcgtatgactatcgttcatggtctagcaatgtgcaacaagctataagcttcatttcacacaggtatgggaagttcagtcaacagaactagtcgaatagcaagcagtacacatagcaactatggccacactataatggcaatcatacccctgaacaatagcatagctaggagattactggcgattcttctacttctacttctacttccatgtgttggttgttctaggcttctagcactcttcgtatccatcgttgttggcccagtgcaccttcttgccgctgctgctccgcatcaccttctcgtcgacggccttcaccccggcctccgcagctgccgccgactcggcctgcacacgcgccatcttcctccctcgctttctcgccgcggccgccttctccgtctcggcctcctggtactccctcgcccaacgccggctcagcacgcatgttgcagctagcgcgacggcctgcgccatgaacatggccagcagcagtagctcctcgaggaacgccagcacgaactgctcccggcgatccctggcggagccgaggaggcggaggctgtggtcgtggcggaggaagaaggccagggaggccagtgcgtggccggacagcgcggcgagcgcgagcgccgtgctcgcggcgaggcagaggtgggtgagctgcgcgtggagcgctgcgagtgcggagagcagggtggtggcgtgcacggagacgagcgcccagccgaagggcgtcggccgcgggcggaggaggaagaccgggccgagcgcggcggcggcgaggacgaggagggagaggttgaggagccagaccagtaggttgggaagagaggagcatctccgtaggctcgagttctcggtggcggacgccattgctttactgggtgcttgtgttctcagtgcgacagtgatcgtgtgagtctgatctgttgctgaatgctgagttcagaggagcggggaagtgcgtggcgcgtggggtaaggtttatacagagtgggaagactgaccgttg

SEQ ID NO: 220285 - DNA, 3509 bp, Zea Mays
gggggctggggagagcgcgcgcaagtggagggagatggcggccaggaaggaggaactcctggtgcggagccggggccgagtcgcgttcgcgtggacgctcgtcgcgctctgctgcggctcgcacgcgtcccacatcctgcactcgctcggtatccatgtcggccacggaacgtttttggatctgttgcataatccttatgtgaaatgtggcattgctacaactgctttgtttgggcctggaagagatatactctttgatggttttagagcattcaagcaaggttccccgaacatgaactctctagtaggatttggatctgcagctgcatttactatcagtgctgtgtccttgctgaaccctgactgggagtggaattcaaccttttttgatgaaccgcatgcaggtcatgcttcttggatttgtacttcttggacgatctcttgaagaaagtgcaaggcttaaggcatccagcgatatgaatgagctcatttcactgttatcacctcagtcgaggttaattgttacttcctcaagtgacaacccttctgcggacagtagtttgaattctgatgcgatcacagtcgaggttcctgttgatgatgtccgtgttggagactcaatattggtcctgccgggagagactatacctgtagatggtaatgtcattgaaggatcaagttttgttgacgaatcaatgcttactggagagtccttgcctgtagccaaggagactgggcttcctgtattttcaggaactgtgaactgggatggcccgctaaagattagagcaacatgtactggaccatcatcaacaatagctaagatagtccgcatggttgaggatgcccaagcacgtgaagctcctgttcaaaggctcgcagattccatcgcaggaccatttgtgtatactgttatgacgttggctgcaacaaccttttccttctggtattacattggcacacacttatttcctgaggttcttctgaatgatattgctggtccggatggggattcattacttttgagtataaagcttgctgtggatgtattagttgtttcctgtccttgtgcacttggattagctacacctacagctatcttaataggaacttccctaggtgctaaaagagggttactggttagaggaggtgatgttttagagcgtttggctggaatagatactcttgtgcttgataaaacagggacgcttacagaaggaaaaccagtagtgacttctattgcttctctggcatatgaggagacagaggtccttcgtcttgctgctgcagtggagaaaacagcattgcacccaattgcaaatgctataatgaacaaggctgaactactcaagttggatattccgatcacaagtggtcagcttacatcgcctggatttggttgtttggctgaagtagatgggagtttagttgcagtgggcactttggattgggtgcatgatcgttttgaaactaaagcatcgccaactgaactgagagaccttagaaaccggctggagtttatgttgtcaagtgaagcatcatcatcaaaccagtcgaagtcaattgcttatgttggccgtgagggagaaggaattataggtgctattgctatatcagatattttacgagaagatgcaaacttaactgtggagaggttgcagcaggaaagcattacaacgttcctgctgtcaggggataggggagaagcagtgacaagcattgggaggaccattggaatcaggaatgaaaacataaagtcttccctgactccgcaagacaaagcaagcattatatcaactttgcaagcgaagggacacagagttgcaatggttggtgatggaataaacgatgccccgtctttagcagccgcagatgttggaatagccatgcgaactcattcaaaagagaacgctgcctctgatgcagcttcagttgttctactaggcaacagactttctcaggtggtagatgcgctatccctgtcgaaggcaacgatggcaaaagttcaccaaaatttggcctgggcagtggcatataacatagtagccattccaattgccgctggagtgctgctgccacaatatgatttcgccatgacaccatctctctcaggggggttgatggcccttagctcaatctttgttgtcagcaattctttgcttctgcagctgcatgggtcgtttcagaacacagaaaaacggcagggtgatctgagctcaagattaaactgaattgttgggtttagtttgacccagccgaaggacagtggtattgaattatagagggttctgatactggttttccagctccggctaattgaactgagtcagaactataagtagcaagctattcgtgtcagtagtagcatgttcctgtactgtttgtcaacccaactatagtagcaagtatgacccagaaggacaataatctaccacggccttcaaaaacattgtaaattagtaatggtactgctgtaagcctgtaaacaaagttaaggcgtatgactatcgttcatggtctagcaatgtgcaacaagctataagcttcatttcacacaggtatgggaagttcagtcaacagaactagtcgaatagcaagcagtacacatagcaactatggccacactataatggcaatcatacccctgaacaatagcatagctaggagattactggcgattcttctacttctacttctacttccatgtgttggttgttctaggcttctagcactcttcgtatccatcgttgttggcccagtgcaccttcttgccgctgctgctccgcatcaccttctcgtcgacggccttcaccccggcctccgcagctgccgccgactcggcctgcacacgcgccatcttcctccctcgctttctcgccgcggccgccttctccgtctcggcctcctggtactccctcgcccaacgccggctcagcacgcatgttgcagctagcgcgacggcctgcgccatgaacatggccagcagcagtagctcctcgaggaacgccagcacgaactgctcccggcgatccctggcggagccgaggaggcggaggctgtggtcgtggcggaggaagaaggccagggaggccagtgcgtggccggacagcgcggcgagcgcgagcgccgtgctcgcggcgaggcagaggtgggtgagctgcgcgtggagcgctgcgagtgcggagagcagggtggtggcgtgcacggagacgagcgcccagccgaagggcgtcggccgcgggcggaggaggaagaccgggccgagcgcggcggcggcgaggacgaggagggagaggttgaggagccagaccagtaggttgggaagagaggagcatctccgtaggctcgagttctcggtggcggacgccattgctttactgggtgcttgtgttctcagtgcgacagtgatcgtgtgagtctgatctgttgctgaatgctgagttcagaggagcggggaagtgcgtggcgcgtggggtaaggtttatacagagtgggaagactgaccgttg

SEQ ID NO: 220286 - DNA, 3492 bp, Zea Mays
gggggctggggagagcgcgcgcaagtggagggagatggcggccaggaaggaggaactcctggtgcggagccggggccgagtcgcgttcgcgtggacgctcgtcgcgctctgctgcggctcgcacgcgtcccacatcctgcactcgctcggtatccatgtcggccacggaacgtttttggatctgttgcataatccttatgtgaaatgtggcattgctacaactgctttgtttgggcctggaagagatatactctttgatggttttagagcattcaagcaaggttccccgaacatgaactctctagtaggatttggatctgcagctgcatttactatcagtgctgtgtccttgctgaaccctgactgggagtggaattcaaccttttttgatgaaccgcatgcaggtcatgcttcttggatttgtacttcttggacgatctcttgaagaaagtgcaaggcttaaggcatccagcgatatgaatgagctcatttcactgttatcacctcagtcgaggttaattgttacttcctcaagtgacaacccttctgcggacagtagtttgaattctgatgcgatcacagtcgaggttcctgttgatgatgtccgtgttggagactcaatattggtcctgccgggagagactatacctgtagatggtaatgtcattgaaggatcaagttttgttgacgaatcaatgcttactggagagtccttgcctgtagccaaggagactgggcttcctgtattttcaggaactgtgaactgggatggcccgctaaagattagagcaacatgtactggaccatcatcaacaatagctaagatagtccgcatggttgaggatgcccaagcacgtgaagctcctgttcaaaggctcgcagattccatcgcaggaccatttgtgtatactgttatgacgttggctgcaacaaccttttccttctggttgtttcctgtccttgtgcacttggattagctacacctacagctatcttaataggaacttccctaggtgctaaaagagggttactggttagaggaggtgatgttttagagcgtttggctggaatagatactcttgtgcttgataaagtgcgtgtttcttttatcattttttcatggtaaagtactattcccattgttgcgtttttttcattagaaacaatgtattccgattctagacagggacgcttacagaaggaaaaccagtagtgacttctattgcttctctggcatatgaggagacagaggtccttcgtcttgctgctgcagtggagaaaacagcattgcacccaattgcaaatgctataatgaacaaggctgaactactcaagttggatattccgatcacaagtggtcagcttacatcgcctggatttggttgtttggctgaagtagatgggagtttagttgcagtgggcactttggattgggtgcatgatcgttttgaaactaaagcatcgccaactgaactgagagaccttagaaaccggctggagtttatgttgtcaagtgaagcatcatcatcaaaccagtcgaagtcaattgcttatgttggccgtgagggagaaggaattataggtgctattgctatatcagatattttacgagaagatgcaaacttaactgtggagaggttgcagcaggaaagcattacaacgttcctgctgtcaggggataggggagaagcagtgacaagcattgggaggaccattggaatcaggaatgaaaacataaagtcttccctgactccgcaagacaaagcaagcattatatcaactttgcaagcgaagggacacagagttgcaatggttggtgatggaataaacgatgccccgtctttagcagccgcagatgttggaatagccatgcgaactcattcaaaagagaacgctgcctctgatgcagcttcagttgttctactaggcaacagactttctcaggtggtagatgcgctatccctgtcgaaggcaacgatggcaaaagttcaccaaaatttggcctgggcagtggcatataacatagtagccattccaattgccgctggagtgctgctgccacaatatgatttcgccatgacaccatctctctcaggggggttgatggcccttagctcaatctttgttgtcagcaattctttgcttctgcagctgcatgggtcgtttcagaacacagaaaaacggcagggtgatctgagctcaagattaaactgaattgttgggtttagtttgacccagccgaaggacagtggtattgaattatagagggttctgatactggttttccagctccggctaattgaactgagtcagaactataagtagcaagctattcgtgtcagtagtagcatgttcctgtactgtttgtcaacccaactatagtagcaagtatgacccagaaggacaataatctaccacggccttcaaaaacattgtaaattagtaatggtactgctgtaagcctgtaaacaaagttaaggcgtatgactatcgttcatggtctagcaatgtgcaacaagctataagcttcatttcacacaggtatgggaagttcagtcaacagaactagtcgaatagcaagcagtacacatagcaactatggccacactataatggcaatcatacccctgaacaatagcatagctaggagattactggcgattcttctacttctacttctacttccatgtgttggttgttctaggcttctagcactcttcgtatccatcgttgttggcccagtgcaccttcttgccgctgctgctccgcatcaccttctcgtcgacggccttcaccccggcctccgcagctgccgccgactcggcctgcacacgcgccatcttcctccctcgctttctcgccgcggccgccttctccgtctcggcctcctggtactccctcgcccaacgccggctcagcacgcatgttgcagctagcgcgacggcctgcgccatgaacatggccagcagcagtagctcctcgaggaacgccagcacgaactgctcccggcgatccctggcggagccgaggaggcggaggctgtggtcgtggcggaggaagaaggccagggaggccagtgcgtggccggacagcgcggcgagcgcgagcgccgtgctcgcggcgaggcagaggtgggtgagctgcgcgtggagcgctgcgagtgcggagagcagggtggtggcgtgcacggagacgagcgcccagccgaagggcgtcggccgcgggcggaggaggaagaccgggccgagcgcggcggcggcgaggacgaggagggagaggttgaggagccagaccagtaggttgggaagagaggagcatctccgtaggctcgagttctcggtggcggacgccattgctttactgggtgcttgtgttctcagtgcgacagtgatcgtgtgagtctgatctgttgctgaatgctgagttcagaggagcggggaagtgcgtggcgcgtggggtaaggtttatacagagtgggaagactgaccgttg

SEQ ID NO: 220287 - DNA, 3812 bp, Zea Mays
gggggctggggagagcgcgcgcaagtggagggagatggcggccaggaaggaggaactcctggtgcggagccggggccgagtcgcgttcgcgtggacgctcgtcgcgctctgctgcggctcgcacgcgtcccacatcctgcactcgctcggtatccatgtcggccacggaacgtttttggatctgttgcataatccttatgtgaaatgtggcattgctacaactgctttgtttgggcctggaagagatatactctttgatggttttagagcattcaagcaaggttccccgaacatgaactctctagtaggatttggatctgcagctgcatttactatcagtgctgtgtccttgctgaaccctgactgggagtggaattcaaccttttttgatgaaccggtcatgcttcttggatttgtacttcttggacgatctcttgaagaaagtgcaaggcttaaggcatccagcgatatgaatgagctcatttcactgttatcacctcagtcgaggttaattgttacttcctcaagtgacaacccttctgcggacagtagtttgaattctgatgcgatcacagtcgaggttcctgttgatgatgtccgtgttggagactcaatattggtcctgccgggagagactatacctgtagatggtaatgtcattgaaggatcaagttttgttgacgaatcaatgcttactggagagtccttgcctgtagccaaggagactgggcttcctgtattttcaggaactgtgaactgggatggcccgctaaagattagagcaacatgtactggaccatcatcaacaatagctaagatagtccgcatggttgaggatgcccaagcacgtgaagctcctgttcaaaggctcgcagattccatcgcaggaccatttgtgtatactgttatgacgttggctgcaacaaccttttccttctggtgtgctcttgtttttttatttcttctatgaaaatcttatgactaaaaatattgcctttttatccctcacccccttcccaaggtattacattggcacacacttatttcctgaggttcttctgaatgatattgctggtccggatggggattcattacttttgagtataaagcttgctgtggatgtattagtaagtgaccctgctatagttttttctttaacagaagaaaaaactcagcatttcaatctaggttttggaattttttcaaattgactggtttcacagttgatcaattaacatgtacccttaatatggtgtggtaattgcacatgcaaaacctgaaatctcattcaaaagctctttcgcaaaaccacgtttgaagcgtttattttgactaattctgtgaactttactcctgcaggttgtttcctgtccttgtgcacttggattagctacacctacagctatcttaataggaacttccctaggtgctaaaagagggttactggttagaggaggtgatgttttagagcgtttggctggaatagatactcttgtgcttgataaaggacgcttacagaaggaaaaccagtagtgacttctattgcttctctggcatatgaggagacagaggtccttcgtcttgctgctgcagtggagaaaacagcattgcacccaattgcaaatgctataatgaacaaggctgaactactcaagttggatattccgatcacaagtggtcagcttacatcgcctggatttggttgtttggctgaagtagatgggagtttagttgcagtgggcactttggattgggtgcatgatcgttttgaaactaaagcatcgccaactgaactgagagaccttagaaaccggctggagtttatgttgtcaagtgaagcatcatcatcaaaccagtcgaagtcaattgcttatgttggccgtgagggagaaggaattataggtgctattgctatatcagatattttacgagaagatgcaaacttaactgtggagaggttgcagcaggaaagcattacaacgttcctgctgtcaggggataggggagaagcagtgacaagcattgggaggaccattggaatcaggaatgaaaacataaagtcttccctgactccgcaagacaaagcaagcattatatcaactttgcaagcgaagggacacagagttgcaatggttggtgatggaataaacgatgccccgtctttagcagccgcagatgttggaatagccatgcgaactcattcaaaagagaacgctgcctctgatgcagcttcagttgttctactaggcaacagactttctcaggtggtagatgcgctatccctgtcgaaggcaacgatggcaaaagttcaccaaaatttggcctgggcagtggcatataacatagtagccattccaattgccgctggagtgctgctgccacaatatgatttcgccatgacaccatctctctcaggggggttgatggcccttagctcaatctttgttgtcagcaattctttgcttctgcagctgcatgggtcgtttcagaacacagaaaaacggcagggtgatctgagctcaagattaaactgaattgttgggtttagtttgacccagccgaaggacagtggtattgaattatagagggttctgatactggttttccagctccggctaattgaactgagtcagaactataagtagcaagctattcgtgtcagtagtagcatgttcctgtactgtttgtcaacccaactatagtagcaagtatgacccagaaggacaataatctaccacggccttcaaaaacattgtaaattagtaatggtactgctgtaagcctgtaaacaaagttaaggcgtatgactatcgttcatggtctagcaatgtgcaacaagctataagcttcatttcacacaggtatgggaagttcagtcaacagaactagtcgaatagcaagcagtacacatagcaactatggccacactataatggcaatcatacccctgaacaatagcatagctaggagattactggcgattcttctacttctacttctacttccatgtgttggttgttctaggcttctagcactcttcgtatccatcgttgttggcccagtgcaccttcttgccgctgctgctccgcatcaccttctcgtcgacggccttcaccccggcctccgcagctgccgccgactcggcctgcacacgcgccatcttcctccctcgctttctcgccgcggccgccttctccgtctcggcctcctggtactccctcgcccaacgccggctcagcacgcatgttgcagctagcgcgacggcctgcgccatgaacatggccagcagcagtagctcctcgaggaacgccagcacgaactgctcccggcgatccctggcggagccgaggaggcggaggctgtggtcgtggcggaggaagaaggccagggaggccagtgcgtggccggacagcgcggcgagcgcgagcgccgtgctcgcggcgaggcagaggtgggtgagctgcgcgtggagcgctgcgagtgcggagagcagggtggtggcgtgcacggagacgagcgcccagccgaagggcgtcggccgcgggcggaggaggaagaccgggccgagcgcggcggcggcgaggacgaggagggagaggttgaggagccagaccagtaggttgggaagagaggagcatctccgtaggctcgagttctcggtggcggacgccattgctttactgggtgcttgtgttctcagtgcgacagtgatcgtgtgagtctgatctgttgctgaatgctgagttcagaggagcggggaagtgcgtggcgcgtggggtaaggtttatacagagtgggaagactgaccgttg

SEQ ID NO: 220288 - DNA, 3272 bp, Zea Mays
ccggaagatgttcagatatactctttgatggttttagagcattcaagcaaggttccccgaacatgaactctctagtaggatttggatctgcagctgcatttactatcagtgctgtgtccttgctgaaccctgactgggagtggaattcaaccttttttgatgaaccggtcatgcttcttggatttgtacttcttggacgatctcttgaagaaagtgcaaggcttaaggcatccagcgatatgaatgagctcatttcactgttatcacctcagtcgaggttaattgttacttcctcaagtgacaacccttctgcggacagtagtttgaattctgatgcgatcacagtcgaggttcctgttgatgatgtccgtgttggagactcaatattggtcctgccgggagagactatacctgtagatggtaatgtcattgaaggatcaagttttgttgacgaatcaatgcttactggagagtccttgcctgtagccaaggagactgggcttcctgtattttcaggaactgtgaactgggatggcccgctaaagattagagcaacatgtactggaccatcatcaacaatagctaagatagtccgcatggttgaggatgcccaagcacgtgaagctcctgttcaaaggctcgcagattccatcgcaggaccatttgtgtatactgttatgacgttggctgcaacaaccttttccttctggtattacattggcacacacttatttcctgaggttcttctgaatgatattgctggtccggatggggattcattacttttgagtataaagcttgctgtggatgtattagttgtttcctgtccttgtgcacttggattagctacacctacagctatcttaataggaacttccctaggtgctaaaagagggttactggttagaggaggtgatgttttagagcgtttggctggaatagatactcttgtgcttgataaaacagggacgcttacagaaggaaaaccagtagtgacttctattgcttctctggcatatgaggagacagaggtccttcgtcttgctgctgcagtggagaaaacagcattgcacccaattgcaaatgctataatgaacaaggctgaactactcaagttggatattccgatcacaagtggtcagcttacatcgcctggatttggttgtttggctgaagtagatgggagtttagttgcagtgggcactttggattgggtgcatgatcgttttgaaactaaagcatcgccaactgaactgagagaccttagaaaccggctggagtttatgttgtcaagtgaagcatcatcatcaaaccagtcgaagtcaattgcttatgttggccgtgagggagaaggaattataggtgctattgctatatcagatattttacgagaagatgcaaacttaactgtggagaggttgcagcaggaaagcattacaacgttcctgctgtcaggggataggggagaagcagtgacaagcattgggaggaccattggaatcaggaatgaaaacataaagtcttccctgactccgcaagacaaagcaagcattatatcaactttgcaagcgaagggacacagagttgcaatggttggtgatggaataaacgatgccccgtctttagcagccgcagatgttggaatagccatgcgaactcattcaaaagagaacgctgcctctgatgcagcttcagttgttctactaggcaacagactttctcaggtggtagatgcgctatccctgtcgaaggcaacgatggcaaaagttcaccaaaatttggcctgggcagtggcatataacatagtagccattccaattgccgctggagtgctgctgccacaatatgatttcgccatgacaccatctctctcaggggggttgatggcccttagctcaatctttgttgtcagcaattctttgcttctgcagctgcatgggtcgtttcagaacacagaaaaacggcagggtgatctgagctcaagattaaactgaattgttgggtttagtttgacccagccgaaggacagtggtattgaattatagagggttctgatactggttttccagctccggctaattgaactgagtcagaactataagtagcaagctattcgtgtcagtagtagcatgttcctgtactgtttgtcaacccaactatagtagcaagtatgacccagaaggacaataatctaccacggccttcaaaaacattgtaaattagtaatggtactgctgtaagcctgtaaacaaagttaaggcgtatgactatcgttcatggtctagcaatgtgcaacaagctataagcttcatttcacacaggtatgggaagttcagtcaacagaactagtcgaatagcaagcagtacacatagcaactatggccacactataatggcaatcatacccctgaacaatagcatagctaggagattactggcgattcttctacttctacttctacttccatgtgttggttgttctaggcttctagcactcttcgtatccatcgttgttggcccagtgcaccttcttgccgctgctgctccgcatcaccttctcgtcgacggccttcaccccggcctccgcagctgccgccgactcggcctgcacacgcgccatcttcctccctcgctttctcgccgcggccgccttctccgtctcggcctcctggtactccctcgcccaacgccggctcagcacgcatgttgcagctagcgcgacggcctgcgccatgaacatggccagcagcagtagctcctcgaggaacgccagcacgaactgctcccggcgatccctggcggagccgaggaggcggaggctgtggtcgtggcggaggaagaaggccagggaggccagtgcgtggccggacagcgcggcgagcgcgagcgccgtgctcgcggcgaggcagaggtgggtgagctgcgcgtggagcgctgcgagtgcggagagcagggtggtggcgtgcacggagacgagcgcccagccgaagggcgtcggccgcgggcggaggaggaagaccgggccgagcgcggcggcggcgaggacgaggagggagaggttgaggagccagaccagtaggttgggaagagaggagcatctccgtaggctcgagttctcggtggcggacgccattgctttactgggtgcttgtgttctcagtgcgacagtgatcgtgtgagtctgatctgttgctgaatgctgagttcagaggagcggggaagtgcgtggcgcgtggggtaaggtttatacagagtgggaagactgaccgttg

SEQ ID NO: 220289 - DNA, 1291 bp, Zea Mays
caagaagagggccccactgacaggaccgtcctctcgccccacacgtcagtgacgcccgtcctgtccctgtccggcgcgatgccggtctccctcaccggcccaccgcaagcgcagaagcacaaccacaacacctcgcctcgtcagatcgaccgggaagaagggagcagaagccaaccggctcgtccgcccgttgcctgtcgtcgctatggccgccgtggaggtgtgcgtgaaggccgccgcggggaaccccgacacgctcggcgattgcccgttctcgcagagggtgctgctcacgctggaggagaagaaggtcccgtacgaggtgaagctcgtcgacctcggcaacaagcccgaatggtttctgaacatcagcccagagggtaaggtgcctttgttcaacggtggagatggcaaatgcattgctgattctgatgtaatcacccaagtcattgaggagaagttcccgactccttctctggtcacccctccagaatatgcatcagtgggatcaaagattttcccagcctttgtcaagttcttgaagagcaaggatgctagtgatgggtcagagaaggcgcttctggatgagctgcaggcactggatgatcatctcaaagctcatggcccctacataaatggggagaacgtgtcagcgactgatcttagcctggggccaaagcttttccacctacagatcgcactggagcatttcaaaggctggaagatcccagaaaacctaaccaatgtccatgcctacaccaaggtacacaagtgttcaagctcttttcagccgtgaatcttttgtcaagactaagccatccgaggagcacgtgattgcgggatgggcgcccaaggtgaatgcataagagccttgtgctttggtgctacctggtggactccatccatttatcttatcagtctttgtcagtggtgtggataggtgtcaagtctgtagcctagatgcatgattcagttggaattatgcagtgccgtgtctcgagtactcagttctggctgttgcggttgtgcatcttaccttctgttgctggttttgtttgaggccatgggcatctcttggtcctatgctgtgagagcgctgtaatgtgggtaccaaataatggagctgcttttatgcttgtggtgtggattctgttgtgccttgctttcatgattctgttttcctgtggtgaattggtgatagcctgagcagcaggttatcttctcctatatatcacatatttcggacctggtttttttcaagcacatgttaaatgaaaatgtttggtgcagt

SEQ ID NO: 220290 - DNA, 1451 bp, Zea Mays
cactgacaggaccgtcctctcgccccacacgtcagtgacgcccgtcctgtccctgtccggcgcgatgccggtctccctcaccggcccaccgcaagcgcagaagcacaaccacaacacctcgcctcgtcagatcgaccgggaagaagggagcagaagccaaccggctcgtccgcccgttgcctgtcgtcgctatggccgccgtggaggtgtgcgtgaaggccgccgcggggaaccccgacacgctcggcgattgcccgttctcgcagagggtgctgctcacgctggaggagaagaaggtcccgtacgaggtgaagctcgtcgacctcggcaacaagcccgaatggtttctgaacatcagcccagagggtaaggtgcctttgttcaacggtggagatggcaaatgcattgctgattctgatgtaatcacccaagtcattgaggagaagttcccgactccttctctggtcacccctccagaatatgcatcagtgggatcaaagattttcccagcctttgtcaagttcttgaagagcaaggatgctagtgatgggtcagagaaggcgcttctggatgagctgcaggcactggatgatcatctcaaagctcatggcccctacataaatggggagaacgtgtcagcgactgatcttagcctggggccaaagcttttccacctacagatcgcactggagcatttcaaaggctggaagatcccagaaaacctaaccaatgtccatgcctacaccaaggctcttttcagccgtgaatcttttgtcaagactaagccatccgaggagcacgtgattgcgggatgggcgcccaaggtgaatgcataagagccttgtgctttggtgctacctggtggactccatccatttatcttatcagtctttgtcagtggtcgggcccgacggggtgcgcgtcctggagacgcgcgtcgagggcggcttcctcttcatcgtgccccgcttccacgtcgtctccaagatcgccgacgcgtccggcatggagtggttctccatcatcaccacccccaacccgatcttcagccacctggccgggaagacgtcggtgtggaaggccatctcggcggaggtgctgcaggcgtcgttcaacaccacgccggagatggagaagctgttccggtccaagaggctcgactcggagatcttcttcgctcccccatccaactgagaaaataggccggaagccccacggtggagtcctctcgttaggtcgtcgtgcttagattaggttagctagcttgcctttaataaaaagagagtggtggtcgtcggcgtcggcttcggcggtctgcttcttcttcattcagtgcgtcggtcggtttagagtctgtcacgtgtcccgtcattgaactgcagtttttgttaataaagtattgttattattaggtattattattctcgccctctgaattgttgttattatcc

SEQ ID NO: 220291 - DNA, 3403 bp, Zea Mays
cgaagaaaccaatacccaaacccaaaggttcgtccgcattgtcggccagccagctcccactccactgcccgttccgttctgcgctcgtcatcgtcggggccggccgggcaagccatcagcggccgtgatggtgatggcgccggcgattctgctggcagtgctagtgctcgcggcggtggcagcggcgacggcgtcggcgttcgccgtggcgtccaacaacgcgacggtggtggccgggaagctgaacgtgcacctggtgcctcactcccacgacgacgtcgggtggctcaagaccgtcgaccagtactatgtcggctccaacaacagcatccagggcgcgtgcgtgatgaacaccctcgactccgtggtggacgcgctcgccagggatcccgcccgcaagttcgtcgtcgtcgagcaggctttcttccaaaggtggtgggccgagaaaagccccacaatccaggacatagtccacaaactggttgattccggacagctagagttcataaatggtgggtggtgtatgcacgatgaagctgccgtgcattacattgacatgattgatcagaccacgcttggtcaccggatgatcaagaaacagttcaataagactccaagagctggctggcaaattgatccttttggtcactctgcagtgcaagcttatttgcttggagcagagcttggttttgattctgtacatttcgcaagaattgattaccaagatagggcaacacggaaagcagacaaaggcctagaggttatatggcgtggctcaagaactttcggctcatcttcacagatcttcacgaatgcctttcctgtccattatagcccaccagatggctttggcttcgaagttttggatgaaaatatcatacctgttcagggatgacctgtcactttttgactacaatgtccaagaacgtgtagatgattttgttgctgcagccttagcacaggcaaatgttacacgtacagaccacataatgtggaccatgggggatgattttaactaccagtacgctgaatcctggttccggaatatggacaaacttatccaacatgtgaacaaggacggcagagtgcatgcgttgtattctactccgtctatctacacagatgctaagcatgcatcgaatgaatcttggccagtaaaatatgacgactatttcccctacgctgattcaacgaatgcatactggactgggtactttacgagccgtccaactttcaagcgatatgttcgagtacacagcggatactacttggctgcacgtcagatagagtttttggtgggcggtaggagctccttgggattgttcacttccagcttggaagatgcgatggggattgcccagcatcacgatgcagtctcaggtactgcgaaacagcacacgactgatgactacgcgaaacggcttgcgctgggagcagcaaaggttgaaaaaggtgtaaacaccgctctggcttgtctgaccagctccaacgggacatgtggatcctctgttgtaaaatttagtcagtgttcacttctcaatataagctactgcccttcgaccgaggaagcaatttcatcaacaaagcgtttagttgtagttgtttacaatcctcttggatgggaacgtagtgacttcataagagttcctgtcaatgatcaaaacctagttgtaaaaggctctgatggaaatattgttgagtcacagctagttgaggttgataatgtgacgagaaatttaagaaagttttatgtgaaggcttatcttggaatcacaacacacaaggcccctaagtattggctactatttcaagcttctgtaccaccaatgggctggaattcctacttcatttcaaaatcaactggagcaggatacaacagtactgagcatgtctcggacgtggtttccccaagtaacagcacgattgaagttggaccaggacatctaaagatgtccttctcaaaagcatctggacaactcaataggatattcaattccatctcaggagtggatttaccagttcaacaaagctttctttggtacagatcaagtgagggtgatgcctcagactcacaggcatctggagcatatatatttcgaccagatggtaatacaccgactacggtttcatcctcggtgccactgaaagttatccgtggaccactggttgacgaagtgcatcagcaattcagctcatggatttatcagataacacgactctacaaaaacaaggagcatgctgaagttgaatacacgattgggccgatccctgtcgatgatgatgtagggaaggaggtcatcacacggctgacagcaaatatggtcacaaacagtacgttttatacagactccaatggaagggatttcctcaaaagggtgagaaactacagggaggactggaatcttcaagtaactcaaccagttgcaggaaattactatccggtgaacctaggagtgtatgtagcagatgaaaaatatgagctatctgtgcttgtggaccgtgctgtcggagcatcaagcattcaggatggtcagctagagattatgctacacaggcgtttacttaaggatgatggcaggggtgtcggagagccacttgacgaggtggtttgcgtggatcaagattgccaagggcttacggccaggggcaattactacgtcaatgtcgagaagctagggcatggagctcactggcgacgtacatatggccagcaagtctactcaccctttctccttgctttcactcatgaggatgagaccagctcgaaatcctacagcgtggccaaagctggtatgatgaatgccaactacagccttcctgataatgtcgccattgttactttgcagaatctagatgatggtaccacactactccgcttggcccatctctttcaagctgctgaggacccgagatattccaaggtggcaaaggttgatctgaaaaaggtgttcggaaagagaactatcaaggaattgacggagactagcctctccgcgaaccaaaagaagtcagacatgaagaagctcagctggagggtcattgggaacactgaaactggtcctgccgcagtaaaaggtggcccagttgacagtagggctctagtcgttgaactaggacccatggagatacgcaccttcttgctgaaattttagtggcagttgttcttttgtttgtaaacaaacaatagtccatagagtaatttctaccttttcattaacgtgcccaaatcttagttcaaataggatcaaatacttgggcaatggaggtgcacacccacaccaagtttgttcatgtaataatagctacatgtcgggaaaaaaaaaaggaacggttgtggtgcttttcattgtgtaaagcgggtatttcttcctagcggataccgttatctgttgggctgattggg

SEQ ID NO: 220292 - DNA, 3466 bp, Zea Mays
gcggagcccagcccagagcccaccgtgagctcaacgacgcccacgcccggtgccggtgcaaaccaaacgccaactccaatctccaactccaagagcgaagaaaccaatacccaaacccaaaggttcgtccgcattgtcggccagccagctcccactccactgcccgttccgttctgcgctcgtcatcgtcggggccggccgggcaagccatcagcggccgtgatggtgatggcgccggcgattctgctggcagtgctagtgctcgcggcggtggcagcggcgacggcgtcggcgttcgccgtggcgtccaacaacgcgacggtggtggccgggaagctgaacgtgcacctggtgcctcactcccacgacgacgtcgggtggctcaagaccgtcgaccagtactatgtcggctccaacaacagcatccagggcgcgtgcgtgatgaacaccctcgactccgtggtggacgcgctcgccagggatcccgcccgcaagttcgtcgtcgtcgagcaggctttcttccaaaggtggtgggccgagaaaagccccacaatccaggacatagtccacaaactggttgattccggacagctagagttcataaatggtgggtggtgtatgcacgatgaagctgccgtgcattacattgacatgattgatcagaccacgcttggtcaccggatgatcaagaaacagttcaataagactccaagagctggctggcaaattgatccttttggtcactctgcagtgcaagcttatttgcttggagcagagcttggttttgattctgtacatttcgcaagaattgattaccaagatagggcaacacggaaagcagacaaaggcctagaggttatatggcgtggctcaagaactttcggctcatcttcacagatcttcacgaatgcctttcctgtccattatagcccaccagatggctttggcttcgaagttttggatgaaaatatcatacctgttcaggatgacctgtcactttttgactacaatgtccaagaacgtgtagatgattttgttgctgcagccttagcacaggcaaatgttacacgtacagaccacataatgtggaccatgggggatgattttaactaccagtacgctgaatcctggttccggaatatggacaaacttatccaacatgtgaacaaggacggcagagtgcatgcgttgtattctactccgtctatctacacagatgctaagcatgcatcgaatgaatcttggccagtaaaatatgacgactatttcccctacgctgattcaacgaatgcatactggactgggtactttacgagccgtccaactttcaagcgatatgttcgagtacacagcggatactacttggctgcacgtcagatagagtttttggtgggcggtaggagctccttgggattgttcacttccagcttggaagatgcgatggggattgcccagcatcacgatgcagtctcaggtactgcgaaacagcacacgactgatgactacgcgaaacggcttgcgctgggagcagcaaaggttgaaaaaggtgtaaacaccgctctggcttgtctgaccagctccaacgggacatgtggatcctctgttgtaaaatttagtcagtgttcacttctcaatataagctactgcccttcgaccgaggaagcaatttcatcaacaaagcgtttagttgtagttgtttacaatcctcttggatgggaacgtagtgacttcataagagttcctgtcaatgatcaaaacctagttgtaaaaggctctgatggaaatattgttgagtcacagctagttgaggttgataatgtgacgagaaatttaagaaagttttatgtgaaggcttatcttggaatcacaacacacaaggcccctaagtattggctactatttcaagcttctgtaccaccaatgggctggaattcctacttcatttcaaaatcaactggagcaggatacaacagtactgagcatgtctcggacgtggtttccccaagtaacagcacgattgaagttggaccaggacatctaaagatgtccttctcaaaagcatctggacaactcaataggatattcaattccatctcaggagtggatttaccagttcaacaaagctttctttggtacagatcaagtgagggtgatgcctcagactcacaggcatctggagcatatatatttcgaccagatggtaatacaccgactacggtttcatcctcggtgccactgaaagttatccgtggaccactggttgacgaagtgcatcagcaattcagctcatggatttatcagataacacgactctacaaaaacaaggagcatgctgaagttgaatacacgggaaggaggtcatcacacggctgacagcaaatatggtcacaaacagtacgttttatacagactccaatggaagggatttcctcaaaagggtgagaaactacagggaggactggaatcttcaagtaactcaaccagttgcaggaaattactatccggtgaacctaggagtgtatgtagcagatgaaaaatatgagctatctgtgcttgtggaccgtgctgtcggagcatcaagcattcaggatggtcagctagagattatgctacacaggcgtttacttaaggatgatggcaggggtgtcggagagccacttgacgaggtggtttgcgtggatcaagattgccaagggcttacggccaggggcaattactacgtcaatgtcgagaagctagggcatggagctcactggcgacgtacatatggccagcaagtctactcaccctttctccttgctttcactcatgaggatgagaccagctcgaaatcctacagcgtggccaaagctggtatgatgaatgccaactacagccttcctgataatgtcgccattgttactttgcagaatctagatgatggtaccacactactccgcttggcccatctctttcaagctgctgaggacccgagatattccaaggtggcaaaggttgatctgaaaaaggtgttcggaaagagaactatcaaggaattgacggagactagcctctccgcgaaccaaaagaagtcagacatgaagaagctcagctggagggtcattgggaacactgaaactggtcctgccgcagtaaaaggtggcccagttgacagtagggctctagtcgttgaactaggacccatggagatacgcaccttcttgctgaaattttagtggcagttgttcttttgtttgtaaacaaacaatagtccatagagtaatttctaccttttcattaacgtgcccaaatcttagttcaaataggatcaaatacttgggcaatggaggtgcacacccacaccaagtttgttcatgtaataatagctacatgtcgggaaaaaaaaaaggaacggttgtggtgcttttcattgtgtaaagcgggtatttcttcctagcggataccgttatctgttgggctgattggg

SEQ ID NO: 220293 - DNA, 3540 bp, Zea Mays
caagcctgtcgcagcacaagccggtcccgctcttttgactgaggcggagcccagcccagagcccaccgtgagctcaacgacgcccacgcccggtgccggtgcaaaccaaacgccaactccaatctccaactccaagagcgaagaaaccaatacccaaacccaaaggttcgtccgcattgtcggccagccagctcccactccactgcccgttccgttctgcgctcgtcatcgtcggggccggccgggcaagccatcagcggccgtgatggtgatggcgccggcgattctgctggcagtgctagtgctcgcggcggtggcagcggcgacggcgtcggcgttcgccgtggcgtccaacaacgcgacggtggtggccgggaagctgaacgtgcacctggtgcctcactcccacgacgacgtcgggtggctcaagaccgtcgaccagtactatgtcggctccaacaacagcatccagggcgcgtgcgtgatgaacaccctcgactccgtggtggacgcgctcgccagggatcccgcccgcaagttcgtcgtcgtcgagcaggctttcttccaaaggtggtgggccgagaaaagccccacaatccaggacatagtccacaaactggttgattccggacagctagagttcataaatggtgggtggtgtatgcacgatgaagctgccgtgcattacattgacatgattgatcagaccacgcttggtcaccggatgatcaagaaacagttcaataagactccaagagctggctggcaaattgatccttttggtcactctgcagtgcaagcttatttgcttggagcagagcttggttttgattctgtacatttcgcaagaattgattaccaagatagggcaacacggaaagcagacaaaggcctagaggttatatggcgtggctcaagaactttcggctcatcttcacagatcttcacgaatgcctttcctgtccattatagcccaccagatggctttggcttcgaagttttggatgaaaatatcatacctgttcaggatgacctgtcactttttgactacaatgtccaagaacgtgtagatgattttgttgctgcagccttagcacaggcaaatgttacacgtacagaccacataatgtggaccatgggggatgattttaactaccagtacgctgaatcctggttccggaatatggacaaacttatccaacatgtgaacaaggacggcagagtgcatgcgttgtattctactccgtctatctacacagatgctaagcatgcatcgaatgaatcttggccagtaaaatatgacgactatttcccctacgctgattcaacgaatgcatactggactgggtactttacgagccgtccaactttcaagcgatatgttcgagtacacagcggatactacttggctgcacgtcagatagagtttttggtgggcggtaggagctccttgggattgttcacttccagcttggaagatgcgatggggattgcccagcatcacgatgcagtctcaggtactgcgaaacagcacacgactgatgactacgcgaaacggcttgcgctgggagcagcaaaggttgaaaaaggtgtaaacaccgctctggcttgtctgaccagctccaacgggacatgtggatcctctgttgtaaaatttagtcagtgttcacttctcaatataagctactgcccttcgaccgaggaagcaatttcatcaacaaagcgtttagttgtagttgtttacaatcctcttggatgggaacgtagtgacttcataagagttcctgtcaatgatcaaaacctagttgtaaaaggctctgatggaaatattgttgagtcacagctagttgaggttgataatgtgacgagaaatttaagaaagttttatgtgaaggcttatcttggaatcacaacacacaaggcccctaagtattggctactatttcaagcttctgtaccaccaatgggctggaattcctacttcatttcaaaatcaactggagcaggatacaacagtactgagcatgtctcggacgtggtttccccaagtaacagcacgattgaagttggaccaggacatctaaagatgtccttctcaaaagcatctggacaactcaataggatattcaattccatctcaggagtggatttaccagttcaacaaagctttctttggtacagatcaagtgagggtgatgcctcagactcacaggcatctggagcatatatatttcgaccagatggtaatacaccgactacggtttcatcctcggtgccactgaaagttatccgtggaccactggttgacgaagtgcatcagcaattcagctcatggatttatcagataacacgactctacaaaaacaaggagcatgctgaagttgaatacacgattgggccgatccctgtcgatgatgatgtagggaaggaggtcatcacacggctgacagcaaatatggtcacaaacagtacgttttatacagactccaatggaagggatttcctcaaaagggtgagaaactacagggaggactggaatcttcaagtaactcaaccagttgcaggaaattactatccggtgaacctaggagtgtatgtagcagatgaaaaatatgagctatctgtgcttgtggaccgtgctgtcggagcatcaagcattcaggatggtcagctagagattatgctacacaggcgtttacttaaggatgatggcaggggtgtcggagagccacttgacgaggtggtttgcgtggatcaagattgccaagggcttacggccaggggcaattactacgtcaatgtcgagaagctagggcatggagctcactggcgacgtacatatggccagcaagtctactcaccctttctccttgctttcactcatgaggatgagaccagctcgaaatcctacagcgtggccaaagctggtatgatgaatgccaactacagccttcctgataatgtcgccattgttactttgcagaatctagatgatggtaccacactactccgcttggcccatctctttcaagctgctgaggacccgagatattccaaggtggcaaaggttgatctgaaaaaggtgttcggaaagagaactatcaaggaattgacggagactagcctctccgcgaaccaaaagaagtcagacatgaagaagctcagctggagggtcattgggaacactgaaactggtcctgccgcagtaaaaggtggcccagttgacagtagggctctagtcgttgaactaggacccatggagatacgcaccttcttgctgaaattttagtggcagttgttcttttgtttgtaaacaaacaatagtccatagagtaatttctaccttttcattaacgtgcccaaatcttagttcaaataggatcaaatacttgggcaatggaggtgcacacccacaccaagtttgttcatgtaataatagctacatgtcgggaaaaaaaaaaggaacggttgtggtgcttttcattgtgtaaagcgggtatttcttcctagcggataccgttatctgttgggctgattggg

SEQ ID NO: 220294 - DNA, 1705 bp, Zea Mays
ccgcgcgcatgccaacagacccctcatccgccgtgcgcctgacgcccaccccgacactacccacctccatcgtgctccgctccccgtccttcgtcccctcgcctgtcgcctcagcctccacgcgacgcgaccacggctcgccttcaaaattcaaatcctcgccgctagacgcgcccactgccatccagcctctggggtctggctcactgcccggccgtcaggccacctggcactggccacgcccagtcggtgcggaagaggaggccgcggacctggccgagctcccttgtgaggtggtcccggggcgcgcgggcctcacggtggcccatggacgccgggcggaagtcacgccgagcggaagtcacgctgagccatccatgcctaccctggcttcttccctgcctacgcggaagttggagctgagtcttgagtgcccatgaagctcatatcgacatgttggccttgttgggtagcaggttggagcaggttactccgttactgccgatgtgcattcacagtatgaaaatgagatccaggaattgatggatgtgatttctgttgaataagaggagaaaaatgacattcacaggaagcttcagaatgtggaaaatgagtgtaaatgcaagctggattgatgagttgaaaaggaagacgagtttcttcaaacagaaaacgtcatgaaccaattctaataggaaaacagaaacaagatttgtatcctcaacatgcttattaagtagcgttccatgggcttgtctttcagttctgaaaagggagcagaagatatgaaccatgacccccttatctaatcttcagaaactgcaactgtttcccttacggcgtagctttatctcatactgccggatttagaaaaatccactgctccaaattccaaaaatgacatatcactgccagttgcattagaaccaactgtgctctaaatatgttgcagatgtaggccattcctgaagaatgatggtcagttgctgctacgtctaatcattgggttccgtattactacatacacggagaaaacagattttccacatatattctttgttttgttctacaaacaaagttaagtgcttcgacaacatattcctaccttctagctctctctgaagcaaatttatttcctttcttttggggggagaagatctcttcaaacatgtgaggatgtttctgctgggcaagaaaatgctttagatgtttctattgggtagagagaaaaatggtgctggatcgatttaaatacagtacatgttctatgctgccatagctaaaacagcgttcgttgtttagaatcctaggtatcttaaactgtcttgtcattgctattagtattttccaatgcccatattgatgtatttatcctaattttcgtctcatgatgatctccagggccggtcctggaggggggcaagtggagcggccgcaccgggcccccgattttagaagggcccccaagtagtgtacatgtatataggttttatatgttgggtccggcctgttaaagttacaatagacctattttttaattgtctaactaactaaaattgcatctgtaactccagacattcaagagtatatttgggtttttattgagctcgacaacattgaagacgttaaatgatactgaactagaagcatgttgcagtgaattcgcaaaaacattctcttcacaagccagttctgacattgaggt

SEQ ID NO: 220295 - DNA, 2773 bp, Zea Mays
ccgcgcgcatgccaacagacccctcatccgccgtgcgcctgacgcccaccccgacactacccacctccatcgtgctccgctccccgtccttcgtcccctcgcctgtcgcctcagcctccacgcgacgcgaccacggctcgccttcaaaattcaaatcctcgccgctagacgcgcccactgccatccagcctctggggtctggctcactgcccggccgtcaggccacctggcactggccacgcccagtcggtgcggaagaggaggccgcggacctggccgagctcccttgtgaggtggtcccggggcgcgcgggcctcacggtggcccatggacgccgggcggaagtcacgccgagcggaagtcacgctgagccatccatgcctaccctggcttcttccctgcctacgcggaagttggagctgagtcttgagtgcccatgaagctcatatcgacatgttggccttgttgggtagcaggttggagcaggttactccgttactgccgatgtgcattcacagtatgaaaatgagatccaggaattgatggatgtgatttctgttgaataagaggagaaaaatgacattcacaggaagcttcagaatgtggaaaatgagtgtaaatgcaagctggattgatgagttgaaaaggaagacgagtttcttcaaacagaaaacgtcatgaaccaattctaataggaaaacagaaacaagatttgtatcctcaacatgcttattaagtagcgttccatgggcttgtctttcagttctgaaaagggagcagaagatatgaaccatgacccccttatctaatcttcagaaactgcaactgtttcccttacggcgtagctttatctcatactgccggatttagaaaaatccactgctccaaattccaaaaatgacatatcactgccagttgcattagaaccaactgtgctctaaatatgtaatatagtcatttcagtttgtttctgatcgcaatcttcctgcatacttgagacaaaagaagcttgtttctgaacctttttgagtcatgcaatgttgtcaggataacctgtccaaaaatcattcctggtcatgaacttccactaattagtagtaagtagtttattctataattatattggagcctaaaaatgcattagcttgtccaaaaaccatcactttatctactcttgatcagttttgataatttgttctttggatctagaacacagtagaggtatgcctgaaaatgcattagcttgtagtcaactgtgctaacgaaagcatagcagatcatagatagtgtttaaaatttaaataatgtacttcgcttatttttgctgcttttatagccttgaagactttgaataaaaaaacatagttcaggtacataataaaaaagagcttcctgcatacttgacacaaaaagattccatcccgcccaccctttaattcggtcttcagagagtttgaataaaaaaatggaaaacaagagcttcaggtaactcctttgtacaaaggagcttctcttcaatagcatcaagttaattgttagttaagaaaacatatcaagtatcttttgtggagggcagttatggactgagacatctcatctcacttgtagagttaagtaaactaaaatagcatcaagttaattgttagtttacacaatattttgaaatgcgcccagcaacatgcattttagtacgtgtttatgccatgtgatgcatgttcaactgcattatcttcattttcatcccttctacaaagtttccaacatctgaaccatctgttacttctcagcaggttgcagatgtaggccattcctgaagaatgatggtcagttgctgctacgtctaatcattgggttccgtattactacatacacggagaaaacagattttccacatatattctttgttttgttctacaaacaaagttaagtgcttcgacaacatattcctaccttctagctctctctgaagcaaatttatttcctttcttttggggggagaagatctcttcaaacatgtgaggatgtttctgctgggcaagaaaatgctttagatgtttctattgggtagagagaaaaatggtgctggatcgatttaaatacagtacatgttctatgctgccatagctaaaacagcgttcgttgtttagaatcctaggtatcttaaactgtcttgtcattgctattagtattttccaatgcccatattgatgtatttatcctaattttcgtctcatgatgatctccagggccggtcctggaggggggcaagtggagcggccgcaccgggcccccgattttagaagggcccccaagtagtgtacatgtatataggttttatatgttgggtccggcctgttaaagttacaatagacctattttttaattgtctaactaactaaaattgcatctgtaactccagacattcaagagtatatttgggtttttattgagctcgacaacattgaagacgttaaatgatactgaactagaagcatgttgcagtgaattcgcaaaaacattctcttcacaagccagttctgacattgagcttttcaaagttaaaattgtagaagaactattcaagatggatcacgagagaacacccaagcctaatatgacatgaagtcacacacagcgcaactctccgagtaccacctcgatcgttggatgaggacgagcaacgaagcaagctataaaaggggcaggttcaacatcattggcgcatggagccgaacgccataacagacccctagaggaactaatcccatctttg

SEQ ID NO: 220296 - DNA, 735 bp, Zea Mays
gttctagatgcgatttgcttcatgctttttttgtccaaggaagaatgtgaccatttgatttcactggcaaagcctcatatgaagaagtcaacagtagttgattcagcaactggaggcagcaaggacagcagggtgcggacaagttcaggaatgtttcttagaagagggcaggacaaaattattcggacaattgagaaaaggatagcagattacaccttcatacctgtagagcagggtgagggtcttcaagttctccactatgaagttgggcagaagtatgaacctcactttgattacttccatgatgattacaacaccaagaatggaggccagcgtatagcaactcttcttatgtatctttcggatgttgaagatggtggcgagactgtgttcccttcgtcgacaacaaacagcagctcgtcaccattttataatgagctgtctgaatgtgcaaagggtggtctatctgttaaaccaaagatgggagatgcgcttctgttctggagcatgaagcctgatgggtccctagatcccacaagcctgcatggtggatgcccagttataaaaggcaacaaatggtcatcgacgaagtggatgcgtgttcatgagtacaaagtttagatacaaaaagacacagacctgaggtacgacattttgcttagaaaccaaaatactccttttttagtttgcctactgcaaaagtaatgctgggcctctaccttgcaccaacaatat

SEQ ID NO: 220297 - DNA, 2402 bp, Zea Mays
atcacatcacgtcccgtctggtagggtaccgagaccaaaatccaccggaaagggaaaggaaagcacccaaaacacaggcggcgctcagcctccagctgtccgcctcccccacccggccacaccgttcgccacgcaccggaccaaccgaagctccaccaagctgcgcacgcaacgcaagcagaggaaatttccatagcctccttcctcgcatgagcttccgtccgggcacgtaagtttctcctgccccgcgccccgcgccccgcgcccctccgcgattcgacgccaccgaggttccccttgcttctgcggaatcgaggctaggttcttggttttgctgcgcgggagcattactagattctaggccgggaatgtagctcctgctgaatatttggaccgcgtgtttgctattttagtgtggggtagtgggccgatcggttcttggtctccagttatggtaaggcgttgacctgtgagcgcaacctgttcgttgatattactgaccggagcgccaatagagtcttgggtagtgaacctggagctgttgctactcttgtttccccatttcgtttcgaggaaagcgtggaaagagcttgctttggcttaggctcaggcccaggaccagaacttggtgtttatgcagtcgtagaatgtaacagcacagggcaaggaacctgagtggctctaatattttggatttggaatgacttcagtggttatcatatgtttcgtagatctgaaacaatgggctcaacttctgttatagagtaattgttagtatatatcgcaagcctggatggactcccttagatctagttcagttagagcagcgccagaaatatgcgttcaagttgataatcagtctaagattcctagtcaaacgagaatgcaagatgaacactcatactctcttagatctagttcagttagagtggctgttttcacatgtctgactatatagactgcatcgtttcctcatacataggataatgcatttggaacctactgacatttcatatggtgatggtgaatccattatatactatccatcatgaggaagatggccctttcaaatctgaagggtaaggcaaaatctaaatgccccaaatccattacagccaaagatcaccaaacctacagcaaacacttaacctgacaaaaaattattaaaccacaaatatagcatggcctccatccagaagtttacatgaaagatatcgataatttgtgcttacatgatcatgccaatgttaaacactgacaacagggtaaaagcgccttcaattttttctgtactgcatgtttattaattgagaaatccagtaagacatcatggtttgcatacactgagttgcctaagatatcaatttgttgaaatgtacttttctcctgcaaatttttcttttgagttttgacagattaggttcttttagattttcatgctaacatctcatgtatgatctgtgcaggtgccacatgagatgacatgttcttaacacctgttttcattaggcatttacaacagcagtgagatatctgcaaatgctgattagcttcaaggttattggttttatctttgccaaataactgtaatactgttgcagccaggggtttgcaccttggttttttatgaggggaggaagatcagatgaattttgtcgttgccaggcatgccttggtaagtacacactacttggagacgaagaaaatccacgattgtcaacatatgacagacggctcccctgctgtggctgtggaataggttggtcttgttttcttctaggtttcttgtgccctatcatttggtacgttgcagctcttctctattgctgcaagtactataatcgggatcctcgtgaacggactggactcgcagcttccgctgttctggcggttatcattacagctgtaactattgtaaccctgtctgttctgctgatatgttgtgtcaacaaacggttcttgaatagctgtgcagtttggcctaagtgatagcagcaagatatctattgcaaaacatcagcgttgaactactaactgaaatattctttagattctttagtcagtgcacttattgttggactgcaaaagggaaatcaacaaattatgtgtaacatgatccattatcacctgtgactgtacattacagattactggacctgtggaaattctgaagctatatgcagcaattccttctctcccctgaaacttttgaacaatgttgttactgataattggcctgatcagaacaatcagagttcagaacttgtatccaatctggctgaaattacatgagcagattaatctggaatggaaattgtgctgcattttttgttctttgactcttcggtactgatttcctttccgcctttattgcatatatcagataaaaacttttcggacca

SEQ ID NO: 220298 - DNA, 1103 bp, Zea Mays
ggaaaggaaagcacccaaaacacaggcggcgctcagcctccagctgtccgcctcccccacccggccacaccgttcgccacgcaccggaccaaccgaagctccaccaagctgcgcacgcaacgcaagcagaggaaatttccatagcctccttcctcgcatgagcttccgtccgggcacgtgccacatgagatgacatgttcttaacacctgttttcattaggcatttacaacagcagtgagatatctgcaaatgctgattagcttcaaggttattggttttatctttgccaaataactgtaatactgttgcagccaggggtttgcaccttggttttttatgaggggaggaagatcagatgaattttgtcgttgccaggcatgccttggtaagtacacactacttggagacgaagaaaatccacgattgtcaacatatgacagacggctcccctgctgtggctgtggaatagttttcttctaggtttcttgtgccctatcatttggtacgttgcagctcttctctattgctgcaagtactataatcgggatcctcgtgaacggactggactcgcagcttccgctgttctggcggttatcattacagctgtaactattgtaaccctgtctgttctgctgatatgttgtgtcaacaaacggttcttgaatagctgtgcagtttggcctaagtgatagcagcaagatatctattgcaaaacatcagcgttgaactactaactgaaatattctttagattctttagtcagtgcacttattgttggactgcaaaagggaaatcaacaaattatgtgtaacatgatccattatcacctgtgactgtacattacagattactggacctgtggaaattctgaagctatatgcagcaattccttctctcccctgaaacttttgaacaatgttgttactgataattggcctgatcagaacaatcagagttcagaacttgtatccaatctggctgaaattacatgagcagattaatctggaatggaaattgtgctgcattttttgttctttgactcttcggtactgatttcctttccgcctttattgcatatatcagataaaaacttttcggacca

SEQ ID NO: 220299 - DNA, 1856 bp, Zea Mays
ctcttatctccttcccccagccgccctccgcctccgcgccatcgacacgctcgagagcgtcgctgcctgctgctcgcgttcaacggtgccttggttcctcaactcggtgaaaagcctcggctgctatccttgtcagctgcaatcgcaaaggctgcctattctgatgcaagattcctgacaccaaaaactggttcaagaggtagaggtaaacacctgctatcacctagttatagtttgcattcacagacctcttctgaacaactaaaccatgtaccatcgtcaagatttcgccagaaaaggggttcacgttttatcgtcagagctgaagctgatttctatagtgtacttggtgtctcaagaaatgctagtaaatctgaaatcaagagcgcctatcggaagcttgctaggagctatcatccagatgtaaacaaagatcctggtgctgaacaaaagttcaaggatatcagtaatgcttatgaggttctgtctgatgatgagaagcgatcgatctatgataaatatggagaagcaggtctgaagggtgctggcatgggcacaggagattactcaaacccgtttgatctctttgagtccctgtttgaagggtttggtggaatgggtggaatggggggtggccgtgctgctcggaacagaccaatgcaaggtgatgatgagagctacaatctggtactcaatttcaaggaagctgtgtttggtgtggagaaggagattgagataaccagattggaaggctgtaacacctgcgacggaagtggtgccaagccaggtacaaaggcaaccacatgtaaaacttgtggaggtcagggccaggtagtctcctccacaagaacaccgcttggaatattccagcaagtctccacctgcaatacttgtggtggcaccggtgaattctccactccttgcaacacctgtgggggtgatggccgggtgcgaaggacaaagaggatcagcctaaaggttcctgctggagtggattctggaagcaggctgagggtccggtctgagggtaatgctgggcggcgaggaggccctcctggggacctttatgtcttcattgatgttctctctgatcctgttcttaagcgagatgggacaaacattctctacacatgcaaggtttcttacattgatgcaatccttgggacaaccgtcaaagtccccactgttgacggaacggttgaccttaagataccctcagggactcagccaggcacaactctggtgatgtccaagaaaggtgtcccgcttctcgggaagtcaaatgcccgtggagaccagctggtgcgtgtccaggttgagattccgaagcgtctgagcagcgacgagaagaagctaattgaggagcttgcaaacctgaacaaggctcaaacagccaatagcaggagatgattatcgcacatggcttcgtaggacagcgtgcttgtgtgataggcaattttgatgcaaactgcagtgatgattggatgaaaagagttggtagtgataaactcttctacgaactacatacagcaaggggtctggagcaaaaaaatgtgccgttccacatctgtaacctcgtttttaagctattgaaagttgagtcagtgaactggacgtttttgcaatagcttagcatatgcactaggcgactttattagccatttttttttgttgttatacggcttttgtattcttggaagccttaggcaagatatctgatggtggaatcaggtttagacttgacatttcttgcacaaatgctgcaccatgcattcatggaatctgtaagctgtaccatggaaatgttaactgtagttttatggtttgtgatgcattgggggtttattggtttgctc

SEQ ID NO: 220300 - DNA, 1912 bp, Zea Mays
caagtggttcaccactcaccaccccctcttatctccttcccccagccgccctccgcctccgcgccatcgacacgctcgagagcgtcgctgcctgctgctcgcgcggctacacgcaagtaataaacattatatggcgctagtacagttcaacggtgccttggttcctcaactcggtgaaaagcctcggctgctatccttgtcagctgcaatcgcaaaggctgcctattctgatgcaagattcctgacaccaaaaactggttcaagaggtagaggtaaacacctgctatcacctagttatagtttgcattcacagacctcttctgaacaactaaaccatgtaccatcgtcaagatttcgccagaaaaggggttcacgttttatcgtcagagctgaagcttgtacttggtgtctcaagaaatgctagtaaatctgaaatcaagagcgcctatcggaagcttgctaggagctatcatccagatgtaaacaaagatcctggtgctgaacaaaagttcaaggatatcagtaatgcttatgaggttctgtctgatgatgagaagcgatcgatctatgataaatatggagaagcaggtctgaagggtgctggcatgggcacaggagattactcaaacccgtttgatctctttgagtccctgtttgaagggtttggtggaatgggtggaatggggggtggccgtgctgctcggaacagaccaatgcaaggtgatgatgagagctacaatctggtactcaatttcaaggaagctgtgtttggtgtggagaaggagattgagataaccagattggaaggctgtaacacctgcgacggaagtggtgccaagccaggtacaaaggcaaccacatgtaaaacttgtggaggtcagggccaggtagtctcctccacaagaacaccgcttggaatattccagcaagtctccacctgcaatacttgtggtggcaccggtgaattctccactccttgcaacacctgtgggggtgatggccgggtgcgaaggacaaagaggatcagcctaaaggttcctgctggagtggattctggaagcaggctgagggtccggtctgagggtaatgctgggcggcgaggaggccctcctggggacctttatgtcttcattgatgttctctctgatcctgttcttaagcgagatgggacaaacattctctacacatgcaaggtttcttacattgatgcaatccttgggacaaccgtcaaagtccccactgttgacggaacggttgaccttaagataccctcagggactcagccaggcacaactctggtgatgtccaagaaaggtgtcccgcttctcgggaagtcaaatgcccgtggagaccagctggtgcgtgtccaggttgagattccgaagcgtctgagcagcgacgagaagaagctaattgaggagcttgcaaacctgaacaaggctcaaacagccaatagcaggagatgattatcgcacatggcttcgtaggacagcgtgcttgtgtgataggcaattttgatgcaaactgcagtgatgattggatgaaaagagttggtagtgataaactcttctacgaactacatacagcaaggggtctggagcaaaaaaatgtgccgttccacatctgtaacctcgtttttaagctattgaaagttgagtcagtgaactggacgtttttgcaatagcttagcatatgcactaggcgactttattagccatttttttttgttgttatacggcttttgtattcttggaagccttaggcaagatatctgatggtggaatcaggtttagacttgacatttcttgcacaaatgctgcaccatgcattcatggaatctgtaagctgtaccatggaaatgttaactgtagttttatggtttgtgatgcattgggggtttattggtttgctc

SEQ ID NO: 220301 - DNA, 996 bp, Zea Mays
ctcacgccagccgccaacgccccaatcccgtaaccgcagcctcgccctgctcgcatcttcctctccctctcagcgctggtgctcaatctacaggtcgtcccgctccctacacacccgccctccggtgtgaaccttcatgacgtccgcaaccactctccgatctgctgtcgtgacctcatccagccgtgctgtggcagtggatcggagttcgctccagctctgattgaattccactactatatgtgccacttaaagttgttatgtcaaaatattatggtgaaagcgagcgtctattgggatctattttttatcttgcaaatgatcttcctgaaggagacaaatccccacgtccagagttacaagaagatcaagcttggctgtggctgcagctgtgttgcctcctcttgttggaccgaagagagggaggggagaagcagctggcgtgcagacttctactcaggtggtcttttattctctatggggcttctaggatacatcttctccagaagcaccataagtcttgtcttgggcattacaccagggctagccactctgctacttggcactctcagtctgaagttctggaggagcgacagatccagcttcctgcttatcttggctcagaggtgatgctgatgtgcaagcatcttcaccttgagttctgcctagatccttgaatcaagtttattttcccatcctgctccattcgaggtagcccaatcgtctgtcctcacatcaactttcacctgccttaagcctttaggttcatttgtcttatatataccatggtaaaccacaccatgaatatgccataaataagtaacaagagtgtatagcaactcagcacacacaggaaatcaggatccttcacgtacacctttcatgttcttgcaaccttgattctacatgcttcaggtagtctagaatatcagattgttgtatatatttaacaccttttgtaccatcaaattcagaaatgcactcaagaaaaggctt

SEQ ID NO: 220302 - DNA, 1407 bp, Zea Mays
cctcacgccagccgccaacgccccaatcccgtaaccgcagcctcgccctgctcgcatcttcctctccctctcagcgctggtgctcaatctacaggtcgtcccgctccctacacacccgccctccggtgtgaaccttcatgacgtccgcaaccactctccgatctgctgtcgtgacctcatccagccgtgctgtggcagtggatcggagttcgctccagctctgattgaattccactactatatgtgccacttaaagttgttatgtcaaaatattatggtgaaagcgagcgtctattgggatctattttttatcttgcaaatgatcttcctgaaggaggtaatatattcttagatgaggtatatatcgtaatacttatagcataaacactcaagccactacaagtaagctcttgccctttgcttgtttccagattgatatgtcaagatacgcttgtttcatttgagctcactgttatctgaaaatctatagactgccttcgtccccttcatcactgccaatgaccgtgacttggccaccacagcaaaagcacgcaggatccttgatgtgtgtggtctagacgtgattgaattgggcgtgcctgactttgatccattagccgaatgtccagttattcagctcagattgtttgcctatacaatttgttcttatactatactgtctatgtatgctcctgcttcctgcgttttggtccagtagaagggtgcaagctcatcagaaaagaaaagacaaatccccacgtccagagttacaagaagatcaagcttggctgtggctgcagctgtgttgcctcctcttgttggaccgaagagagggaggggagaagcagctggcgtgcagacttctactcaggtggtcttttattctctatggggcttctaggatacatcttctccagaagcaccataagtcttgtcttgggcattacaccagggctagccactctgctacttggcactctcagtctgaagttctggaggagcgacagatccagcttcctgcttatcttggctcagaggtgatgctgatgtgcaagcatcttcaccttgagttctgcctagatccttgaatcaagtttattttcccatcctgctccattcgaggtagcccaatcgtctgtcctcacatcaactttcacctgccttaagcctttaggttcatttgtcttatatataccatggtaaaccacaccatgaatatgccataaataagtaacaagagtgtatagcaactcagcacacacaggaaatcaggatccttcacgtacacctttcatgttcttgcaaccttgattctacatgcttcaggtagtctagaatatcagattgttgtatatatttaacaccttttgtaccatcaaattcagaaatgcactcaagaaaaggctt

SEQ ID NO: 220303 - DNA, 1472 bp, Zea Mays
cccaaccaaaccgaccttcggcggcccagaacagcagcctatcacgaccaaaaccgccaaaccctagttgtgcatgcatagcccctcacgccagccgccaacgccccaatcccgtaaccgcagcctcgccctgctcgcatcttcctctccctctcagcgctggtgctcaatctacaggtcgtcccgctccctacacacccgccctccggtgtgaaccttcatgacgtccgcaaccactctccgatctgctgtcgtgacctcatccagccgtgctgtggcagtggatcggagttcgctccagctctgattgaattccactactatatgtgccacttaaagttgttatgtcaaaatattatggtgaaagcgagcgtctattgggatctattttttatcttgcaaatgatcttcctgaaggaggtaatatattcttagatgaggtatatatcgtaatacttatagcataaacactcaagccactacaagtaagctcttgccctttgcttgtttccagattgatatgtcaagatacgcttgtttcatttgagctcactgttatctgaaaatctatagactgccttcgtccccttcatcactgccaatgaccgtgacttggccaccacagcaaaagcacgcaggatccttgatgtgtgtggtctagacgtgattgaattgggcgtgcctgactttgatccattagccgaatgtccagttattcagctcagattgtttgcctatacaatttgttcttatactatactgtctatgtatgctcctgcttcctgcgttttggtccagtagaagggtgcaagctcatcagaaaagaaaagagttacaagaagatcaagcttggctgtggctgcagctgtgttgcctcctcttgttggaccgaagagagggaggggagaagcagctggcgtgcagacttctactcaggtggtcttttattctctatggggcttctaggatacatcttctccagaagcaccataagtcttgtcttgggcattacaccagggctagccactctgctacttggcactctcagtctgaagttctggaggagcgacagatccagcttcctgcttatcttggctcagaggtgatgctgatgtgcaagcatcttcaccttgagttctgcctagatccttgaatcaagtttattttcccatcctgctccattcgaggtagcccaatcgtctgtcctcacatcaactttcacctgccttaagcctttaggttcatttgtcttatatataccatggtaaaccacaccatgaatatgccataaataagtaacaagagtgtatagcaactcagcacacacaggaaatcaggatccttcacgtacacctttcatgttcttgcaaccttgattctacatgcttcaggtagtctagaatatcagattgttgtatatatttaacaccttttgtaccatcaaattcagaaatgcactcaagaaaaggctt

SEQ ID NO: 220304 - DNA, 1903 bp, Zea Mays
ctcaggcccaaccaaaccgaccttcggcggcccagaacagcagcctatcacgaccaaaaccgccaaaccctagttgtgcatgcatagcccctcacgccagccgccaacgccccaatcccgtaaccgcagcctcgccctgctcgcatcttcctctccctctcagcgctggtgctcaatctacaggtcgtcccgctccctacacacccgccctccggtgtgaaccttcatgacgtccgcaaccactctccgatctgctgtcgtgacctcatccagccgtgctgtggcagtggatcggagttcgctccagctctgattgaattccactactatatgtgccacttaaagttgttatgtcaaaatattatggtgaaagcgagcgtctattgggatctattttttatcttgcaaatgatcttcctgaaggagattgatatgtcaagatacgcttgtttcatttgagctcactgttatctgaaaatctatagactgccttcgtccccttcatcactgccaatgaccgtgacttggccaccacagcaaaagcacgcaggatccttgatgtgtgtggtctagacgtgattgaattgggcgtgcctgactttgatccattagccgaatgtccagttattcagctcagattgtttgcctatacaatttgttcttatactatactgtctatgtatgctcctgcttcctgcgttttggtccagtagaagggtgcaagctcatcagaaaagaaaaggtggatctttctttattttaattaaaaaatgtctatagatagcttgtaacagataaatccataccccacctgtccccagcacccactcgcccactcacctgtaaaattgtggctgccttttcagattgctctttgcatctgatttttggctttgctttccccgtatgtctcaagtctagttaccatttatggctttcgcacctgtaaacatttatggttgcttttgttgattcatactagcatctatgctaattttttaatgcacgaccttaatgctacttttatgtgtatttatgatcaatcaccatgtattttacgctcttcggtttttatgtcaaaaaaatgggtttttacgctgatttatatgtgtgcctatgctgcaacacatacaattctaactaaatatgcataaagcagcgcgccagcacctcatattttattctcattgtttctacttcgttaattcattgacccatgtctctgtcttggtatattctggagacaaatccccacgtccagagttacaagaagatcaagcttggctgtggctgcagctgtgttgcctcctcttgttggaccgaagagagggaggggagaagcagctggcgtgcagacttctactcaggtggtcttttattctctatggggcttctaggatacatcttctccagaagcaccataagtcttgtcttgggcattacaccagggctagccactctgctacttggcactctcagtctgaagttctggaggagcgacagatccagcttcctgcttatcttggctcagaggtgatgctgatgtgcaagcatcttcaccttgagttctgcctagatccttgaatcaagtttattttcccatcctgctccattcgaggtagcccaatcgtctgtcctcacatcaactttcacctgccttaagcctttaggttcatttgtcttatatataccatggtaaaccacaccatgaatatgccataaataagtaacaagagtgtatagcaactcagcacacacaggaaatcaggatccttcacgtacacctttcatgttcttgcaaccttgattctacatgcttcaggtagtctagaatatcagattgttgtatatatttaacaccttttgtaccatcaaattcagaaatgcactcaagaaaaggctt

SEQ ID NO: 220305 - DNA, 1923 bp, Zea Mays
gttggggaggatttggcccgcaaggagaggaagaggatattggagcttgtccagagccgagggatgcagcgcgggtcatacccgaagtttgatgttgcagtgaagggccagaagaggtggttgttaaattcaacatgccatctaattgcaatgtatcacaccttatcgttgatcttgtaacacatattggacttgaggcagaacaacatggtggtggctcagaggttttagtgcgtgcttgggacagtccagctgcacgtcaaatcacactgaaccctcccaagaagactagcactggagatcacaatgaagatggtctctgtgttctgatatttgaaccacttattggatcagattattctgaaattgaattcatcaagcctgggagttttagtttgaaagaacttgaggctttgataagtgctttaaaaatagcctctgaaaaggggtcatcagggaaaaacacaccaagaaaaggaaatggtcaaagatccaagcatttgccctctttggagaaagttgtatctgatttagaggctatgggtgttagagtctatggatttgatgaaacatcaagtgttccaatggatggcactgtaatctgggagaaccttgcaggatatgaacctcagaaaagggaaatagaggatactgtactcttagctttacagagtcctgaagtgtatgatgatattgctcgcggcacgcgctgcaaatttgagacaaatagacctcgcgctgttctttttgagggcccacctgggacaggcaagacatcttcagctcgagttattgccaaacaagcaggaattccactactatatgtgccacttgaagttgttatgtcaaaatattatggcgaaagtgagcgtctattgggatctgttttttcacttgcaaatgatcttcctgaaggaggtattatattcctagatgaggtggattcttttgctattgctcgagacagtgaaattcatgaagctacacgaagaatcttgtcagtaattctgcgacagatcgatgggtttgagcaggatagacgggtggtagtcattgctgcaacaaatagaaaggaggaccttgatccagctctcatcagatcagcaaactcgtgtggaaatagctgcacagtatgccaagcatttgactagatcagaattggttcaattttcattggccactcaagagatgtcaggaagagatatcagggatgtgtgccaacaagctgaaagacactgggcgtcaaagttaataagggggcaggttccaaaagatgagaagggggagccgagtcttcctccaattgacgaatacctttcctgtgctgaacagagacgtaagtccttgcctggtagaacgagccagacatccaggtcccctgcccttaagttagcatgaggaatgtacctaccagtttacctttacatgttcatatatcacatatagtattaccgaatgtagttcagatggaagtatgtaggcggttctaaacagtttttgttatgcgacatatgctaatacttaggaaatgtgacatctatgatctatccaaattttgacgtcagcacacctaaaatttttggagaggaaagcttaagtgacagatacatggatttcttgtgttgttttttctaaactaacgtacagagattatcaacgtacaagtgaatatcatgtttgagtgccagtttcatctcttaagatgaacatttggtacaaatttgtattgcccaagcaactctgaagctagtaattttgacatactgtgtttttctggtcaaattttgtagtcatcgctcatatgtctttatttatagttttgtacatattagattggatataaagatgatagctatggacatgtctcgagaagtaattcctggtgatcatcttaatttggagacttgtgagttgcaaaaggta

SEQ ID NO: 220306 - DNA, 2440 bp, Zea Mays
cagcatttgacgcttcgttctttcgtgggcggggggaaagcccagctgcgaaactctggccgcgaactctctggcatcgccgtcccggcctcgagccatccacgttccacggtctcgaactcgaagcccagcaccacgcgaccacgagccgcccttctccggcggcgtcgcagtgagcccggcatggccatgctactccgccgccgactcccgctgctccgcctcctccggccgctgcatactggatcgatggcttcgatctcttcgtcctccacacctccccctccccctccccctcctcttcagaaacctcacgccgccttcgtggggccaagatcacgccgcctgcggttccccaatgccgcgcccgttgagtcggggcggggggctgggaaatcatctcccgctgccgcctatctcgctatgggcgcggccgccgccctcgcgtcactgccggtggcctacgcagacagcaatgagcagggagcggtcgacacagtagcgagtgccgatcccgcggttggggaggatttggcccgcaaggagaggaagaggatattggagcttgtccagagccgagggatgcagcgcgggtcatacccgaagtttgatgttgcagtgaagggccagaaggtggttgttaaattcaacatgccatctaattgcaatgtatcacaccttatcgttgatcttgtaacacatattggacttgaggcagaacaacatggtggtggctcagaggttttagtgcgtgcttgggacagtccagctgcacgtcaaatcacactgaaccctcccaagaagactagcactggagatcacaatgaagatggtctctgtgttctgatatttgaaccacttattggatcagattattctgaaattgaattcatcaagcctgggagttttagtttgaaagaacttgaggctttgataagtgctttaaaaatagcctctgaaaaggggtcatcagggaaaaacacaccaagaaaaggaaatggtcaaagatccaagcatttgccctctttggagaaagttgtatctgatttagaggctatgggtgttagagtctatggatttgatgaaacatcaagtgttccaatggatggcactgtaatctgggagaaccttgcaggatatgaacctcagaaaagggaaatagaggatactgtactcttagctttacagagtcctgaagtgtatgatgatattgctcgcggcacgcgctgcaaatttgagacaaatagacctcgcgctgttctttttgagggcccacctgggacaggcaagacatcttcagctcgagttattgccaaacaagcaggaattccactactatatgtgccacttgaagttgttatgtcaaaatattatggcgaaagtgagcgtctattgggatctgttttttcacttgcaaatgatcttcctgaaggaggtattatattcctagatgaggtggattcttttgctattgctcgagacagtgaaattcatgaagctacacgaagaatcttgtcagtaattctgcgacagatcgatgggtttgagcaggatagacgggtggtagtcattgctgcaacaaatagaaaggaggaccttgatccagctctcatcagatcagcaaactcgtgtggaaatagctgcacagtatgccaagcatttgactagatcagaattggttcaattttcattggccactcaagagatgtcaggaagagatatcagggatgtgtgccaacaagctgaaagacactgggcgtcaaagttaataagggggcaggttccaaaagatgagaagggggagccgagtcttcctccaattgacgaatacctttcctgtgctgaacagagacgtaagtccttgcctggtagaacgagccagacatccaggtcccctgcccttaagttagcatgaggaatgtacctaccagtttacctttacatgttcatatatcacatatagtattaccgaatgtagttcagatggaagtatgtaggcggttctaaacagtttttgttatgcgacatatgctaatacttaggaaatgtgacatctatgatctatccaaattttgacgtcagcacacctaaaatttttggagaggaaagcttaagtgacagatacatggatttcttgtgttgttttttctaaactaacgtacagagattatcaacgtacaagtgaatatcatgtttgagtgccagtttcatctcttaagatgaacatttggtacaaatttgtattgcccaagcaactctgaagctagtaattttgacatactgtgtttttctggtcaaattttgtagtcatcgctcatatgtctttatttatagttttgtacatattagattggatataaagatgatagctatggacatgtctcgagaagtaattcctggtgatcatcttaatttggagacttgtgagttgcaaaaggta

SEQ ID NO: 220307 - DNA, 2470 bp, Zea Mays
cagcatttgacgcttcgttctttcgtgggcggggggaaagcccagctgcgaaactctggccgcgaactctctggcatcgccgtcccggcctcgagccatccacgttccacggtctcgaactcgaagcccagcaccacgcgaccacgagccgcccttctccggcggcgtcgcagtgagcccggcatggccatgctactccgccgccgactcccgctgctccgcctcctccggccgctgcatactggatcgatggcttcgatctcttcgtcctccacacctccccctccccctccccctcctcttcagaaacctcacgccgccttcgtggggccaagatcacgccgcctgcggttccccaatgccgcgcccgttgagtcggggcggggggctgggaaatcatctcccgctgccgcctatctcgctatgggcgcggccgccgccctcgcgtcactgccggtggcctacgcagacagcaatgagcagggagcggtcgacacagtagcgagtgccgatcccgcggttggggaggatttggcccgcaaggagaggaagaggatattggagcttgtccagagccgagggatgcagcgcgggtcatacccgaagtttgatgttgcagtgaagggccagaaggtggttgttaaattcaacatgccatctaattgcaatgtatcacaccttatcgttgatcttgtaacacatattggacttgaggcagaacaacatggtggtggctcagaggttttagtgcgtgcttgggacagctgcacgtcaaatcacactgaaccctcccaagaagactagcactggagatcacaatgaagatggtctctgtgttctgatatttgaaccacttattggatcagattattctgaaattgaattcatcaagcctgggagttttagtttgaaagaacttgaggctttgataagtgctttaaaaatagcctctgaaaaggggtcatcagggaaaaacacaccaagaaaaggaaatggtcaaagatccaagcatttgccctctttggagaaagttgtatctgatttagaggctatgggtgttagagtctatggatttgatgaaacatcaagtgttccaatggatggcactgtaatctgggagaaccttgcaggatatgaacctcagaaaagggaaatagaggatactgtactcttagctttacagagtcctgaagtgtatgatgatattgctcgcggcacgcgctgcaaatttgagacaaatagacctcgcgctgttctttttgagggcccacctgggacaggcaagacatcttcagctcgagttattgccaaacaagcaggaattccactactatatgtgccacttgaagttgttatgtcaaaatattatggcgaaagtgagcgtctattgggatctgttttttcacttgcaaatgatcttcctgaaggaggtattatattcctagatgaggtggattcttttgctattgctcgagacagtgaaattcatgaagctacacgaagaatcttgtcagtaattctgcgacagatcgatgggtttgagcaggatagacgggtggtagtcattgctgcaacaaatagaaaggaggaccttgatccagctctcatcagccgttttgattcaatcatctgttttggcttaccagatcagcaaactcgtgtggaaatagctgcacagtatgccaagcatttgactagatcagaattggttcaattttcattggccactcaagagatgtcaggaagagatatcagggatgtgtgccaacaagctgaaagacactgggcgtcaaagttaataagggggcaggttccaaaagatgagaagggggagccgagtcttcctccaattgacgaatacctttcctgtgctgaacagagacgtaagtccttgcctggtagaacgagccagacatccaggtcccctgcccttaagttagcatgaggaatgtacctaccagtttacctttacatgttcatatatcacatatagtattaccgaatgtagttcagatggaagtatgtaggcggttctaaacagtttttgttatgcgacatatgctaatacttaggaaatgtgacatctatgatctatccaaattttgacgtcagcacacctaaaatttttggagaggaaagcttaagtgacagatacatggatttcttgtgttgttttttctaaactaacgtacagagattatcaacgtacaagtgaatatcatgtttgagtgccagtttcatctcttaagatgaacatttggtacaaatttgtattgcccaagcaactctgaagctagtaattttgacatactgtgtttttctggtcaaattttgtagtcatcgctcatatgtctttatttatagttttgtacatattagattggatataaagatgatagctatggacatgtctcgagaagtaattcctggtgatcatcttaatttggagacttgtgagttgcaaaaggta

SEQ ID NO: 220308 - DNA, 2855 bp, Zea Mays
cagcatttgacgcttcgttctttcgtgggcggggggaaagcccagctgcgaaactctggccgcgaactctctggcatcgccgtcccggcctcgagccatccacgttccacggtctcgaactcgaagcccagcaccacgcgaccacgagccgcccttctccggcggcgtcgcagtgagcccggcatggccatgctactccgccgccgactcccgctgctccgcctcctccggccgctgcatactggatcgatggcttcgatctcttcgtcctccacacctccccctccccctccccctcctcttcagaaacctcacgccgccttcgtggggccaagatcacgccgcctgcggttccccaatgccgcgcccgttgagtcggggcggggggctgggaaatcatctcccgctgccgcctatctcgctatgggcgcggccgccgccctcgcgtcactgccggtggcctacgcagacagcaatgagcagggagcggtcgacacagtagcgagtgccgatcccgcggttggggaggatttggcccgcaaggagaggaagaggatattggagcttgtccagagccgagggatgcagcgcgggtcatacccgaagtttgatgttgcagtgaagggccagaaggtggttgttaaattcaacatgccatctaattgcaatgtatcacaccttatcgttgatcttgtaacacatattggacttgaggcagaacaacatggtggtggctcagaggttttagtgcgtgcttgggacagtccagctgcacgtcaaatcacactgaaccctcccaagaagactagcactggagatcacaatgaagatggtctctgtgttctgatatttgaaccacttattggatcagattattctgaaattgaattcatcaagcctgggagttttagtttgaaagaacttgaggctttgataagtgctttaaaaatagcctctgaaaaggggtcatcagggaaaaacacaccaagaaaaggaaatggtcaaagatccaagcatttgccctctttggagaaagttgtatctgatttagaggctatgggtgttagagtctatggatttgatgaaacatcaagtgttccaatggatggcactgtaatctgggagaaccttgcaggatatgaacctcagaaaaggcacgtgccaccagtttgctattccttcccttttcttaaccagttgtttaatgtaccattaggataactgacaaatttccaataaccaaaaaccgctgtggtttacacacaaaaaatatataacatatttttgagaacagtaaagttcaaatattacccaattgccaatttaatgtgtatatacatctgtgtctaatcagaaggaacaatttattgacacatttatgttttttttgctaatttttagagatgaagcctcaaattcattgttgttatattttggcttcctgttagtcttattacttactagacaaatgattttgtgtactctattctgaaatcattgtctttaagcttgaaaagtttttcttctaatatagggaaatagaggatactgtactcttagctttacagagtcctgaagtgtatgatgatattgctcgcggcacgcgctgcaaatttgagacaaatagacctcgcgctgttctttttgagggcccacctgggacaggcaagacatcttcagctcgagttattgccaaacaagcaggaattccactactatatgtgccacttgaagttgttatgtcaaaatattatggcgaaagtgagcgtctattgggatctgttttttcacttgcaaatgatcttcctgaaggaggtattatattcctagatgaggtggattcttttgctattgctcgagacagtgaaattcatgaagctacacgaagaatcttgtcagtaattctgcgacagatcgatgggtttgagcaggatagacgggtggtagtcattgctgcaacaaatagaaaggaggaccttgatccagctctcatcagccgttttgattcaatcatctgttttggcttaccagatcagcaaactcgtgtggaaatagctgcacagtatgccaagcatttgactagatcagaattggttcaattttcattggccactcaagagatgtcaggaagagatatcagggatgtgtgccaacaagctgaaagacactgggcgtcaaagttaataagggggcaggttccaaaagatgagaagggggagccgagtcttcctccaattgacgaatacctttcctgtgctgaacagagacgtaagtccttgcctggtagaacgagccagacatccaggtcccctgcccttaagttagcatgaggaatgtacctaccagtttacctttacatgttcatatatcacatatagtattaccgaatgtagttcagatggaagtatgtaggcggttctaaacagtttttgttatgcgacatatgctaatacttaggaaatgtgacatctatgatctatccaaattttgacgtcagcacacctaaaatttttggagaggaaagcttaagtgacagatacatggatttcttgtgttgttttttctaaactaacgtacagagattatcaacgtacaagtgaatatcatgtttgagtgccagtttcatctcttaagatgaacatttggtacaaatttgtattgcccaagcaactctgaagctagtaattttgacatactgtgtttttctggtcaaattttgtagtcatcgctcatatgtctttatttatagttttgtacatattagattggatataaagatgatagctatggacatgtctcgagaagtaattcctggtgatcatcttaatttggagacttgtgagttgcaaaaggta

SEQ ID NO: 220309 - DNA, 2455 bp, Zea Mays
cagcatttgacgcttcgttctttcgtgggcggggggaaagcccagctgcgaaactctggccgcgaactctctggcatcgccgtcccggcctcgagccatccacgttccacggtctcgaactcgaagcccagcaccacgcgaccacgagccgcccttctccggcggcgtcgcagtgagcccggcatggccatgctactccgccgccgactcccgctgctccgcctcctccggccgctgcatactggatcgatggcttcgatctcttcgtcctccacacctccccctccccctccccctcctcttcagaaacctcacgccgccttcgtggggccaagatcacgccgcctgcggttccccaatgccgcgcccgttgagtcggggcggggggctgggaaatcatctcccgctgccgcctatctcgctatgggcgcggccgccgccctcgcgtcactgccggtggcctacgcagacagcaatgagcagggagcggtcgacacagtagcgagtgccgatcccgcggttggggaggatttggcccgcaaggagaggaagaggatattggagcttgtccagagccgagggatgcagcgcgggtcatacccgaagtttgatgttgcagtgaagggccagaaggtggttgttaaattcaacatgccatctaattgcaatgtatcacaccttatcgttgatcttgtaacacatattggacttgaggcagaacaacatggtggtggctcagaggttttagtgcgtgcttgggacagtccagctgcacgtcaaatcacactgaaccctcccaagaagactagcactggagatcacaatgaagatggtctctgtgttctgatatttgaaccacttattggatcagattattctgaaattgaattcatcaagcctgggagttttagtttgaaagaacttgaggctttgataagtgctttaaaaatagcctctgaaaaggggtcatcagggaaaaacacaccaagaaaaggaaatggtcaaagatccaagcatttgccctctttggagaaagttgtatctgatttagaggctatgggtgttagagtctatggatttgatgaaacatcaagtgttccaatggatggcactgtaatctgggagaaccttgcaggatatgaacctcagaaaagggaaatagaggatactgtactcttagctttacagagtcctgaagtgtatgatgatattgctcgcggcacgcgctgcaaatttgagacaaatagacctcgcgctgttctttttgagggcccacctgggacaggcaagacatcttcagctcgagttattgccaaacaagcaggaattccactactatatgtgccacttgaagttgttatgtcaaaatattatggcgaaagtgagcgtctattgggatctgttttttcacttgcaaatgatcttcctgaaggaggtggattcttttgctattgctcgagacagtgaaattcatgaagctacacgaagaatcttgtcagtaattctgcgacagatcgatgggtttgagcaggatagacgggtggtagtcattgctgcaacaaatagaaaggaggaccttgatccagctctcatcagccgttttgattcaatcatctgttttggcttaccagatcagcaaactcgtgtggaaatagctgcacagtatgccaagcatttgactagatcagaattggttcaattttcattggccactcaagagatgtcaggaagagatatcagggatgtgtgccaacaagctgaaagacactgggcgtcaaagttaataagggggcaggttccaaaagatgagaagggggagccgagtcttcctccaattgacgaatacctttcctgtgctgaacagagacgtaagtccttgcctggtagaacgagccagacatccaggtcccctgcccttaagttagcatgaggaatgtacctaccagtttacctttacatgttcatatatcacatatagtattaccgaatgtagttcagatggaagtatgtaggcggttctaaacagtttttgttatgcgacatatgctaatacttaggaaatgtgacatctatgatctatccaaattttgacgtcagcacacctaaaatttttggagaggaaagcttaagtgacagatacatggatttcttgtgttgttttttctaaactaacgtacagagattatcaacgtacaagtgaatatcatgtttgagtgccagtttcatctcttaagatgaacatttggtacaaatttgtattgcccaagcaactctgaagctagtaattttgacatactgtgtttttctggtcaaattttgtagtcatcgctcatatgtctttatttatagttttgtacatattagattggatataaagatgatagctatggacatgtctcgagaagtaattcctggtgatcatcttaatttggagacttgtgagttgcaaaaggta

SEQ ID NO: 220310 - DNA, 2469 bp, Zea Mays
cagcatttgacgcttcgttctttcgtgggcggggggaaagcccagctgcgaaactctggccgcgaactctctggcatcgccgtcccggcctcgagccatccacgttccacggtctcgaactcgaagcccagcaccacgcgaccacgagccgcccttctccggcggcgtcgcagtgagcccggcatggccatgctactccgccgccgactcccgctgctccgcctcctccggccgctgcatactggatcgatggcttcgatctcttcgtcctccacacctccccctccccctccccctcctcttcagaaacctcacgccgccttcgtggggccaagatcacgccgcctgcggttccccaatgccgcgcccgttgagtcggggcggggggctgggaaatcatctcccgctgccgcctatctcgctatgggcgcggccgccgccctcgcgtcactgccggtggcctacgcagacagcaatgagcagggagcggtcgacacagtagcgagtgccgatcccgcggttggggaggatttggcccgcaaggagaggaagaggatattggagcttgtccagagccgagggatgcagcgcgggtcatacccgaagtttgatgttgcagtgaagggccagaaggtggttgttaaattcaacatgccatctaattgcaatgtatcacaccttatcgttgatcttgtaacacatattggacttgaggcagaacaacatggtggtggctcagaggttttagtgcgtgcttgggacagtccagctgcacgtcaaatcacactgaaccctcccaagaagactagcactggagatcacaatgaagatggtctctgtgttctgatatttgaaccacttattggatcagattattctgaaattgaattcatcaagcctgggagttttagtttgaaagaacttgaggctttgataagtgctttaaaaatagcctctgaaaaggggtcatcagggaaaaacacaccaagaaaaggaaatggtcaaagatccaagcatttgccctctttggagaaagttgtatctgatttagaggctatgggtgttagagtctatggatttgatgaaacatcaagtgttccaatggatggcactgtaatctgggagaaccttgcaggatatgaacctcagaaaagggaaatagaggatactgtactcttagctttacagagtcctgaagtgtatgatgatattgctcgcggcacgcgctgcaaatttgagacaaatagacctcgcgctgttctttttgagggcccacctggcaagacatcttcagctcgagttattgccaaacaagcaggaattccactactatatgtgccacttgaagttgttatgtcaaaatattatggcgaaagtgagcgtctattgggatctgttttttcacttgcaaatgatcttcctgaaggaggtattatattcctagatgaggtggattcttttgctattgctcgagacagtgaaattcatgaagctacacgaagaatcttgtcagtaattctgcgacagatcgatgggtttgagcaggatagacgggtggtagtcattgctgcaacaaatagaaaggaggaccttgatccagctctcatcagccgttttgattcaatcatctgttttggcttaccagatcagcaaactcgtgtggaaatagctgcacagtatgccaagcatttgactagatcagaattggttcaattttcattggccactcaagagatgtcaggaagagatatcagggatgtgtgccaacaagctgaaagacactgggcgtcaaagttaataagggggcaggttccaaaagatgagaagggggagccgagtcttcctccaattgacgaatacctttcctgtgctgaacagagacgtaagtccttgcctggtagaacgagccagacatccaggtcccctgcccttaagttagcatgaggaatgtacctaccagtttacctttacatgttcatatatcacatatagtattaccgaatgtagttcagatggaagtatgtaggcggttctaaacagtttttgttatgcgacatatgctaatacttaggaaatgtgacatctatgatctatccaaattttgacgtcagcacacctaaaatttttggagaggaaagcttaagtgacagatacatggatttcttgtgttgttttttctaaactaacgtacagagattatcaacgtacaagtgaatatcatgtttgagtgccagtttcatctcttaagatgaacatttggtacaaatttgtattgcccaagcaactctgaagctagtaattttgacatactgtgtttttctggtcaaattttgtagtcatcgctcatatgtctttatttatagttttgtacatattagattggatataaagatgatagctatggacatgtctcgagaagtaattcctggtgatcatcttaatttggagacttgtgagttgcaaaaggta

SEQ ID NO: 220311 - DNA, 617 bp, Zea Mays
gaaatagaggatactgtactcttagctttacagagtcctgaagtgtatgatgatattgctcgcggcacgcgctgcaaatttgagacaaatagacctcgcgctgttctttttgagggcccacctgggacaggcaagacatcttcagctcgagttattgccaaacaagcaggaattccactactatatgtgccacttgaagttgttatgtcaaaatattatggcgaaagtgagcgtctattgggatctgttttttcacttgcaaatgatcttcctgaaggaggtattatattcctagatgaggtggattcttttgctattgctcgagacagtgaaattcatgaagctacacgaagaatcttgtcagtaattctgcgacagatcgatgggtttgagcaggatagacgggtggtagtcattgctgcaacaaatagaaaggaggaccttgatccagctctcatcagccgttttgattcaatcatctgttttggcttaccagatcagcaaactcgtgtggaaatagctgcacagtatgccaagcatttgactagatcagaattggttcaattttcattggccactcaagaattggtctacccatattcttggttagccagtga

SEQ ID NO: 220312 - DNA, 1566 bp, Zea Mays
acgccacgaggcgaacaaccaactgcttccttccgcgccgccgccgcctacaacgaccacttcacgtgacttacctcttctccgcctcaagtgttcacggctccatcctctctagagtctaagcccatctcgcgaagccgctaacgccgaaaacgaccctacatatggaggcgaagaagtcgggtcccgccgctgccggagccgcggcgccgccgccggctaacgggtacttcagcaccgtcttctccgcgtcgcctgcggggagcgcaaatgacgcaaagcaggccgacctgtacacgatgctgaacaagcagagctccagagggcagaatggcagtggcattacagatggcaaatcacacggccgccctacttacaaggatggaaaacatgcttatccaaatgactcgtcagaatccccttacttcggttcgtccgtgcattacggtggtcgggaattctacagcagcacgttacagaagcagccagccaatgaaccccagacaatacaaggaggacaagtcggatggctctgctactagaggtgattggtggcaaggttcactttattactgaacaatctgctgggaactctcctttttttgtgaacaaggaataaaaaaggggtggagctgagcttggtttgtcataatagtgttggaactgttgatgcgagccgttaggcatggaccgaaagtaatagctgtaatccggtcggtggaggcagtatttagatgcatcatcacacctggacagacgtggatgtaggctgcgtccttttgtgttcctgttttcgctaagtgtgttcttgtggttttagatgtgcagccgtgcagtgctgaacttactaatgaactggtaggtcagcctgaagtagttttgataaaagcagttgccaaagagtctgcagctcgcaggatcacctgctatatgtgcgtgttcctgctatctttcggaaagatttgggttgtacataatctgtccttacccttcttttttaaaaaaaaattatgttcctactattcttacttacccgtactctcagtatgatggaaaaggatgaggtggagtttggtggccctgttgtgactgaggtgtaaaccaggcttgctttctatgtccgttcgttatggactggtcacggttactcgcgctccgacagacagtgtcctttgatccgatcaacatctggtgtccaatcctgacacacgctactagacgccgcaacaagcggcaacaagagaaaccgccctgggatgctactgtaagtcagtaacacacgctactacacgccgcaacagatcatggtcagtatgtatggtagagagatcaaatgtgtggagctggaacatgcttttgagttgtgaaacatggaccttttggtgggtttaaccgtttgagctgtaggggtgctgtgcttggtgtggttttggcctttgagattaggtttcggggatccatgaggtttggtctcggatttggattatcacccaaactggtgttcgggtggtttcatatttgagtttgggtgtccggcaaaattaacagtgctgctgtgtaaatttc

SEQ ID NO: 220313 - DNA, 1113 bp, Zea Mays
acgcgcatccacacttcatgatagctaccgttattctcattattgcgaagcacttggagtctgctaatacaatgttctccttcatatggtggataattggattttattggatatcagctgggggtgaggaggttattcaggatgcacctcaactttactggctttgcatagtctttctggcatttgatgtgttttttgttgtattctgtgttgctctggcttgtattattggtattgctgtctgttgttgccttccttgtatcatagcaattctctatgcagtatctgatcaggtatggcttttcaagtcttgtgtaatgtactacataactcaaatggtggagttgacacggcattcttgattagataactatctacatcatctcactgaatacaggaaggagcatctgaagatgacattcgtcaaatcccaagatacaaatttcggcggacggatgagcctgagaagcaagatgttgaccccatgggtccttttggtggaataatgatagagtgtggcaccaatcaacctattgagaaagtgcttgcagctgaagatgcagagtgttgtatttgcctatcggcttacgatgacagtgcagagttgcgcgaactcccctgtgggcaccatttccactgcacctgtatcgataagtggcttcacatcaatgcaacatgccccctgtgcaagtacaacattcggaaaagcagcagtagcagtggaagtgaagaagtatgaatgcagtccgcttgacaatgccaatctgtttcaacttctgttccgttgctaatgtaactccaggccttgatgagtgtaaatttttgtatccaaaaaaatgtgctgatagagtcagttatttatcaaagttactcaaagtgctgtcaatatgtcatataagttaataaacagttgggtatgcttctgtatttactgtcaggaatatattattagttgcattgtaacttgtgtccttttgaatgatccgggtgttttcctgcttggttaatgatgacaaaatgtcttgcatggtttcttatgacaagaaacttccgactttgaccattatttacagcagcaacatagctgatgaaaggaactaatggatgatggat

SEQ ID NO: 220314 - DNA, 497 bp, Zea Mays
gaaatagtgggccttggacaagatctcgcctcggctgccaagtgatcgcgaagcctgaactcgatggtattcggctggcattacctgtagccacaagaaacttcgcggtagatggctatgtaccgaaaccacactgaagacagttatgtacaccacactgaagacagttatgtacaccacactgaggcagtcatcttggggggcacggattcgtacaagtcaattttgtagtttataacctgtataacctaactacacctttgctacttgtagtcggggtagcttaggactaccttgttgagggagggttcgttcattgatgaacccctccattactcccagataacagtgcttccttcatctgggcgaataaacatctttcgttttgtgcgagagtatgtagtgtactcagaaatatttgcattgtagtgctcccaatatttgatcttttgctacctaggttgctattctgttcatagaaatgtagcatgtatttt

SEQ ID NO: 220315 - DNA, 812 bp, Zea Mays
tttcaataattattttcagtagaggcagtcctctgatgactgatgtggttatttttctctgtattatgcacagaatctcggtaacatttgttaacaaggatggctcagaaaagacaatacgtgttccagttggaatgtccatgttagaagctgctcatgaaaatgacatagagcttgaaggagcatgtgagggttcacttgcgtgttctacttgtcatgtaatagtaatggatgtaaactactataacaaattagaagatccagcagatgaagaaaatgatatgcttgaccttgcatttgggctcacagagacgtaagtcaagacccttcgaacagaatctcgcctcggctgccaagtgatcgcgaagcctgaactcgatggtattcggctggcattacctgtagccacaagaaacttcgcggtagatggctatgtaccgaaaccacactgaagacagttatgtacaccacactgaagacagttatgtacaccacactgaggcagtcatcttggggggcacggattcgtacaagtcaattttgtagtttataacctgtataacctaactacacctttgctacttgtagtcggggtagcttaggactaccttgttgagggagggttcgttcattgatgaacccctccattactcccagataacagtgcttccttcatctgggcgaataaacatctttcgttttgtgcgagagtatgtagtgtactcagaaatatttgcattgtagtgctcccaatatttgatcttttgctacctaggttgctattctgttcatagaaatgtagcatgtatttt

SEQ ID NO: 220316 - DNA, 1605 bp, Zea Mays
ggcaaaggtgttcttaaggtggtaatattttgtgcataatggaagatgagatatccagcataatagcttatgctcttgccatatctgatgagcgccaccatttgatagatttaaaatttgagaacggaatggattattccaagggagagtatgctaaagcaatagagaaatcttttagttttctgtctgaaagttctttcagctcatcaccatggtcatctacaagttctgaagcaagcttatcatctctgtcttcattttcatctgatgacttttctggttatgatagctcatctttattgtccccaatgcatccagaaatgactgtgaatgggaaagtaactctcaaagacaaatattcagttactgttgtatatgacaatcaattctttgcactccgaaaaaagtgttgcccatccgagcttgcatatattacttctttaagccgctgcaagaagtggaatgctcaaggtggaaagagcaaggcctattttgtaaagacaacagatgacaggttcatcattaagcaaatcaataaaacagagtttgagtcatttattaaatttgcacctgattactttaagcatgtttaccattctctggacactggaagccaaacttgtctcgccaaaatattaggaatctatcaggtagcagttatatcacaagctcgagttggattcgtttcgttttactgttttcttttccatgtggactaacttgcctatttcaggttaagcaaattaagcatggcaaagaggtaaagattgacttgatggttatggaaaatcttctctttggccacaatatttcacgaatttatgacctcaaaggtgctattttttcgcgacgcatcactgactcaaacgatcatgatactgtttacctagatcaaaattatgttgaggacatgagcttttctccaatctatattggtggaagaacaaagcatcttttgcagcgtgcaatctggaatgacacgtctttcctcacttcggtgaatgttatggactattctctacttgtgggagtggacaaagagaagcatgaacttgtgtttggcatcattgattatctgaggcaatatacttaggacaaacaactggagacatgggtgaagacttctctggtagtacccaaaaatgttttaccaactgtaatttcccccaaggaatacaaaaaaaggtttaggaagttcatggcgaagtactttctgtcagttccagacacatggagtcttgataatccgtctaagccatgcaaatcccttggtcagagcaatcgcaagttggcggaagtccagattggtgataacctgtcagagcacccaaatgaagttgaggggtgtgcctaatcatgtgcaagatttcctggcaattttgttgaaccctatcatgttgttgtttggctatatttcactttgtaaaatggtgtacataggaggaccttgcggtttttaggcaaattgttgggcaagtgaggtccacatgacgtgtacctatacaaatgttcattgttgatttcacaattattatagtgaaattaagaattcatatgatcatttttttggacctaccacttgtgagactgaagcagtctattctt

SEQ ID NO: 220317 - DNA, 956 bp, Zea Mays
caacggcttccgcgcatgccgcggcctgctaaccgcttgggctccgggttcataagggggcaggtgggttcccagaccacgacctcatccactccgagcctcaaccacaatcaccgccagggccggccaccgttgcttcctcgccgccactttctaatcgcgtccgccattaacgaagcacagagagatttgagagttgccgctgctcgggcgctttaccggcgtcgcggtcccgagtctggcatgtgggcgggcatgtcacttggacctcctgcggcggatctgggcaatcccgtgtggagtcatcggccagggcaagacgaaatcgcccgccggaatcgtacccccgccgcgcggccgccattcaacgtgggcaggagctttggcgctagcaatgaaggctctgggctggtggcgtcgccggcaagcgcaagaaggctgtcatgagcggcaagcccaagcgtccgccctctgccttcttcatcttcatgtctgaattcaggcaggagtatcaggttcaataccctggcaacaagagcgttgtggctatgtcttctttgttcgtgttggtggatcaggtgagcaaggcagcagggggaaagtggcatgctatgtcagattaaacaagcaagacccaactcgccaccacacgaatccccctcgccatcgagcgaggtgctataggaggagcccacgatcctgctcctgctcgacgcggaggccaaggccctggcctaggctgacgatgatggtgcagtcaaggtgacgatgttgtttaattaagaatgtgttgaagtttggtcttttacaaggaatgaaattaaactgtagactactgcttttcgtattccttttgacttttctttgcaaatgttgtttaattagaaatagtagaatatttctgctgagagcggcaaagactgctcagttttcctcgatttctagaaataaggcga

SEQ ID NO: 220318 - DNA, 923 bp, Zea Mays
caacggcttccgcgcatgccgcggcctgctaaccgcttgggctccgggttcataagggggcaggtgggttcccagaccacgacctcatccactccgagcctcaaccacaatcaccgccagggccggccaccgttgcttcctcgccgccactttctaatcgcgtccgccattaacgaagcacagagagatttgagagttgccgctgctcgggcgctttaccggcgtcgcggtcccgagtctggcatgtgggcgggcatgtcacttggacctcctgcggcggatctgggcaatcccgtgtggagtcatcggccagggcaagacgaaatcgcccgccggaatcgtacccccgccgcgcggccgccattcaacgtgggcaggagctttggcgctagcaatgaaggctctgggctggtggcgtcgccggcaagcgcaagaaggctgtcatgagcggcaagcccaagcgtccgccctctgccttcttcatcttcatgtctgaattcaggcaggagtatcagatgtcttctttgttcgtgttggtggatcaggtgagcaaggcagcagggggaaagtggcatgctatgtcagattaaacaagcaagacccaactcgccaccacacgaatccccctcgccatcgagcgaggtgctataggaggagcccacgatcctgctcctgctcgacgcggaggccaaggccctggcctaggctgacgatgatggtgcagtcaaggtgacgatgttgtttaattaagaatgtgttgaagtttggtcttttacaaggaatgaaattaaactgtagactactgcttttcgtattccttttgacttttctttgcaaatgttgtttaattagaaatagtagaatatttctgctgagagcggcaaagactgctcagttttcctcgatttctagaaataaggcga

SEQ ID NO: 220319 - DNA, 1911 bp, Zea Mays
cccactcccacactcccactccgacgcttgcgccgcgagaggagaaagtgccggagacagaagcgaggagagagagagagagaagagaagcggggggctcgcagaggcgtagctcgcgatccgggcgccgagctgggatgaacatggtctgttttatgcactggaccttggcgggaccaactttcgtgtcatccgggtccaacttggcggaagggacagacgtgtcgtgaagcaacagtatgaagaggtctccattccgcctcatcttatggttggaacttctacggaactatttgatttcattgctgctgagttggaaaaatttgtgcggactgaaggagaagatttccacctaccagatagcaagcagagggaactgggtttcaccttttctttcccagtgcaccaaacatctatatcatcggggactctaattaagtggaccaaaggattttgcatcaatggcacggttggagaagatgttgtggctgaattgagtagggccatggaaaggcagggtcttgatatgaaagttgcagctctggttaatgatactgtaggcacattggctggtgggagatatgctgataatgatgttgttgctgctgtaatattgggcactggcacaaatgcagcttatgtggaacatgcaaatgtgattcctaaatggaccgggctgctacctagatcagggaacatggtaatcaacatggagtggggaaacttcagatcagataaacttccaaggtcggagtatgataaatccttagacttcgaaagtttgaaccctggtgagcagatatatgaaaagatgatttctggaatgtatcttggagaaattgtccggaggatcctgctgaaactggctcatgatgcttcattgtttggggatgttgttcctccgaaactggaacagctatttatactgaggacgccagatatgtcagccatgcaccatgacacctcacatgatctcaaacacctgggagctaagctgaaggacattcttggggttcctgatacttctctggaagcaagatacatcactcttcatgtgtgcgaccttgtcgcagagagaggtgcacgcctggctgctgctggtatatatggtattctgaagaagctgggtaaagacaaattgctaggtgactttagccaacaaaggactgtagttgctattgacggtggcctatacgagcactacaagaagttcagtgcctgcctagaggcgacgctcacagacctgctcggcgaggaggttgcctcatcggttgttgtcaagttggccaacgacggctcaggaattggagctgcacttcttgctgcctcgcactcccagtatgctgaagctgcatagttctaggagctcgggggtcctagtgtaacctttttttttgtttcccaccatttcccccttcaatcgagaagcccccctcgtgcgattcgcatctctctattttctttcctcagcagcgggatatagctaggatggtgccattgagcttggagtacattatcactagcaacaagcattagcagcggcaggaaagaagtggaagcggaggcctgaataagccgttccattcctgccgattctttttcttcccaatcccttgaagtttgtattatgaggcgatatcacaaaacagccagttcttatctgtgtgatctcgtctttcaaaataaggagagaggtgggggaccaaatcatacagtctttactcattttttattgaatcgtgcagtgcttctgcctttatttcagaaacaactgcaatggcaatatttgcttgttcttatgtttgattggtcaaatgtgtgtgatttaatacaattatacggtgtgaaaccccacaaaggccatggtgacaagttattatgcatagctctaagctactaatgtgctaaaat

SEQ ID NO: 220320 - DNA, 1821 bp, Zea Mays
cgtctgtatagagctctggttcatggctgggcaccttcgcaatacggatgaacatggtctgttttatgcactggaccttggcgggaccaactttcgtgtcatccgggtccaacttggcggaagggacagacgtgtcgtgaagcaacagtatgaagaggtctccattccgcctcatcttatggttggaacttctacggaactatttgatttcattgctgctgagttggaaaaatttgtgcggactgaaggagaagatttccacctaccagatagcaagcagagggaactgggtttcaccttttctttcccagtgcaccaaacatctatatcatcggggactctaattaagtggaccaaaggattttgcatcaatggcacggttggagaagatgttgtggctgaattgagtagggccatggaaaggcagggtcttgatatgaaagttgcagctctggttaatgatactgtaggcacattggctggtgggagatatgctgataatgatgttgttgctgctgtaatattgggcactggcacaaatgcagcttatgtggaacatgcaaatgtgattcctaaatggaccgggctgctacctagatcagggaacatggtaatcaacatggagtggggaaacttcagatcagataaacttccaaggtcggagtatgataaatccttagacttcgaaagtttgaaccctggtgagcagatatatgaaaagatgatttctggaatgtatcttggagaaattgtccggaggatcctgctgaaactggctcatgatgcttcattgtttggggatgttgttcctccgaaactggaacagctatttatactgaggacgccagatatgtcagccatgcaccatgacacctcacatgatctcaaacacctgggagctaagctgaaggacattcttggggttcctgatacttctctggaagcaagatacatcactcttcatgtgtgcgaccttgtcgcagagagaggtgcacgcctggctgctgctggtatatatggtattctgaagaagctgggtaaagacaaattgctaggtgactttagccaacaaaggactgtagttgctattgacggtggcctatacgagcactacaagaagttcagtgcctgcctagaggcgacgctcacagacctgctcggcgaggaggttgcctcatcggttgttgtcaagttggccaacgacggctcaggaattggagctgcacttcttgctgcctcgcactcccagtatgctgaagctgcatagttctaggagctcgggggtcctagtgtaacctttttttttgtttcccaccatttcccccttcaatcgagaagcccccctcgtgcgattcgcatctctctattttctttcctcagcagcgggatatagctaggatggtgccattgagcttggagtacattatcactagcaacaagcattagcagcggcaggaaagaagtggaagcggaggcctgaataagccgttccattcctgccgattctttttcttcccaatcccttgaagtttgtattatgaggcgatatcacaaaacagccagttcttatctgtgtgatctcgtctttcaaaataaggagagaggtgggggaccaaatcatacagtctttactcattttttattgaatcgtgcagtgcttctgcctttatttcagaaacaactgcaatggcaatatttgcttgttcttatgtttgattggtcaaatgtgtgtgatttaatacaattatacggtgtgaaaccccacaaaggccatggtgacaagttattatgcatagctctaagctactaatgtgctaaaat

SEQ ID NO: 220321 - DNA, 1811 bp, Zea Mays
ttgtcttttaacaccgcaacgttggcgggatgctgggatgaacatggtctgttttatgcactggaccttggcgggaccaactttcgtgtcatccgggtccaacttggcggaagggacagacgtgtcgtgaagcaacagtatgaagaggtctccattccgcctcatcttatggttggaacttctacggaactatttgatttcattgctgctgagttggaaaaatttgtgcggactgaaggagaagatttccacctaccagatagcaagcagagggaactgggtttcaccttttctttcccagtgcaccaaacatctatatcatcggggactctaattaagtggaccaaaggattttgcatcaatggcacggttggagaagatgttgtggctgaattgagtagggccatggaaaggcagggtcttgatatgaaagttgcagctctggttaatgatactgtaggcacattggctggtgggagatatgctgataatgatgttgttgctgctgtaatattgggcactggcacaaatgcagcttatgtggaacatgcaaatgtgattcctaaatggaccgggctgctacctagatcagggaacatggtaatcaacatggagtggggaaacttcagatcagataaacttccaaggtcggagtatgataaatccttagacttcgaaagtttgaaccctggtgagcagatatatgaaaagatgatttctggaatgtatcttggagaaattgtccggaggatcctgctgaaactggctcatgatgcttcattgtttggggatgttgttcctccgaaactggaacagctatttatactgaggacgccagatatgtcagccatgcaccatgacacctcacatgatctcaaacacctgggagctaagctgaaggacattcttggggttcctgatacttctctggaagcaagatacatcactcttcatgtgtgcgaccttgtcgcagagagaggtgcacgcctggctgctgctggtatatatggtattctgaagaagctgggtaaagacaaattgctaggtgactttagccaacaaaggactgtagttgctattgacggtggcctatacgagcactacaagaagttcagtgcctgcctagaggcgacgctcacagacctgctcggcgaggaggttgcctcatcggttgttgtcaagttggccaacgacggctcaggaattggagctgcacttcttgctgcctcgcactcccagtatgctgaagctgcatagttctaggagctcgggggtcctagtgtaacctttttttttgtttcccaccatttcccccttcaatcgagaagcccccctcgtgcgattcgcatctctctattttctttcctcagcagcgggatatagctaggatggtgccattgagcttggagtacattatcactagcaacaagcattagcagcggcaggaaagaagtggaagcggaggcctgaataagccgttccattcctgccgattctttttcttcccaatcccttgaagtttgtattatgaggcgatatcacaaaacagccagttcttatctgtgtgatctcgtctttcaaaataaggagagaggtgggggaccaaatcatacagtctttactcattttttattgaatcgtgcagtgcttctgcctttatttcagaaacaactgcaatggcaatatttgcttgttcttatgtttgattggtcaaatgtgtgtgatttaatacaattatacggtgtgaaaccccacaaaggccatggtgacaagttattatgcatagctctaagctactaatgtgctaaaat

SEQ ID NO: 220322 - DNA, 1802 bp, Zea Mays
gtctcatttacaccaccacctttccgggatgaacatggtctgttttatgcactggaccttggcgggaccaactttcgtgtcatccgggtccaacttggcggaagggacagacgtgtcgtgaagcaacagtatgaagaggtctccattccgcctcatcttatggttggaacttctacggaactatttgatttcattgctgctgagttggaaaaatttgtgcggactgaaggagaagatttccacctaccagatagcaagcagagggaactgggtttcaccttttctttcccagtgcaccaaacatctatatcatcggggactctaattaagtggaccaaaggattttgcatcaatggcacggttggagaagatgttgtggctgaattgagtagggccatggaaaggcagggtcttgatatgaaagttgcagctctggttaatgatactgtaggcacattggctggtgggagatatgctgataatgatgttgttgctgctgtaatattgggcactggcacaaatgcagcttatgtggaacatgcaaatgtgattcctaaatggaccgggctgctacctagatcagggaacatggtaatcaacatggagtggggaaacttcagatcagataaacttccaaggtcggagtatgataaatccttagacttcgaaagtttgaaccctggtgagcagatatatgaaaagatgatttctggaatgtatcttggagaaattgtccggaggatcctgctgaaactggctcatgatgcttcattgtttggggatgttgttcctccgaaactggaacagctatttatactgaggacgccagatatgtcagccatgcaccatgacacctcacatgatctcaaacacctgggagctaagctgaaggacattcttggggttcctgatacttctctggaagcaagatacatcactcttcatgtgtgcgaccttgtcgcagagagaggtgcacgcctggctgctgctggtatatatggtattctgaagaagctgggtaaagacaaattgctaggtgactttagccaacaaaggactgtagttgctattgacggtggcctatacgagcactacaagaagttcagtgcctgcctagaggcgacgctcacagacctgctcggcgaggaggttgcctcatcggttgttgtcaagttggccaacgacggctcaggaattggagctgcacttcttgctgcctcgcactcccagtatgctgaagctgcatagttctaggagctcgggggtcctagtgtaacctttttttttgtttcccaccatttcccccttcaatcgagaagcccccctcgtgcgattcgcatctctctattttctttcctcagcagcgggatatagctaggatggtgccattgagcttggagtacattatcactagcaacaagcattagcagcggcaggaaagaagtggaagcggaggcctgaataagccgttccattcctgccgattctttttcttcccaatcccttgaagtttgtattatgaggcgatatcacaaaacagccagttcttatctgtgtgatctcgtctttcaaaataaggagagaggtgggggaccaaatcatacagtctttactcattttttattgaatcgtgcagtgcttctgcctttatttcagaaacaactgcaatggcaatatttgcttgttcttatgtttgattggtcaaatgtgtgtgatttaatacaattatacggtgtgaaaccccacaaaggccatggtgacaagttattatgcatagctctaagctactaatgtgctaaaat

SEQ ID NO: 220323 - DNA, 1843 bp, Zea Mays
caggttttgacctcaatccatgtctgttggaggcatccttatagagcataatttgctgatgaaacatggatgaacatggtctgttttatgcactggaccttggcgggaccaactttcgtgtcatccgggtccaacttggcggaagggacagacgtgtcgtgaagcaacagtatgaagaggtctccattccgcctcatcttatggttggaacttctacggaactatttgatttcattgctgctgagttggaaaaatttgtgcggactgaaggagaagatttccacctaccagatagcaagcagagggaactgggtttcaccttttctttcccagtgcaccaaacatctatatcatcggggactctaattaagtggaccaaaggattttgcatcaatggcacggttggagaagatgttgtggctgaattgagtagggccatggaaaggcagggtcttgatatgaaagttgcagctctggttaatgatactgtaggcacattggctggtgggagatatgctgataatgatgttgttgctgctgtaatattgggcactggcacaaatgcagcttatgtggaacatgcaaatgtgattcctaaatggaccgggctgctacctagatcagggaacatggtaatcaacatggagtggggaaacttcagatcagataaacttccaaggtcggagtatgataaatccttagacttcgaaagtttgaaccctggtgagcagatatatgaaaagatgatttctggaatgtatcttggagaaattgtccggaggatcctgctgaaactggctcatgatgcttcattgtttggggatgttgttcctccgaaactggaacagctatttatactgaggacgccagatatgtcagccatgcaccatgacacctcacatgatctcaaacacctgggagctaagctgaaggacattcttggggttcctgatacttctctggaagcaagatacatcactcttcatgtgtgcgaccttgtcgcagagagaggtgcacgcctggctgctgctggtatatatggtattctgaagaagctgggtaaagacaaattgctaggtgactttagccaacaaaggactgtagttgctattgacggtggcctatacgagcactacaagaagttcagtgcctgcctagaggcgacgctcacagacctgctcggcgaggaggttgcctcatcggttgttgtcaagttggccaacgacggctcaggaattggagctgcacttcttgctgcctcgcactcccagtatgctgaagctgcatagttctaggagctcgggggtcctagtgtaacctttttttttgtttcccaccatttcccccttcaatcgagaagcccccctcgtgcgattcgcatctctctattttctttcctcagcagcgggatatagctaggatggtgccattgagcttggagtacattatcactagcaacaagcattagcagcggcaggaaagaagtggaagcggaggcctgaataagccgttccattcctgccgattctttttcttcccaatcccttgaagtttgtattatgaggcgatatcacaaaacagccagttcttatctgtgtgatctcgtctttcaaaataaggagagaggtgggggaccaaatcatacagtctttactcattttttattgaatcgtgcagtgcttctgcctttatttcagaaacaactgcaatggcaatatttgcttgttcttatgtttgattggtcaaatgtgtgtgatttaatacaattatacggtgtgaaaccccacaaaggccatggtgacaagttattatgcatagctctaagctactaatgtgctaaaat

SEQ ID NO: 220324 - DNA, 1002 bp, Zea Mays
ccaaaatcaacttatataaaggacgccagatatgtcagccatgcaccatgacacctcacatgatctcaaacacctgggagctaagctgaaggacattcttggggttcctgatacttctctggaagcaagatacatcactcttcatgtgtgcgaccttgtcgcagagagaggtgcacgcctggctgctgctggtatatatggtattctgaagaagctgggtaaagacaaattgctaggtgactttagccaacaaaggactgtagttgctattgacggtggcctatacgagcactacaagaagttcagtgcctgcctagaggcgacgctcacagacctgctcggcgaggaggttgcctcatcggttgttgtcaagttggccaacgacggctcaggaattggagctgcacttcttgctgcctcgcactcccagtatgctgaagctgcatagttctaggagctcgggggtcctagtgtaacctttttttttgtttcccaccatttcccccttcaatcgagaagcccccctcgtgcgattcgcatctctctattttctttcctcagcagcgggatatagctaggatggtgccattgagcttggagtacattatcactagcaacaagcattagcagcggcaggaaagaagtggaagcggaggcctgaataagccgttccattcctgccgattctttttcttcccaatcccttgaagtttgtattatgaggcgatatcacaaaacagccagttcttatctgtgtgatctcgtctttcaaaataaggagagaggtgggggaccaaatcatacagtctttactcattttttattgaatcgtgcagtgcttctgcctttatttcagaaacaactgcaatggcaatatttgcttgttcttatgtttgattggtcaaatgtgtgtgatttaatacaattatacggtgtgaaaccccacaaaggccatggtgacaagttattatgcatagctctaagctactaatgtgctaaaat

SEQ ID NO: 220325 - DNA, 1657 bp, Zea Mays
ctcctcccgtcctccggtcctcccgtttccccccttccccttccgcttcgccattccttctcggtcagaacgacgcgcatccccgcccgcacgttcccgtgctctcgcttctccggaggcgaccagggttgggacttgggaggctagcgagaaggtgctacccgggccaactcctccgatcgcccgcaggagaaggggatctctccgcctccccgccctcgtcgggcctttcccatcgccacccgcgaggccacgcgctccagctcttgtgaaccggaagggttctggatttctgagccaagcgaccagcacggtggctcggccgggctgacactcccctcccctgtcgcccggtctcttccttcccgagcagaactcccctgcgtcttgccgcttctagcatcggggagaaaaattatagaggaaggatatgcgggatccatttgatgcaccggttgatctcattaacccggaccataatggtgggaacaaactttctaggactggtgcagtgtctgctggggactatggtttacaaaatggacccaaatcctttgccccaaactccgacaccctagtcaggcatcaagtccaggttgcatccttgcacaaagacttagttttggaagatcccaatactcgtatcatggatcctgagaccaaggaactttactttagatcacaatcacaaggggacgagatcttgttgcttcgcaagaaaattgctgaggcatctctcaaggagctgagattactgggtgaaaaacatattctggagaggaggctcacagacttgaggatggctgttgacgagaagcaggaagaagctatatctggtgctttgcaacaattgaaccagaagaaaacccatcttgaggacaatatgagactggcaaatgaactaaaagttgaggaagaagagctatacttttttacttcttcattgcttagcatgctagcagaatacaatattcgcccacctcaaataaatgcttccatcattacaactgttacaaagcgtttgtaccaacagatgcatttgaagctcagatctttaaatgacaatttaggtgatatgactcaacctggaaatatatataatcccaatcttcagcaagtaaccctatcaagaaatgaaccttccccatcttataatttggattcaaataggaacactcttcaacagtatgctcaaggtccaagtgaccgacatatggatcaaatgtaccatggatccaattttcagcaggatactggcggtactactccctctaattattttgagggagacagaagagtagatggtgactcacagttataccaacctgatggtgacgctttacctggtattgaggggtttcaaattgctggtgaacctagaccaggatttcaattaacagcatgcggttttcctactaatggtactaccctttgcaatttccagtgggttcgccatcttgaaaatggtaccagacagtctatcgaaggtgccacgatgtatgactatgtggtcactgcagatgatgttggtacttttcttgctgtagactgtacacctatggatgataatggccgccagggtgatttggtgacagaatttgctaacaatgggaataagataacctgtgaggggatgctagggtttcttgtaggaaat

SEQ ID NO: 220326 - DNA, 4109 bp, Zea Mays
ctcatttcatcgaaaccaattctgccatgtttcataatatcaataatctcccgacacacgtcctctcagctctgcagcagtgcaccctctgttccttgccgcacccaactcgcccccacccacgcgcttgtgatcaacgcgccgcgctcgttctccatacaatttccacttcagtcgaggccacctcctccccctttcggcacgcagccatgggcaaccgtgcgtcgcgccaccaccgccacgccaccgagcagcagccagagacgccgacccttcccaagccccagatccagccgccgccgccgccgacgcagacgcagcagtaccagcaggccccgccgccgccgaagccgaagccggcggcggacgcgagggcggtggggcgcgtgctggggcggcccatggaggacgtcaaggcgacctacaccttcggccgcgagctcgggcggggccagttcggggtcacctacctcgtcacgcaccgggagactgggcagcgcttcgcctgcaagtccatagccacgcggaagctcgtccaccgcgacgacatcgaggacgtgcgccgggaggtgcagatcatgcaccacctcaccggccaccggaacatcgtcgagctccggggagcctacgaggacaggcgctcggtcaacctcgctatggagctctgcgagggcggggagctcttcgaccgcatcattgccaggggccactacaccgagcgcgctgccgccgcgctttgccgggagatcgtcgccgtcgtccacagctgccactccatgggggtcttccaccgggacctcaagcccgagaacttcctgttcctcaataacaaggaggactccccgctcaaggccacggacttcggcctctccgtcttcttcaagcccgatgcggatgtggaattgacttgacccgattgcctggctggacggtttcagactcagcattactaaaatgagggtctatatatggaaatggcattattcagatatgtccatccttgctgcgtgttctgtatatatgaggcatccagattaactccaaaatatttgactctaaatttgttccaaaggcgacattgtgatggcgttgtagatttgcatcgtttattctttaggcactgcattgtttttgccattggtccttaattgaaggaagcataacagatcaaacttgtgtcaattgcttggtagacccaatgccacatgctcccatgtgagtaggtctgggaaagagataaactgaagcaagccttcattccacaaatgtggagatgctggtttaaccggtgacttggtcactcagtgagacaactctcaccactgcaccagccaccaggcctaccttctcatgtcaaatgcttgcattgcacaacaacaacaacaacatagcttttttgtcccaagctagtcgaggtaggctagatgaaacccacaataaacaaggataggaaaaaaggacaccgaaagggtaaaagaaagatgatataattaagagtaaatataaaaatatacaaagatcatggtttgggcaatcaaaacatggtttgggcacgttgattgctagtctccaagcgcacctatccttagctaattccttggagatattcactccttaagatctctcttaaccgcctcatcccaagtcaatttaggtcgatccctacctctttttacattatcgactcgctctaaaccccttttacgcatcgacgcctcaggaggtcttctttagacatgttcaaacatctcaaccgatgttgaatcaatttcttctcaattggtgccacctcgaccctatcccaaatatcttcgtttcgaactctatccctttttgtgtgcccacaaaactaatgttacatatgcatctctgctacactcaattgttggacatgtcgcatttttgtcggccaacattcagcactgtataacatcgccgtcctatagaacttacctttaagcttttgtggcaccctcttgtcacagaggacgctagaagcatgacaccatttcaactaaacggctgaaattctatgcataacatcttcatgaatgtcaccaatcaccatccttttgaagcatcgatcctatcgaaaagactccttagccacaagttttccattgagggtaacatctccattctcatgtctagtcgcgctgaaattgtacatcatgttctcgatcttagtcctactaagtctgaaaccttttgactccaacatgtgcttccacaactctagtttcctattaacaccttccctactctcatcaactaacaccacaccaaaggatatccccttgtatgtttcttgtgacctcatccatcaccaaagcaaataaataagggctcaatgctgatctttgatgtagtcctattttaattggaaagtcgctagtgtcgccatcacgtgttcggacaaatgcttgccttgcacaaaataggaaattacgtcgtgattttgtcgcataaaatgggatatttactttgcaaaatgttggtttcgtggtggatttcttgcggggtttagttttttctctatatattatccttttttgttttgaaccttaacaagtgaaatgatttgtttatttgcacactgacatgagcaaactgaatgagaatccataatggatgatgcaggggacacgtttaaggatcttgtgggaagtgcatattatgttgctcccgaggtattgaagcggcactatggggcagaggctgacatatggagtgctggggttattctttacatccttttatctggtgttcctcctttttgggcagagaatgaggatggcatatttgatgctgtcttgcacagtcacattgatttctcttctgatccttggccttcaatatctaatggtgcaaaagatttggttaagaagatgctgcgacaagacccaaaagaacgcctgactgctgctgaaattttgaaccacccatggattagagaggatggagaggccccagataagccacttgacattacggtcatcagtagaatgaaacagttcagggcaatgaacaagctcaagaaagttgcattgaaggttgtggcagagaacttatcagatgaagagattatgggcctaaaagaaatgttcagatccctggatactgataacagtgggacaattactcttgaagagctaagatctggtttaccaaaacttggtactaaaatttctgaatcagaaatcaaacagttgatggaggcggctgatgttgatggaaatggtaccattgattacgcggagttcatatcagccacaatgcatttgaatagattggagaaggaagaccgtatactcaaagcttttgaatattttgataaggaccatagcgggtacataacagtagatgagttggaagaagctctgaagaagtatgatatgggagatgataaaacaataaaagagatcattgctgaagtagatacagatcatgatggaagaattaattaccaggagtttgttgccatgatgaggaacaatacccctgagattgttccaaaccggagacgcatgttctaactgtcatgtacaattttattgaatactttcaagaccaatatgcacccttagacataatcctggccccattttcttttgggaacaactgtaaggactcaatatttttttagatcaatttctctgcagccgggacatatttgtaccaaaataggtggtgttatagtgactcgtacttcgatgtttggagcatcatggactcatgggtggcaatgtttattcccattgtactcggagctctgctttttcagagtgttgccacttgtgaattgttctaatgtgttgtggtcttcgaaatcgttcatcgatcagatcaggcaatgccatattactcctgaataaatattagcagtatcgtggttctggattggccttggtgaaatgccgatccatccacgtagttcttttttgggtgaaaatgattagatgaccacccaaagaatcatgtctaggcacctattgtatcctctgcaaaaggttcgtatgtgtaattttgacttgggtttatttcttggagcatattttgacctttagattgtgcttgtcttggatggttccgtcgaacttttttctctt

SEQ ID NO: 220327 - DNA, 1142 bp, Zea Mays
agggcagcgtccagggggcactctgcaaagcgcgcgaccggacggcccggttcgttctcgacctctcgtctcgctcatccgcccgcccccgaggaaggaaccctagcctagccttgctccgaccggtcgccgcggcgactgcgacgatgatggactgcgctggaggccgagaccccgtggaggacttcctcctcggcggcgccggcgccggcgacgacggagatctcgtcgccgtcttctgcgacgacggaggacttgggattgagggtatccatggagatgcttgtggatttgagcaatctaatttggggaaaagagatgaaccatgttcatctggcccaacatccaaagcttgccgtgaaaaaatgaggagggacaagctgaatgacaggttcctggaattaagttcaattatgaatcctggtaaggaagcaaagttagataaagcaaatatattgagtgatgcagcccgtatggtggcacaacttagaggtgaggcagaaaagcttaaggaatcaaatgagaagttgcgggagaatatcaaggatctgaaggaggagaagaacgagctccgtgaagagaaagtgagactaaaggtagaaaaggataggctggagcagcaagtcaaagctatgagtgtagctcctacaggatatgtcccccatctccctcatccagcttcataccatcctgctgcgttcactccatttgcgccgccacagcaagctccagccaacaaaagtgctccaatcccagcaccgttccctgggatggcgatgtggcagtggttgcctccgaccatcgtggacacaactcaagatccaaagctctggcccccaaatgcttaggggcagctaccttggaatgttgactcattgtgccttttcatgcatttggtgggcaaatcagtgtcagttaggtccctggagactggagaggaatcaagttcgcaactcgcgccatgtttatgctgtaacagctggtttccagcactacttatgaacttactttgttctactgaagggtggtgcctgtaattaatatatggatcttaaccctctagttggcatgtatatcatttgttctattcgagagctgaattttaaggaccattattgaagtcatgagtgcagtaaaaaaaa

SEQ ID NO: 220328 - DNA, 827 bp, Zea Mays
gcaaatatgtgttcgtcctgctgtcgtgctacaagtcgcgctaggccgctggcccattgcacacacggcccaaaatagtcttgcaaagtccaaggaaacgacgggttcacagccgctgcgctcaattgaccctcccctcgccggcgtccggcgatcgccggcatccgagcgatggatcacccatccacgtgatggatccgacagctccttccccggccccccctgcgggcgatggggcacagccatcggaccagaaccggcagcgaccaaggtctgcactccgtggcgccctcggggtggccttccccatcgcggtatcgttcctcttctccttcctcgttgggctcgctgggctcgcgcttggtggcctctcgtccaccgcatcggtctccatgccctccacctgccgcatcctctccagtggcgttgaccttaggtcatcaaaagtttgcgagcttgggttattgaactatagagctaagcatgtcttctacccatcgagtaagaggagattccgctgccatgatgactactactgggcttcagttttacaggttgaatacacagaatatttttctggccaattatcttatgcagtggccgaggccccgaaagaggctcttcctcataattgtcggcctgattttggtgctgcatggtcaacaacattaaagttcaaggtcaatgaatcatacagctgcagatatatgctaggtagtaacaaggctgatattcactcgaacaagctattcaattgtactgctgaggaaccttcgactggggagctgttcaaaaggatacttatactcatcatgcagacttcgata

SEQ ID NO: 220329 - DNA, 1403 bp, Zea Mays
gcaaatatgtgttcgtcctgctgtcgtgctacaagtcgcgctaggccgctggcccattgcacacacggcccaaaatagtcttgcaaagtccaaggaaacgacgggttcacagccgctgcgctcaattgaccctcccctcgccggcgtccggcgatcgccggcatccgagcgatggatcacccatccacgtgatggatccgacagctccttccccggccccccctgcgggcgatggggcacagccatcggaccagaaccggcagcgaccaaggtctgcactccgtggcgccctcggggtggccttccccatcgcggtatcgttcctcttctccttcctcgttgggctcgctgggctcgcgcttggtggcctctcgtccaccgcatcggtctccatgccctccacctgccgcatcctctccagtgtttgcgagcttgggttattgaactatagagctaagcatgtcttctacccatcgagtaagaggagattccgctgccatgatgactactactgggcttcagttttacaggttgaatacacagaatatttttctggccaattatcttatgcagtggccgaggccccgaaagaggctcttcctcataattgtcggcctgattttggtgctgcatggtcaacaacattaaagttcaaggtcaatgaatcatacagctgcagatatatgctaggtagtaacaaggctgatattcactcgaacaagctattcaattgtactgctgaggaaccttcgactggggagctgttcaaaaggatacttatactgttttcagagatgtatgtgtcagaagatttcagttcagggcgaatgcttgtatatgtggcagcaggtgttgtgctgggcatgctgagttcgatgttcattacggccttattcagaggtatgtatgggttgttgctcgctgccgccaggtgggctgtgaggaagcattgcatcagagtatttgccagccggttgaagcgtgcctgccttcttgtcgcctatgtatccgctgttggctggatcaccttgcagtacagcaaatttatcgggttgaaagaactcttgtcggattctgaagtcatggagaggttcttttaggctgtagatgtattcgccggtgtatattgtacttgtaataccattcggttatttaggaaggtttcttcttcttctttttgatgtgaaaccaatgctctgttgtacgagtatgtacatgccagttgccagctacactgctgctctgtcacaaacgtgttgttcatgccacattttatcagggacagctagctgacgacctgagtacctgacgtctctgacgatgcatccttttttctccttgggaaatggatggaattgtatgttgcaaactgttgaatggttccatttcaccaccaattccgt

SEQ ID NO: 220330 - DNA, 1578 bp, Zea Mays
acctggcacgacatatctcacagtccaccgttccctcgctgagcaagttgagcccaaccctagcagcaccccgcgctgaacccatcaccgtcaggccatcaccatgcgaggcatcggcgccgccgccgccgccaggcggcacactccattcctctcctcccgcgctctcgccttctcctcctcttctagaagcgggggcggtgatggcggtttcgggcacgggcgcggacgcggcctgccgaccgccgggcagccgcgcgctcccgggaggcccatttccaacgacgatgacgcggatccccactgcccccaccgccaccccctgaggacgcttcaaagcagccgaccttcaccaagggcttcgacaacgctcctcagcgctcctatccggagccgccgagcctcgatgcttcctcctccgcgccgccgctgccccgcccgctcccgatctccggcgccggccgcggggtcccctggacgcagcagccttcgccggataagcctccggaagagaacaggttcatccggcgccgcgaggcggtgaaacagtctgccgccgagccgccgaaacaggctcccggggcgcagcaaccgaagttgtcgccacaagaagctgtgagacgggcggttgaactcctgggcggcgggggccgcagcggcgaagatggcggagggcgtggtggtgggggtcgcctctcccgtggccgtggccgtggcacaggccgcggcaggcgtcccgggcgtggcgaccgctctgatgatgtggaagacgtctggcaagcgagctacttgggggacaaagctgatggcgataggctagagcagcagctcggcgaggacaagatgaagattctggagcaggcgttcatggaggcagcagataatgcgttgccacatccaatggaagatgcttacctcgaggcttgtcacacaaacaacatgatcgagtttgagccggagtaccatgtgaattttggtaatcctgatattgatgagaaaccaccaatgtcgttggaggagatgcttcagaaggtgaagccatttgtagttgcatatgagggcatccagaaccaggaagaatgggaggaagctgtgaaagatgtaatggctagagccccccatatgaaagagctcatagatatgtacagtggacctgatgttgtgactgcaaaacaacaagaagaggagttgcaaagagttgcaaacactcttccagaaagcatcccttcttcagtaaagcggtttactgacaaaactctactctctcttaagaacaatcctggctggggttttgacaagaaatgccaattcatggacaagtacgctcgcatagtttcagagcaatacaagtagaaaggcatcttataccctgttgtagtaaccatattatttgtcctccaaggagacaagtacgctttgttttgagagaaggtgagatgcccatatctaatccgtgcaatgtttttttatttatttcactgagatgctagtttgataaataaaattggtgacaaacatgtttctttttttcatcatatgaagcaccaattccttgctcgggcttactgaaaaaaaaca

SEQ ID NO: 220331 - DNA, 1131 bp, Zea Mays
atggtggctcgagagattgctccatgcagagcgaggaactgctcgacagcctgctgtgggttctgctcctccgccgacgagctcacctccgcgtacgagctggtcagagcaatacagcggtcagacaaactcaaagtgcatcaacgcttctgatagcgaagcgcatctatcgactggagagtgttgaaacggtagcagtttcggatgccttaaaggcttaaactacagataaatctgtagtggcaagacaatacaggagcactcgctgagctcttcctgggtggagtcagaatcttactgtcatccttattcgatggtttctcttctgctaatgattttcgtctgggagtcgaagagcttcgattttcagacttcttttcagctttggcaggctttgaatccgaattgcctttgtcctttgcatctgctttcccttcccagcttcttctcaaggccttgggcccagattcgaagctcaacaaggtgttactaatggagttacccagggaggacttcctccctgccgtagtggccttcaacacagacgcagccttttctagcaaggacagccttgacggcggcgatttctctgctcctttggttctcactctctgtttcatgtcactcgagaatttatcgaacgacgcaggcagagaatgggcgctggtcggggaagacggcgtcgacctagcgctggttgattttgccttcgagctaaccacgtccttcttgtccgagaggaggccattgagcgcctgtttcgagaggttggagttcgacttggtgagctggggcttcttgctctctgtgccgttgctcttgggaggagcattgatcttctctaacctgccctgctctttctctagcgacagggcaccggcatccttggaactaccattggtggaggaggcttgggcggccttgccgctgccaagaagaaaagtggaggagctggtcaccacaagatcctccgggctgccgacgcaggcatggcggcccgggaccggcctgacccccctgaggatcggcaccggggtggctgcctcgagacggtcgacatggacgaactgccccagctggatgacgtcgctgaggatgaggtcgtgctgctcgtccggcagcgacacgtag

SEQ ID NO: 220332 - DNA, 1953 bp, Zea Mays
atggtggctcgagagattgctccatgcagagcgaggaactgctcgacagcctgctgtgggttctgctcctccgccgacgagctcacctccgcgtacgagctggtcagagcaatacagcggtcagacaaactcaaagtgcatcaacgcttctgatagcgaagcgcatctatcgactggagagtgttgaaacggtagcagtttcggatgccttaaaggcttaaactacagataaatctgtagtggcaagacaatacaggtaatgtgcttggaaaaaattaccttaaacatcgaacgatgctctctgccgcagaagcttcttgcatggcttcaacagcagccatttgtgctgcatccctgtacttcagaagctccttccctagtttaacgagtgatggaggaagcgttgtccacgaagcgctagcatctgtcagtttcctgttacttgcagcaaccttcactagattagtgacattcgggttatttaaaacccctgatgtcctccttataggagaagaaagcttgttgttcacaactttgtcggaatcgtctgcaggagcactcgctgagctcttcctgggtggagtcagaatcttactgtcatccttattcgatggtttctcttctgctaatgattttcgtctgggagtcgaagagcttcgattttcagacttcttttcagctttggcaggctttgaatccgaattgcctttgtcctttgcatctgctttcccttcccagcttcttctcaaggccttgggcccagattcgaagctcaacaaggtgttactaatggagttacccagggaggacttcctccctgccgtagtggccttcaacacagacgcagccttttctagcaaggacagccttgacggcggcgatttctctgctcctttggttctcactctctgtttcatgtcactcgagaatttatcgaacgacgcaggcagagaatgggcgctggtcggggaagacggcgtcgacctagcgctggttgattttgccttcgagctaaccacgtccttcttgtccgagaggaggccattgagcgcctgtttcgagaggttggagttcgacttgcgacagggcaccggcatccttggaactaccattggtggaggaggcttgggcggccttgccgctgccaagaagaaaagtggaggagctggtcaccacaagatcctccgggctgccgacgcaggcatggcggcccgggaccggcctgacccccctgaggatcggcaccggggtggctgcctcgagacggtcgacatggacgaactgccccagctggatgacgtcgctgaggatgaggtcgtgctgctcgtccggcagcgacacgtaggtggcgtgcgacgagtcggacaccttgaggagcttgaggaggaccccgggtaccagcgacgccatcgctgcagctcctagcgccgcatttacctgcgcagtgttgagccctggttcagtaaccccactccaatatgtaggctaagcagtggagccttctgagagaacaatgatgttgtcggtagccatggcaaaagcggatcactccaagctacctaatgcaaataaaggctgcgcgcgcgcggctttacaaccagagcagcaaatccagatgagcatgtcggtagccttggcgagcgaaatgagcaacaagttcaggtagatcaaaacagatttcacccttttttttcccatgctaattaacaagaaagcaaacaatcttgtgaagccaacagcaaaggcagagcacagtgccgtaaggaggaggaggtgaactagtaaagaggtgtactagaaacggtggctacaatgagtaaggacggcgttgttcgtcgcaagggcattcaattgggtccggaaagggatacgggtactagcgcatggccgccagtctcgactctagagacgagaaggtgatgggagtcgagacgagaagacgatgggtaagga

SEQ ID NO: 220333 - DNA, 2219 bp, Zea Mays
gttagcaataaccgaacaagcccttactcggcaatctcgcagcggtgcccgccccatccccgcggatctccctgtcgcccccaaccaccttccatccctcgtgacctgttcatgccgtcgccgcctcgatcctgtggatctccctgccgcctcccacgtccgtgctcatgacctgttccgcgtccgctgtcacccccagatcgcgcgaggcccatgtccacgcagtcatcgtcgccgccccctggccacgcgagatgccagcgccccctccaccttgcgtgagcgaccccttcatctaccttcaccaccatcttcaatccgcctctgcatcaccgccaaaaccctacccacttccctgctgcccaacaatgaatctgcctccgcaccaccgccaaaactctagcaactatggcagtgaacaacatccggtttcaagtctttggcagctatgctcatggaaaatacgtctatgttgatggtgaccgatctgttctcgcagaatcagcaaaggcttgatatcattgttgttttgctttatcatttgggcatttgaagcaaagctctatggagaaaaggcagggaaatgttgtctttctcatttttgcaggctgacgaatttaatgcagtggcaagagttggggttgctgctgaccatcgtggaatcatctgcagtcgtcgtgtgtccacactccctaacatgttgagcctcttgctgatcagatcaggcttgagaaggaaaatttggttttaataagtgttcttgtctggttcgattaaagaaagattcagtaattgtcttttttaggaacatagattcttcatctgtgtataatgtatttttattatctagattgtgatagttatttcaaggcctggtgatcgtatagcttgaccattgattgatgattatctgttgtcttaaggattggtacactgtatgtgttctttggtgttggtggtactttgctgacttctctatttatggtatcaaatatatctattgagtgttggtacttcaggtgcactatttagactattgggatcaatgctgtcagagctcataataaattggacgatatacgagaacaaggtattgcaatatctcaaaccagataaaagtaaatttttactcaggtattttcacctatcttattacaattcatcaaggtattttcacctagcttattacaattcatcaatcttgcttcactacccatggtaacttgattattttcatgcactaactttttgacgtcctatttcttttcttttcccctttcacctcaaaacactcattttcatctcaaagcactaattaccagatacgccaatgtcatttaaattaattttcagcagtgctattattttttctgctatttgttttggaccgattaatattttgtgtactcttcctatttattcgtgggactgtaactgcaaagcttgtaactcaagtcatatgtgtcttgtgcctgctgttgtagctatggagcagaaaattcatgtgaacccactgaagatactaagccaaacgaagtgtacacatattcagaattctagctcaagctgccctaatcaactgaggaggataaggatgccgtggattttgagagggaggagcccgccaattgccagaagtctgtgcaagctgatgcaaatgcgacagctgccccgtctaaggctgttggcttcttcgggaggacattatacaccacattaattctgcttgttgcgagccatccagatgtgtatgagccatgtgatgatttctttgcccttgttgatgcactactctcagacaaagcacaacttttgacactacaaccaaggttatgtatgtagacgatgacactatcatgcaaggcccactatcctctttgttgtcctctcatggatcctggtccagtggtggaggctgaggaatcagaaaggccctagatcatggccagtcatcgacgcaacggtggagcttatggctggaagtaatatgaagagtctatatctgacaaaaaatcatctaaaattaaatagtgagataagctttgaatagctgatgtaaaattatggagtaacattgtattagttgttgacaaaaaatgtgagaaatttaggtcaataataatatatgtattgtttgtttatatgtacttattgtgcactaatattttatcatataatttgtttgttgtcgtaacgcacgagcgtgcattccgacgtgg

SEQ ID NO: 220334 - DNA, 1645 bp, Zea Mays
cctcctcctcctcctcctcctccttcctgccgtcgccgacgactgccccacctgtactctcccctgcgtcctcctcctcggctctgctacacgccttccttgcttcctccctccaggcaggccagctccttcctcctcacgctagctcggtgtcttccttttcccttttccagcgcgcgccggccggccggccggccaaattccaatcccatccaccatcttgttcttgtcttctccgacaattaaccatcaatcccaaaacgtcatattcatcttgtcgaggccataaagtcacaacaaacacgtcgtccatgcatccaccaccgcatccatccatgaagcccggcggcgaggaggaggaggatgtgcaggtgctggtggtgcggtcccaccaccactcggaccagagcagcacgaggagccaccaccaccagcaggtcgtcatcagggcgcggccctactaccggcggtggtcgccgtggctcgtctccggcgccaccgtggcctgcgtcgccatcttcctcgtcaccatgtacgtgaacgactgcccgacgcacaactccaactgcgccgccgcagggttcctcggccgcttcgccttccagccgctccgcgagaacccgctcctcggaccctcctccgccactgaagatgggggctctcgatgtggctaaggtcgtccatggccggcaaggatggcgtctgatcacctgcatgtggctccacgccggagttgttcacctgctcatcaacatgctgtgcctcctagtcgtgggcatacgcctggagcaagaatttgggttcgtgaggatcggtctggtgtacctcatctctggttttggcgggagcctcatgtctgctctcttcatacagtccagcagcgtctccgtgggggcctccggcgctctcttcggcctcatcggatccatgctctctgagctcatcaccaactggtcactctacgcaaacaaggtggcggcgctgctaactctgcttctggtgatcctctccaacctggcgctgggcctcctcccccgggtggacaacttcgcccacatcggcggcctcgtctccggcttcctcctcggcttcgtcgtcttcgtccgcccgcacttggactggctcacccagcagcagagaagcggcggcggcgggcaagggcaacagcaagctcctccgccggtggcagcggcgaggaaacgcaagcacaggacgtaccagtatgtgctgtggctggccgccgccgcgctgctcgtggccgggctcacggcggccaccgtgctgcttttccgcgggtacgacgccaaccagcactgcccgtggtgccactacctcagctgcgtgcccaccaggaggtggaggtgcgacgggtcgccgaccacgtgcacggccacgacgcaggagaacaacacgctcagcgtcgtctgcgagggcggcagcaaccgcacgtacgtcgtggcggcggcgtcgcaggacaggatcaaggacctctgcaatcagctctgcacctagcactgcatattcttcgtgtacatcgatccatttttactcaccgtcagagtgaggtcctagctttacagcaagagaaagaatttgttcgatttacaggcaaatatgatatttttgaaatgcagcaaacaaccaa

SEQ ID NO: 220335 - DNA, 2078 bp, Zea Mays
aagagagagagagagaaagaaaaaaaagaatggacataaagtgggagtttacatcaaccgatcctatccccgcaaagtgccactagtgcttgtatgactactagtacacggcaaaaagagagtcccttgttcattggacactgggaaacacaaacttctgcctgtctgccgcctacctaaagcatctgtagacctgcaaatcaaggagcagaaagaatgatggcccaggtatggacaaaaccagatagcgagggctacacgaagtgcactggacgcacgaagaatcgtcacggaaccaacagtacgaccgctggctatataatcgccgacgccaatggtggacttaaccaaatgagactgggaataagtgacatggtcgcggttgctaagctcatgaatgccacactagtaatcccggccctggatcacaaatcgttctggactgatccaagtgatttcaaagatatatttgacgtgcaacacttcaagcaaactctagaggatgatatcatggttgtggactccttgccgccagatttcaaaaggttcaaaccctacactagagcacccaagtcctgggccagggcttcttattatagggcattcacaaagacactgaagaaggccagggttgtgagattcacacatacagattcacgcattgccaacaacggtctccctccttccatccaaaggctccgatgccgtgcaaactacgaggcgctaaggtacagtcgagagatcgaagagctaggtaatactctagtcggcagactgaggaacggatccaaccactacatcgcacttcacctaaggtatgagaaggacatgctctcattcactggctgcagccacaacctaacacatcaagaggcagaggagctgagggaaatgcgactcagggtgcagcactggaaagagaaggagatcaacggtaaggagagaagactccaaggaggctgccctatgactcctcgtgaagcggctcttttcctgaaagctatgggttacccttccagcacaaggatctacgtcgtatcaggcgaaatatatggtgtgcgtagcatggacgcgttgaaggccgaatatccaaatgtctacacacattatagtctggcaacagtaaatgaattagagtctctcaggctgtaccagaacaggttagctgctgtagactacaatgtagccctccagagtgatgtttttgtgtatacatatgatgggaatatggctagagcagtccagggccataggagatacgaaggattccagaagaccataaaccctgacaggcgcaagcttgtcgagctcattgacaagctagatgaaggtacaatagattggacagggtttgcaagtgaggtgaagatgcaccatggaaacaggcttggaggtccgtatcagaggctgtttggtcgaagtccaaggcatgaggagtatttttatgcaaatcctcttccagggtgcttgtgcagaagaaacacacaggatcaagtggcatgaaccttacatacgaatagactgttatcatatattgaactttcctccaacccattgacatacaccaaacagtgaaaatccgggtaaactgacagcaaaaagacaagtttatgtagttttccatcttacatgaggatacaagagggaacactcactgaaatgtgcattttcaaaagatgtttattcaggttttaaaatagaacaggcaaagatattcaaagaggatacgtgttgtaccacagagtatataattagcagatttgatgagtttttagtgtatgtttgtatttactccatagtccacatgtaaagcctctcatgtatgagattcttctgggagcctccgacacttggtttgtcctccagatgtacagccttaaatctaaaaattaactttattcatttattatgcacaataatcattagttgtagcggtagtactatgcccagtttctcttgtgaggtgaggtgtttctcttgtattcataggctcatcccttgacacctctatgatatcagcctctttccatgccgtgtttatcacctcctttattttatctctggaagcccacaatgac

SEQ ID NO: 220336 - DNA, 1094 bp, Zea Mays
ccaccacctctcgccatttcgttactgctatgctacagcaacatataacccatagagataattcagtagatctagtagtttaactccataattgttggatttcaatacattcagggttagggcgtgttggacctgccatgggggacaggccggcgccgatcgagaaggtcgcggtgccggagaagatggccttgttcctccacgccgccgtcacgtcaccgggacaccagcagcagcacggcgcctcgtcgcacgaggcgcccgccgccgcgaacatcacgccgcggacaacaacagccaggaataagcagcagcacctgccggtgagccccggggcgtgcctctgctcgccgaccgtgcacgagggctcgttccggtgcaggctccaccgcggcagcggcagcggctccggactccacgagatgaagatgagcaagaaggccggcgtatgacgacgcgacgcagcgggcggcgacaagcgttcgtactacgccttaccgcaaatgcgcaggtgatgacgcaagagcgattacaatccaacgtgaacagtataagagattacaagatgttacaagggaaatatcgccatttgtattcatcaacttgagcaacaccttctccttacgttgtctacccgttccaccatgatgaagtctgttggacgaaacttccttcgtcatgctcctcttgcattatgtcaaagctcttctgttgacgaagctcctgtaatattcaatagtatgctgaaagcaaatggttagccgtgtttttgaggaccttcggcagacgaaactattaggcaaaatgaaaaggaatctcatattgcttcagaagagcctaactttctcctcctccagagccatacaaccctgaggctaatccggtgctgaaaagcgctcttgatgtgattagaatagcaaatgaagcagttgatgaagttgtggataggctcctgaacgaagctgccgataaaaacttgaaggaggatgattagaccttgtatataaaaacacttgtagaatttttgtgtgttgttctcttatgtaaaaacaattgtcaattatatagttcatgatgtattatatttctttgtg

SEQ ID NO: 220337 - DNA, 883 bp, Zea Mays
ccaccacctctcgccatttcgttactgctatgctacagcaacatataacccatagagataattcagtagatctagtagtttaactccataattgttggatttcaatacattcaggttcttgctaatttgatcggttttaaatgttttgtgatggaatcggttggactgtggaccgaggccggcgaatcaatcaagaacgccacctctcctaggttagggcgtgttggacctgccatgggggacaggccggcgccgatcgagaaggtcgcggtgccggagaagatggccttgttcctccacgccgccgtcacgtcaccgggacaccagcagcagcacggcgcctcgtcgcacgaggcgcccgccgccgcgaacatcacgccgcggacaacaacagccaggaataagcagcagcacctgccggtgagccccggggcgtgcctctgctcgccgaccgtgcacgagggctcgttccggtgcaggctccaccgcggcagcggcagcggctccggactccacgagatgaagatgagcaagaaggccggcgtatgacgacgcgacgcagcgggcggcgacaagcgttcgtactacgccttaccgcaaatgcgcagctcatgaaacacaagtggaggccaagtttacctaagacataaaacaacacgaatgctgtattacctgttgatcacttgttctcagttgttgtggatcaagaatcagacaacacaattgttatacattaaggactttgtccttcgaagcattatctgctttcggatatatataatgatcttcagatgaaggtcatgaaaaacacgtattcatcgttcatcattcatataagataaaagtcctatacatgcgagatgtattatccattcatatagtc

SEQ ID NO: 220338 - DNA, 2151 bp, Zea Mays
ctctccctttaaatcgagcgccgcttcctctccgccgctttctctccccttcactcgagcgccgcttcctctccccttccatcgagcgcagcgcctgcgccgccgccaccactccgcaccgccgccagttccccacttcctccccacacccgaatcggattgaagccagaaggcaaggtgaagagtgggcttgggtaacggttgcaaagagatatccccaacagttgcagtcactcgcatccagtcggctcagctatggaggaggactcatcagcgatggagccgaataggctgcgcgaggccgaggcggcggctggggagctgaagaggctgcgcgaggccgggcagtctcagtacatgtaccggtctatcgccgacgccagggttgtcggcggccgggtctgcctcttcgccgtcgtctccgagatcggcgctaccgtccacagccgtggcacggatttcactgttacgttgagggtaatagatgaatcatacaagtctggaatatctgtaactttttttgctgacagcactgcactattgccttgtgtgaagtcgtgtggagatgtgatcagtctccataacgtcgtgataaagaaatatagagatttctttgtgcaatttgacaaaaagtactcttcattcgcgctgtttgaaggcaaaacgtatactgaatgcagtccatatcagacttctataagatatcatgacagcgaacacgacaaagattttttaaatcagatgagaacgtggctccctcaaggtctgaaggatttcacttcaaataattccgaattgtatttaatgaatttgaagtccgattctacttttgatctagtatgcaaggtttttcatgtacatgtggagaacaacaattcaatattttatgtttgggatggaactgatacccctgcagctgagtttccagcaatgtaagattttagatttgttttgcaattttttgtaataactaagaaaaacatctatgaaatataagatggtgttttagtgttttccaaatactaatgcagcttttaatttttgtttggttgtttttacttggtgcactgaacataagcatagtttggatgctgaggcagccaaatcactctctctacatgaaggcccccctctatccagggagattttatgtacaatgccagatttcggaactgtcctaaggattttttcagatagatttgtcaataaagtatcatatatgcaaaagaacatatattgggccaggttctggaacattacttgcaaacaaaactttggcatttggaaaggtactttctcggactccggtggagttcgcctattatcaaacaaagatgatagcgttgttgatcgtctaaagatgtatgacagccgcatcgccaaccgagttcgtcgtcggccgatggcaagcatcccctccagtgttactggtgacgcacaaattgagaaccttggtccgtgttgtggcagcacatccatgtgaagctagtttgctttcaactggtaactgtcatcttcggttgactcttgaggatcctacagcgagaattcatgcgtatgtccacaagaatgatttggtcggattctttggtggtggttttttgacagcagaagtgatagtaaaaaagatgaacatggtactgggcatcccggaaccacaaggcagcgtggaagttgccccctcgaccaggaatccaccttggatatggtgttgcttgatgtcatactatatggacaaaaacgatccctgggtcagcagaaagtaccggatctatagcacagccatcagggattgagcagagggatgctgctggaatgtgcaggaacaaacttgtaaatgaatgggacagatgctgtgtagtattggcatcttgcttgtagaagaggccatatgcttttgcaggtgcaatcagtgaatcattccatactgaacactgagaatagcacctcgggttcattctgtatgtgcctacactctagattgtcttttgggtgctcatcacgaaacgtgagcatatcttttggaaacagagacctgcgtttgattcctgtgcttgttatgttgtgattgatcattggggggaggttgagcttttgagccagtataaaaatactgaccggaccatcaatattattgatcattgggagtat

SEQ ID NO: 220339 - DNA, 1216 bp, Zea Mays
aaaactttacggtctatgcatcatccttttttccgagcataaatttatggtgtaactcctttgggaaaaccgttaacgatcatctgaggtcaactttgagttttgataacaagcaacctccatttgcgagtcaaaactttgactacggtcaaacaatagcttgcatttcatacccgtacaatcgttctagatcaggagatgtttgggcagcctatgagtcacgcaccagcactgccactgtgcagttccgttcccaaattgctggtgggggttcatccacaagaattcccttgcctttggaattagcagagaatgaacccatatatgtgaatcccaaacaatatcacgggatacttcgcagaagacagttacgtgccaagctagaggctcagaacaagctagtcagagcccgaaagccttaccttcatgagtctaggcatcttcatgcaatgaagagggcacgaggttccggtggacgattcctcaacactaagcagctccagcagtctcacacagccctcaccaggtccaccaccacaagtggcacaagctcctcaggctcaactcatctgcggcttggtggtggcgcagccgcagctggagatcgatctgtgctggcacccaaaacaatggcctcacaagacagtagcaagaaggccgtttcttcagccctcgccttcactgcgactccaatgctgcgcagagatgacggcttcttgcagcacccaagccatcttttcagtttttctggtcattttgggcaggcaagcgcgcaagctggcgtccataatggaagtcagcatagggttccagttatgagatgaccggtttgcgaaccatagctggtgatccaggcgtctagggtcaacttcgctgtggtgtcttagtctctcaggcaattcatccttggcttaatttctggctttttattagaaggtaccaaaatgtgttccataccgttgtggccacagagcccataaaccagggggtttgatggttggcactcctacccaaactattgttgcagtggtgtttgttagaataaaccttgactattattctgtacaatttgcctttatcttgtactgccaattattgtgtagtggtcacctgtccagtttatggcctcaagactagtctaccctgtttgtcacaacatctgccctgaaaaatcatactgcagctgtactggagtggtccgtcccagctgtgatct

SEQ ID NO: 220340 - DNA, 1174 bp, Zea Mays
gtggggtctccttggtacaagacgagggataaaagaacagcgcaagtggagtgatgcagccgagggggccagaccagaggaagggacggcggggaggtggcaaggcgcagagagcaggttcgcttggcggacgcaccgagggaggcgtgtgggagccatgcttcttccctcttcgtcttcgtcttccgcttccgcttccaaagttccgttcccaaattgctggtgggggttcatccacaagaattcccttgcctttggaattagcagagaatgaacccatatatgtgaatcccaaacaatatcacgggatacttcgcagaagacagttacgtgccaagctagaggctcagaacaagctagtcagagcccgaaagccttaccttcatgagtctaggcatcttcatgcaatgaagagggcacgaggttccggtggacgattcctcaacactaagcagctccagcagtctcacacagccctcaccaggtccaccaccacaagtggcacaagctcctcaggctcaactcatctgcggcttggtggtggcgcagccgcagctggagatcgatctgtgctggcacccaaaacaatggcctcacaagacagtagcaagaaggccgtttcttcagccctcgccttcactgcgactccaatgctgcgcagagatgacggcttcttgcagcacccaagccatcttttcagtttttctggtcattttgggcaggcaagcgcgcaagctggcgtccataatggaagtcagcatagggttccagttatgagatgaccggtttgcgaaccatagctggtgatccaggcgtctagggtcaacttcgctgtggtgtcttagtctctcaggcaattcatccttggcttaatttctggctttttattagaaggtaccaaaatgtgttccataccgttgtggccacagagcccataaaccagggggtttgatggttggcactcctacccaaactattgttgcagtggtgtttgttagaataaaccttgactattattctgtacaatttgcctttatcttgtactgccaattattgtgtagtggtcacctgtccagtttatggcctcaagactagtctaccctgtttgtcacaacatctgccctgaaaaatcatactgcagctgtactggagtggtccgtcccagctgtgatct

SEQ ID NO: 220341 - DNA, 1442 bp, Zea Mays
cctgcccccacttgccatagcaaaaagtggcgcattagatgtggacatacaaatttgatatacaatagagagctgtggggtctccttggtacaagacgagggataaaagaacagcgcaagtggagtgatgcagccgagggggccagaccagaggaagggacggcggggaggtggcaaggcgcagagagcaggttcgcttggcggacgcaccgagggaggcgtgtgggagccatgcttcttccctcttcgtcttcgtcttccgcttccgcttccaaaggtaactcctttgggaaaaccgttaacgatcatctgaggtcaactttgagttttgataacaagcaacctccatttgcgagtcaaaactttgactacggtcaaacaatagcttgcatttcatacccgtacaatcgttctagatcaggagatgtttgggcagcctatgagtcacgcaccagcactgccactgtgcagttccgttcccaaattgctggtgggggttcatccacaagaattcccttgcctttggaattagcagagaatgaacccatatatgtgaatcccaaacaatatcacgggatacttcgcagaagacagttacgtgccaagctagaggctcagaacaagctagtcagagcccgaaagccttaccttcatgagtctaggcatcttcatgcaatgaagagggcacgaggttccggtggacgattcctcaacactaagcagctccagcagtctcacacagccctcaccaggtccaccaccacaagtggcacaagctcctcaggctcaactcatctgcggcttggtggtggcgcagccgcagctggagatcgatctgtgctggcacccaaaacaatggcctcacaagacagtagcaagaaggccgtttcttcagccctcgccttcactgcgactccaatgctgcgcagagatgacggcttcttgcagcacccaagccatcttttcagtttttctggtcattttgggcaggcaagcgcgcaagctggcgtccataatggaagtcagcatagggttccagttatgagatgaccggtttgcgaaccatagctggtgatccaggcgtctagggtcaacttcgctgtggtgtcttagtctctcaggcaattcatccttggcttaatttctggctttttattagaaggtaccaaaatgtgttccataccgttgtggccacagagcccataaaccagggggtttgatggttggcactcctacccaaactattgttgcagtggtgtttgttagaataaaccttgactattattctgtacaatttgcctttatcttgtactgccaattattgtgtagtggtcacctgtccagtttatggcctcaagactagtctaccctgtttgtcacaacatctgccctgaaaaatcatactgcagctgtactggagtggtccgtcccagctgtgatct

SEQ ID NO: 220342 - DNA, 3125 bp, Zea Mays
aaattgtggaaataggccagtggcggcagcttcttgccctcttcctccattgacttgccgatgcagatcgaggggcgaggctgccgtcgtcgtcccgggctctctgtgcgcgtacgcggaagagtgaggaagctctagtccactcatacagcctttacggttcaggcaagcaaccacccatagcattcctatcactgtgcttggttgcgcatggattaccaaggggacaatcttagagatttctttcaaactaatgggcgtaaggtgcttcagagagcggaaaacaactatagcttgaaatattttacagaaaatgagatacgaaacataactgatgggtataagtctgttctgggaagaggggcatttggtgaggtctacaaaggaacgctagaagaccaatcctcagttgcagtaaagagatatatacatgggacccacaaagaggtgtttgccaaggaagtcatagtgcactctcaaataaaccacaagaatgttgtcagactcttgggctgctgcacagaagaaaatgctctaatgattgtcatggagtttatctccaatgggaacctcgacagcatacttcatggcaacagaggtaatggtcgggttcccttccctctgaagaaaaggatagaaattgccattgaggttgctgaagtattatggtgcatgcattcgatgtatagtcctgttcttcatggtgacatcaaacctgctaacatactgctagatgaaaattttcagccaaagatatcagattttggaattgcaagactgctttctgctaatggcccccagcaagctaccactgtcattggttccataggctaccttgatccagcatactgtgagagtggaattctaaccccaaagagcgatgtttacagctttggagtggttttgctggaaattatcacaaggaataaagcagtggatggcaccgttacccttgctcaaagttttaatgaggctcttacaaaaggggaggatgtgcagcacatgtttgatgaggaaatcagtgttgcagaaaacaagaagtttcttcgacgcattggacagttagcagctaaatgcttgcagagggacgtcaaaacgcgtcctgaaatggttgaagttgctaatagtctaaggatgatcaggaaagctatgcagagagaccaggatgaggatgtactgttagcagcataccaatttggagatctaaaaattttcaatgaaactgaaatgaaggaaatgacaaaaaactacagcatggcctttaggaaatcgatgtgtgaatgtctctacaatggagtcatcggcatgaatcgtccaattatagtaagactacttgagacaagttcagaaactggcagagagatatttctgaacactatgagcatattgagtcaaaagaaccacaaaaatgttgtgaatattgttggcttccacatagggaagtccagtttagagtgtgtatatgagtcttgctgtgatctatccaagacaatgcttggctctatatcactatctaacagaaacctttatgacactatctgttccatgaaaaaacttcatcttcaacaacgcctgtcaatagcagtccagtgtgcagagggtctggttcatatccattcattagcagctgaaagtcctgaatcatgtggcaccagcctcttaggaaacttcagatctgccaacatatttttggacgagaactttgtaccaaaaatcttcaatgtgaacttgtcaacatttcttggactttcaggtgcacaaaaacatacagtgttttcaattcattacaatggaccagaaaagtattattcagacccaagggatgtttctggtcaacttcttaacaaaaaatctgatgtatatagctttggagttgttcttttagagctcatcacttggaagactgtgagatacatgtacaatcttagggctcgtgtgcttaccacagacttccttgattcttataggagagaccgtgatgcaattgggatgttcggcaaggtttgtgatgaacatgaagggtactttgttcatgaggccctttccattgccatcgattgcttacaacttgatattcaaatgaggccagaaatggaacatgtacttttccgtctccggatcattgttgctagaagcaaacttgctgctggtagtaacaataaacctagccaacatattggtcgggcccttgttaacaacattgataaacttcacccaactctcatatcaaccatttccatggaggaactgaatgaagcaaccgggaacttcagtaatgatgttcttataggacagggaccatacgccgaatgtttcctgggagttcttaaagatgggcagaatcttgctgtaaaaaggctacgtacttctgaagaaattcaagtagaggttccgaccattttaagaatgtgttaccatgacaatgttgtgcaatttctaggatgttttcttgaagggggaactcgtgttcttgcttatgagtacgccccaaggggctccttgcatgatattcttcatggtaaaatgggcatcaagggagcccgaccagggccacctctatcgtggttgcagcgtgtgaagattgccgtgacattggtgtttcaatacatgatgcccatcgccgggttcataattgggccgagtactattctgtcagggaacatctagcacctgagttcgcattcagaagaaggtatagcacaaagagcgatgtctacagcttcgggcttgtactgttggagcttttaactggccgctcagtttttcatgttgcgacacaatgtggcccgaggagcgcagttagatgggctaaaccaatgcttagtcaagacaaggtggaacagtgcatagatccaaggcttggaggagggtacctactaaacgatgtcagaaagatggcttctgttgctgcactgtgtttacaagacgagccagagttccggcctgaaatgagcatcgtcgtcgaggctctgagcctgttactgaacagcaagtgaacaagtaaccgtccctgcattggtgaagcacgtggaatgtgatttccttgcatgtcattgcgagctcaagatcacgggtttcgtgaaggcgattggcccccaacagaaaacgagcaagccactttggaa

SEQ ID NO: 220343 - DNA, 3048 bp, Zea Mays
tgccgatgcagatcgaggggcgaggctgccgtcgtcgtcccgggctctctgtgcgcgtacgcggaagagtgaggaagctctagtccactcatacagcctttacggttcaggcaagcaaccacccatagcattcctatcactgtgcttggttgcgcatggattaccaaggggacaatcttagagatttctttcaaactaatgggcgtaaggtgcttcagagagcggaaaacaactatagcttgaaatattttacagaaaatgagatacgaaacataactgatgggtataagtctgttctgggaagaggggcatttggtgaggtctacaaaggaacgctagaagaccaatcctcagttgcagtaaagagatatatacatgggacccacaaagaggtgtttgccaaggaagtcatagtgcactctcaaataaaccacaagaatgttgtcagactcttgggctgctgcacagaagaaaatgctctaatgattgtcatggagtttatctccaatgggaacctcgacagcatacttcatggcaacagaggtaatggtcgggttcccttccctctgaagaaaaggatagaaattgccattgaggttgctgaagtattatggtgcatgcattcgatgtatagtcctgttcttcatggtgacatcaaacctgctaacatactgctagatgaaaattttcagccaaagatatcagattttggaattgcaagactgctttctgctaatggcccccagcaagctaccactgtcattggttccataggctaccttgatccagcatactgtgagagtggaattctaaccccaaagagcgatgtttacagctttggagtggttttgctggaaattatcacaaggaataaagcagtggatggcaccgttacccttgctcaaagttttaatgaggctcttacaaaaggggaggatgtgcagcacatgtttgatgaggaaatcagtgttgcagaaaacaagaagtttcttcgacgcattggacagttagcagctaaatgcttgcagagggacgtcaaaacgcgtcctgaaatggttgaagttgctaatagtctaaggatgatcaggaaagctatgcagagagaccaggatgaggatgtactgttagcagcataccaatttggagatctaaaaattttcaatgaaactgaaatgaaggaaatgacaaaaaactacagcatggcctttaggaaatcgatgtgtgaatgtctctacaatggagtcatcggcatgaatcgtccaattatagtaagactacttgagacaagttcagaaactggcagagagatatttctgaacactatgagcatattgagtcaaaagaaccacaaaaatgttgtgaatattgttggcttccacatagggaagtccagtttagagtgtgtatatgagtcttgctgtgatctatccaagacaatgcttggctctatatcactatctaacagaaacctttatgacactatctgttccatgaaaaaacttcatcttcaacaacgcctgtcaatagcagtccagtgtgcagagggtctggttcatatccattcattagcagctgaaagtcctgaatcatgtggcaccagcctcttaggaaacttcagatctgccaacatatttttggacgagaactttgtaccaaaaatcttcaatgtgaacttgtcaacatttcttggactttcaggtgcacaaaaacatacagtgttttcaattcattacaatggaccagaaaagtattattcagacccaagggatgtttctggtcaacttcttaacaaaaaatctgatgtatatagctttggagttgttcttttagagctcatcacttggaagactgtgagatacatgtacaatcttagggctcgtgtgcttaccacagacttccttgattcttataggagagaccgtgatgcaattgggatgttcggcaaggtttgtgatgaacatgaagggtactttgttcatgaggccctttccattgccatcgattgcttacaacttgatattcaaatgaggccagaaatggaacatgtacttttccgtctccggatcattgttgctagaagcaaacttgctggacagggaccatacgccgaatgtttcctgggagttcttaaagatgggcagaatcttgctgtaaaaaggctacgtacttctgaagaaattcaagtagaggttccgaccattttaagaatgtgttaccatgacaatgttgtgcaatttctaggatgttttcttgaagggggaactcgtgttcttgcttatgagtacgccccaaggggctccttgcatgatattcttcatggtaaaatgggcatcaagggagcccgaccagggccacctctatcgtggttgcagcgtgtgaagattgccgtaagtgctgcaaaaggcatcgagttcctccatgagaaggtgacattggtgtttcaatacatgatgcccatcgccgggttcataattgggccgagtactattctgtcagggaacatctagcacctgagttcgcattcagaagaaggtatagcacaaagagcgatgtctacagcttcgggcttgtactgttggagcttttaactggccgctcagtttttcatgttgcgacacaatgtggcccgaggagcgcagttagatgggctaaaccaatgcttagtcaagacaaggtggaacagtgcatagatccaaggcttggaggagggtacctactaaacgatgtcagaaagatggcttctgttgctgcactgtgtttacaagacgagccagagttccggcctgaaatgagcatcgtcgtcgaggctctgagcctgttactgaacagcaagtgaacaagtaaccgtccctgcattggtgaagcacgtggaatgtgatttccttgcatgtcattgcgagctcaagatcacgggtttcgtgaaggcgattggcccccaacagaaagttatgattactgcattcatctaggcttggaacttgtgctttctttgtctgtgcacatgtaatactcaaaattctaaataaagaatatagagagatcttctca

SEQ ID NO: 220344 - DNA, 2966 bp, Zea Mays
gcttcttgccctcttcctccattgacttgccgatgcagatcgaggggcgaggctgccgtcgtcgtcccgggctctctgtgcgcgtacgcggaagagtgaggaagctctagtccactcatacagcctttacggttcaggcaagcaaccacccatagcattcctatcactgtgcttggttgcgcatggattaccaaggggacaatcttagagatttctttcaaactaatgggcgtaaggtgcttcagagagcggaaaacaactatagcttgaaatattttacagaaaatgagatacgaaacataactgatgggtataagtctgttctgggaagaggggcatttggtgaggtctacaaaggaacgctagaagaccaatcctcagttgcagtaaagagatatatacatgggacccacaaagaggtgtttgccaaggaagtcatagtgcactctcaaataaaccacaagaatgttgtcagactcttgggctgctgcacagaagaaaatgctctaatgattgtcatggagtttatctccaatgggaacctcgacagcatacttcatggcaacagaggtaatggtcgggttcccttccctctgaagaaaaggatagaaattgccattgaggttgctgaagtattatggtgcatgcattcgatgtatagtcctgttcttcatggtgacatcaaacctgctaacatactgctagatgaaaattttcagccaaagatatcagattttggaattgcaagactgctttctgctaatggcccccagcaagctaccactgtcattggttccataggctaccttgatccagcatactgtgagagtggaattctaaccccaaagagcgatgtttacagctttggagtggttttgctggaaattatcacaaggaataaagcagtggatggcaccgttacccttgctcaaagttttaatgaggctcttacaaaaggggaggatgtgcagcacatgtttgatgaggaaatcagtgttgcagaaaacaagaagtttcttcgacgcattggacagttagcagctaaatgcttgcagagggacgtcaaaacgcgtcctgaaatggttgaagttgctaatagtctaaggatgatcaggaaagctatgcagagagaccaggatgaggatgtactgttagcagcataccaatttggagatctaaaaattttcaatgaaactgaaatgaaggaaatgacaaaaaactacagcatggcctttaggaaatcgatgtgtgaatgtctctacaatggagtcatcggcatgaatcgtccaattatagtaagactacttgagacaagttcagaaactggcagagagatatttctgaacactatgagcatattgagtcaaaagaaccacaaaaatgttgtgaatattgttggcttccacatagggaagtccagtttagagtgtgtatatgagtcttgctgtgatctatccaagacaatgcttggctctatatcactatctaacagaaacctttatgacactatctgttccatgaaaaaacttcatcttcaacaacgcctgtcaatagcagtccagtgtgcagagggtctggttcatatccattcattagcagctgaaagtcctgaatcatgtggcaccagcctcttaggaaacttcagatctgccaacatatttttggacgagaactttgtaccaaaaatcttcaatgtgaacttgtcaacatttcttggactttcaggagagaccgtgatgcaattgggatgttcggcaaggtttgtgatgaacatgaagggtactttgttcatgaggccctttccattgccatcgattgcttacaacttgatattcaaatgaggccagaaatggaacatgtacttttccgtctccggatcattgttgctagaagcaaacttgctgctggtagtaacaataaacctagccaacatattggtcgggcccttgttaacaacattgataaacttcacccaactctcatatcaaccatttccatggaggaactgaatgaagcaaccgggaacttcagtaatgatgttcttataggacagggaccatacgccgaatgtttcctgggagttcttaaagatgggcagaatcttgctgtaaaaaggctacgtacttctgaagaaattcaagtagaggttccgaccattttaagaatgtgttaccatgacaatgttgtgcaatttctaggatgttttcttgaagggggaactcgtgttcttgcttatgagtacgccccaaggggctccttgcatgatattcttcatggtaaaatgggcatcaagggagcccgaccagggccacctctatcgtggttgcagcgtgtgaagattgccgtgacattggtgtttcaatacatgatgcccatcgccgggttcataattgggccgagtactattctgtcagggaacatctagcacctgagttcgcattcagaagaaggtatagcacaaagagcgatgtctacagcttcgggcttgtactgttggagcttttaactggccgctcagtttttcatgttgcgacacaatgtggcccgaggagcgcagttagatgggctaaaccaatgcttagtcaagacaaggtggaacagtgcatagatccaaggcttggaggagggtacctactaaacgatgtcagaaagatggcttctgttgctgcactgtgtttacaagacgagccagagttccggcctgaaatgagcatcgtcgtcgaggctctgagcctgttactgaacagcaagtgaacaagtaaccgtccctgcattggtgaagcacgtggaatgtgatttccttgcatgtcattgcgagctcaagatcacgggtttcgtgaaggcgattggcccccaacagaaagttatgattactgcattcatctaggcttggaacttgtgctttctttgtctgtgcacatgtaatactcaaaattctaaataaagaatatagagagatcttctca

SEQ ID NO: 220345 - DNA, 3298 bp, Zea Mays
cagcttcttgccctcttcctccattgacttgccgatgcagatcgaggggcgaggctgccgtcgtcgtcccgggctctctgtgcgcgtacgcggaagagtgaggaagctctagtccactcatacagcctttacggttcaggcaagcaaccacccatagcattcctatcactgtgcttggttgcgcatggattaccaaggggacaatcttagagatttctttcaaactaatgggcgtaaggtgcttcagagagcggaaaacaactatagcttgaaatattttacagaaaatgagatacgaaacataactgatgggtataagtctgttctgggaagaggggcatttggtgaggtctacaaaggaacgctagaagaccaatcctcagttgcagtaaagagatatatacatgggacccacaaagaggtgtttgccaaggaagtcatagtgcactctcaaataaaccacaagaatgttgtcagactcttgggctgctgcacagaagaaaatgctctaatgattgtcatggagtttatctccaatgggaacctcgacagcatacttcatggcaacagaggtaatggtcgggttcccttccctctgaagaaaaggatagaaattgccattgaggttgctgaagtattatggtgcatgcattcgatgtatagtcctgttcttcatggtgacatcaaacctgctaacatactgctagatgaaaattttcagccaaagatatcagattttggaattgcaagactgctttctgctaatggcccccagcaagctaccactgtcattggttccataggctaccttgatccagcatactgtgagagtggaattctaaccccaaagagcgatgtttacagctttggagtggttttgctggaaattatcacaaggaataaagcagtggatggcaccgttacccttgctcaaagttttaatgaggctcttacaaaaggggaggatgtgcagcacatgtttgatgaggaaatcagtgttgcagaaaacaagaagtttcttcgacgcattggacagttagcagctaaatgcttgcagagggacgtcaaaacgcgtcctgaaatggttgaagttgctaatagtctaaggatgatcaggaaagctatgcagagagaccaggatgaggatgtactgttagcagcataccaatttggagatctaaaaattttcaatgaaactgaaatgaaggaaatgacaaaaaactacagcatggcctttaggaaatcgatgtgtgaatgtctctacaatggagtcatcggcatgaatcgtccaattatagtaagactacttgagacaagttcagaaactggcagagagatatttctgaacactatgagcatattgagtcaaaagaaccacaaaaatgttgtgaatattgttggcttccacatagggaagtccagtttagagtgtgtatatgagtcttgctgtgatctatccaagacaatgcttggctctatatcactatctaacagaaacctttatgacactatctgttccatgaaaaaacttcatcttcaacaacgcctgtcaatagcagtccagtgtgcagagggtctggttcatatccattcattagcagctgaaagtcctgaatcatgtggcaccagcctcttaggaaacttcagatctgccaacatatttttggacgagaactttgtaccaaaaatcttcaatgtgaacttgtcaacatttcttggactttcaggtgcacaaaaacatacagtgttttcaattcattacaatggaccagaaaagtattattcagacccaagggatgtttctggtcaacttcttaacaaaaaatctgatgtatatagctttggagttgttcttttagagctcatcacttggaagactgtgagatacatgtacaatcttagggctcgtgtgcttaccacagacttccttgattcttataggagagaccgtgatgcaattgggatgttcggcaaggtttgtgatgaacatgaagggtactttgttcatgaggccctttccattgccatcgattgcttacaacttgatattcaaatgaggccagaaatggaacatgtacttttccgtctccggatcattgttgctagaagcaaacttgctgctggtagtaacaataaacctagccaacatattggtcgggcccttgttaacaacattgataaacttcacccaactctcatatcaaccatttccatggaggaactgaatgaagcaaccgggaacttcagtaatgatgttcttataggacagggaccatacgccgaatgtttcctgggagttcttaaagatgggcagaatcttgctgtaaaaaggctacgtacttctgaagaaattcaagtagagggttccgaccattttaagaatgtgttaccatgacaatgttgtgcaatttctaggatgttttcttgaagggggaactcgtgttcttgcttatgagtacgccccaaggggctccttgcatgatattcttcatggtaaaatgggcatcaagggagcccgaccagggccacctctatcgtggttgcagcgtgtgaagattgccgtaagtgctgcaaaaggcatcgagttcctccatgagaaggttgatcctcgtatcatccacaacaacatcaagtccagtaacatacttctctttgacaacgatgttgcaaaaataggtgacattggtgtttcaatacatgatgcccatcgccgggttcataattgggccgagtactattctgtcagggaacatctagcacctgagttcgcattcagaagaaggtatagcacaaagagcgatgtctacagcttcgggcttgtactgttggagcttttaactggccgctcagtttttcatgttgcgacacaatgtggcccgaggagcgcagttagatgggctaaaccaatgcttagtcaagacaaggtggaacagtgcatagatccaaggcttggaggagggtacctactaaacgatgtcagaaagatggcttctgttgctgcactgtgtttacaagacgagccagagttccggcctgaaatgagcatcgtcgtcgaggctctgagcctgttactgaacagcaagtgaacaagtaaccgtccctgcattggtgaagcacgtggaatgtgatttccttgcatgtcattgcgagctcaagatcacgggtttcgtgaaggcgattggcccccaacagaaagttatgattactgcattcatctaggcttggaacttgtgctttctttgtctgtgcacatgtaatactcaaaattctaaataaagaatatagagagatcttctca

SEQ ID NO: 220346 - DNA, 3191 bp, Zea Mays
cagcttcttgccctcttcctccattgacttgccgatgcagatcgaggggcgaggctgccgtcgtcgtcccgggctctctgtgcgcgtacgcggaagagtgaggaagctctagtccactcatacagcctttacggttcaggcaagcaaccacccatagcattcctatcactgtgcttggttgcgcatggattaccaaggggacaatcttagagatttctttcaaactaatgggcgtaaggtgcttcagagagcggaaaacaactatagcttgaaatattttacagaaaatgagatacgaaacataactgatgggtataagtctgttctgggaagaggggcatttggtgaggtctacaaaggaacgctagaagaccaatcctcagttgcagtaaagagatatatacatgggacccacaaagaggtgtttgccaaggaagtcatagtgcactctcaaataaaccacaagaatgttgtcagactcttgggctgctgcacagaagaaaatgctctaatgattgtcatggagtttatctccaatgggaacctcgacagcatacttcatggcaacagaggtaatggtcgggttcccttccctctgaagaaaaggatagaaattgccattgaggttgctgaagtattatggtgcatgcattcgatgtatagtcctgttcttcatggtgacatcaaacctgctaacatactgctagatgaaaattttcagccaaagatatcagattttggaattgcaagactgctttctgctaatggcccccagcaagctaccactgtcattggttccataggctaccttgatccagcatactgtgagagtggaattctaaccccaaagagcgatgtttacagctttggagtggttttgctggaaattatcacaaggaataaagcagtggatggcaccgttacccttgctcaaagttttaatgaggctcttacaaaaggggaggatgtgcagcacatgtttgatgaggaaatcagtgttgcagaaaacaagaagtttcttcgacgcattggacagttagcagctaaatgcttgcagagggacgtcaaaacgcgtcctgaaatggttgaagttgctaatagtctaaggatgatcaggaaagctatgcagagagaccaggatgaggatgtactgttagcagcataccaatttggagatctaaaaattttcaatgaaactgaaatgaaggaaatgacaaaaaactacagcatggcctttaggaaatcgatgtgtgaatgtctctacaatggagtcatcggcatgaatcgtccaattatagtaagactacttgagacaagttcagaaactggcagagagatatttctgaacactatgagcatattgagtcaaaagaaccacaaaaatgttgtgaatattgttggcttccacatagggaagtccagtttagagtgtgtatatgagtcttgctgtgatctatccaagacaatgcttggctctatatcactatctaacagaaacctttatgacactatctgttccatgaaaaaacttcatcttcaacaacgcctgtcaatagcagtccagtgtgcagagggtctggttcatatccattcattagcagctgaaagtcctgaatcatgtggcaccagcctcttaggaaacttcagatctgccaacatatttttggacgagaactttgtaccaaaaatcttcaatgtgaacttgtcaacatttcttggactttcaggtgcacaaaaacatacagtgttttcaattcattacaatggaccagaaaagtattattcagacccaagggatgtttctggtcaacttcttaacaaaaaatctgatgtatatagctttggagttgttcttttagagctcatcacttggaagactgtgagatacatgtacaatcttagggctcgtgtgcttaccacagacttccttgattcttataggagagaccgtgatgcaattgggatgttcggcaaggtttgtgatgaacatgaagggtactttgttcatgaggccctttccattgccatcgattgcttacaacttgatattcaaatgaggccagaaatggaacatgtacttttccgtctccggatcattgttgctagaagcaaacttgctgctggtagtaacaataaacctagccaacatattggtcgggcccttgttaacaacattgataaacttcacccaactctcatatcaaccatttccatggaggaactgaatgaagcaaccgggaacttcagtaatgatgttcttataggacagggaccatacgccgaatgtttcctgggagttcttaaagatgggcagaatcttgctgtaaaaaggctacgtacttctgaagaaattcaagtagaggtcatgcatgttccgaccattttaagaatgtgttaccatgacaatgttgtgcaatttctaggatgttttcttgaagggggaactcgtgttcttgcttatgagtacgccccaaggggctccttgcatgatattcttcatggtaaaatgggcatcaagggagcccgaccagggccacctctatcgtggttgcagcgtgtgaagattgccgtgacattggtgtttcaatacatgatgcccatcgccgggttcataattgggccgagtactattctgtcagggaacatctagcacctgagttcgcattcagaagaaggtatagcacaaagagcgatgtctacagcttcgggcttgtactgttggagcttttaactggccgctcagtttttcatgttgcgacacaatgtggcccgaggagcgcagttagatgggctaaaccaatgcttagtcaagacaaggtggaacagtgcatagatccaaggcttggaggagggtacctactaaacgatgtcagaaagatggcttctgttgctgcactgtgtttacaagacgagccagagttccggcctgaaatgagcatcgtcgtcgaggctctgagcctgttactgaacagcaagtgaacaagtaaccgtccctgcattggtgaagcacgtggaatgtgatttccttgcatgtcattgcgagctcaagatcacgggtttcgtgaaggcgattggcccccaacagaaagttatgattactgcattcatctaggcttggaacttgtgctttctttgtctgtgcacatgtaatactcaaaattctaaataaagaatatagagagatcttctca

SEQ ID NO: 220347 - DNA, 1095 bp, Zea Mays
gaagatctaggtggccacagtaaataactagaatcagaaactgacagcgaagaatcagatgtgagtggttctgatggggaagatacttcgtggatttcatggttctgtagcttaaagggcaatgaatttttctgtgaggttgatgatgactacatacaagatgatttcaacctctgtgggctaagcaaccaagttccatattatgactatgcacttgatctgatattagatgttgaatcttcccatggtgatatgttgacagaagagcaaaatgaacttattgaatcagctgctgagatgctctatggattgattcatgttcggtatattattacaagtaaagggctgtccgcaatggtaaactctctcgaattgtttctgatggatatgttattatttttatgaatttgtatatcatcatatttgatgtttgtgcagctggataagtacaggaacgttgagttcggcagatgccctcgagtgaattgcagcggccaaccatgccttcctgttgggcaatcggatgttcctcgttcaagtacggtgaagatttactgccctagatgtgaagacatctacactccaagatccaaatatctaagcaacatcgacgggacttactttgggacaacattcccccacttgttcctgatgacatacccgcatttgaagccccagaagccgctgcagcaatacgttcccagggtatttgggttcaaaatccgtaagccatgacaaatttgaaggttgaatgtataaaaggttcaaatagcgccctgttatctgctggccccgcagtgttcacacgacacgtcatcggaatacacctgacccgcggctgacctccctagtctggtttcttgctctggcctgaaattctgattgatgcttgtggtttgtttagcctagtgaatcaatccatatttttttacgatcatacgtattatggctttaatggtttaacaaccatctatatttttgttggcacggttcatattcgttttttactctgattgtttactcgttcgcttactgcttctacactatggattgcatctgtaacaatccaagaacaaatcagttattgtgtgccgc

SEQ ID NO: 220348 - DNA, 2280 bp, Zea Mays
ctagtctacaagattcaccgtgaaccttagcagcacaaagggcaacggccgcctgccgctccaaagcagcccgtggttacgtcagcgcccgcgtactgctcccttcttcctcgttgctccgcccccttttgtcgtcgcgtcctcctctcgaggcctcggcagtcggcacgaggacgcgcgatcccgtcaccgctcacctccttctccaaacactgactccgcttcccgtccccatcccgctgcgcaagatcgggaggggacgaagagaggtcgaccgggaggagatgcaccgagaccgaggcgtctctgcggcagcgatacccggtgaccggaagcggatcggcgagcctatggacagatcgtctccatctacgtcgtgggggttctccggagggcgcgagaaggagcggatcggcgtgggcaagcagccggagatgcctcgctccggcggcggatccaccgccatgtccaagagcaagctctctgacgaatcagaaactgacagcgaagaatcagatgtgagtggttctgatggggaagatacttcgtggatttcatggttctgtagcttaaagggcaatgaatttttctgtgaggttgatgatgactacatacaagatgatttcaacctctgtgggctaagcaaccaagttccatattatgactatgcacttgatctgatattagatgttgaatcttcccatggtgatatgttgacagaagagcaaaatgaacttattgaatcagctgctgagatgctctatggattgattcatgttcggtatattattacaagtaaagggctgtccgcaatgctggataagtacaggaacgttgagttcggcagatgccctcgagtgaattgcagcggccaaccatgccttcctgttgggcaatcggatgttcctcgttcaagtacggtgaagatttactgccctagatgtgaagacatctacactccaagatccaaatatctaagcagtatcctttcatttccgttatagtttgctgtcttactctaatggttgctgaaagtatttaccatcatgtgatttctatgtcgatagataattgacttagcaagctgctgacatgcctccgagtataggacttacttgtgggttttacttacatggcagcacttagagcctgtttgttttgggattataatctgtccagattataaaatctagcttattttgaaccaagtgtttgttcaaaataagttagattatataatctgtgcccttagctagagcctaaaatgtgtttttttataagatacccaaactgatagcctgcaatactattcactttattaaagcaaatgtttttgggttcttgtgcaagttattctgcattgttctgagcctctgacatgttaaactgctacatcgagctaattcatcccaaaaacttttactatgcttcagaacactgtataacctggatgcaaacgaaatgacatactccctccgtcccaaaatataatttgttttagactaaatatacatccattaaccaacctatttatgtagtttgtatgtgcgtttatattcattatcattcattcgaacgtggacaaaaaaaaagagagttagaaagaactatatttttggaatggatggagtatttttttagggaaatatgaaatgccataatacattgtaagaatggtttgtgggctgacagaaaacatgtttgtttttcttctgtaccattgtaagaattgtgtttcacgctttggaacatagtaggccattgtgccctacccttgactgtcatctagacatcgacgggacttactttgggacaacattcccccacttgttcctgatgacatacccgcatttgaagccccagaagccgctgcagcaatacgttcccagggtatttgggttcaaaatccgtaagccatgacaaatttgaaggttgaatgtataaaaggttcaaatagcgccctgttatctgctggccccgcagtgttcacacgacacgtcatcggaatacacctgacccgcggctgacctccctagtctggtttcttgctctggcctgaaattctgattgatgcttgtggtttgtttagcctagtgaatcaatccatatttttttacgatcatacgtattatggctttaatggtttaacaaccatctatatttttgttggcacggttcatattcgttttttactctgattgtttactcgttcgcttactgcttctacactatggattgcatctgtaacaatccaagaacaaatcagttattgtgtgccgc

SEQ ID NO: 220349 - DNA, 7865 bp, Zea Mays
ccgccctcctcctggctcgccagtcgcacctccccgcccccgcccctcggtctctccgcctccgccccgccgcctctctccgcctccttctctgctccgccccgccgccgcaaggatccaacacccgcgcgtcgccttctccgctgtctttcttaccgagattttccaggagttttcttccctttttatggcactgtgcgtttgagaaggtcttcaattgtgctgtctgggccacggaacgacaatgtcacagcttggattagccgcagctgcctcaaaggccttgccactactccctaatcgccagagaagttcagctgggactacattctcatcatcttcattatcgaggcccttaaacagaaggaaaagccgtactcgttcactccgtgatggcggagatggggtatcagatgccaaaaagcacagccagtctgttcgtcaaggtcttgctggcattatcgacctcccaagtgaggcaccttccgaagtggatatttcacatggatctgaggatcctagggggccaacagattcttatcaaatgaatgggattatcaatgaaacacataatggaagacatgcctcagtgtccaaggttgttgaattttgtgcggcactaggtggcaaaacaccaattcacagtatattagtggccaacaatggaatggcagcagcaaaatttatgaggagtgtccggacatgggctaatgatacttttggatctgagaaggcaattcaactcatagctatggcaactccggaagacatgaggataaatgcagaacacattagaattgctgaccaattcgtagaggtgcctggtggaacaaacaataataactacgccaatgttcaactcatagtggagatggcacaaaaactaggtgtttctgctgtttggcctggttggggtcatgcttctgagaatcctgaactgccagatgtattgaccgcaaaagggatcgtttttcttggcccacctgcatcatcaatgaatgctttgggagataaggtcggctcagctctcattgctcaagcagccggggtcccaactcttgcttggagtggatcacatgttgaagttccattagagtgctgcttagacgcgatacctgaggagatgtatagaaaagcttgcgttactaccacagaggaagcagttgcaagttgtcaagtggttggttatcctgccatgattaaggcatcctggggaggtggtggtaaaggaataagaaaggttcataatgatgatgaggttagagcgctgtttaagcaagtacaaggtgaagtccctggctccccaatatttgtcatgaggcttgcatcccagagtcggcatcttgaagttcagttgctttgtgatcaatatggtaatgtagcagcacttcacagtcgtgattgcagtgtgcaacggcgacaccagaagattattgaagaaggtccagttactgttgctcctcgtgagacagttaaagcacttgagcaggcagcaaggaggcttgctaaggctgtgggttatgttggtgctgctactgttgagtatctttacagcatggaaactggagactactattttctggaacttaatccccgactacaggttgagcatccagtcaccgagtggatagctgaagtaaatctgcctgcagctcaagttgctgttggaatgggcatacctctttggcagattccagaaatcagacgtttctatggaatggactatggaggagggtatgacatttggaggaaaacagcagctcttgctacaccatttaattttgatgaagtagattctcaatggccaaagggccattgtgtagcagttagaattactagtgaggacccagatgatggtttcaaacctactggtgggaaagtgaaggagataagttttaaaagcaagcctaatgtttgggcctacttctcagtaaagtctggtggaggcattcatgaatttgctgattctcagttcggacatgtttttgcatatgggctctctagatcagcagcaataacaaacatgactcttgcattaaaagagattcaaattcgtggagaaattcattcaaatgttgattacacagttgacctcttaaatgcttcagactttagagaaaacaagattcatactggttggctcgacaccagaatagctatgcgtgttcaagctgagaggcccccatggtatatttcagtggttgggggtgctttatataaaacagtaaccaccaatgcagccactgtttctgaatatgttagttatctcaccaagggccagattccaccaaagcatatatcccttgtcaattctacagttaatttgaatatagaagggagcaaatacacaattgaaactgtaaggactggacatggtagctacaggttgagaatgaatgattcaacagttgaagcgaatgtacaatctttatgtgatggtggcctcttaatgcagttggatggaaacagccatgtaatttatgcagaagaagaagctggtggtacacggcttcagattgatggaaagacatgtttattgcagaatgaccatgatccatcaaagttattagctgagacaccctgcaaacttcttcgtttcttggttgctgatggtgctcatgttgatgcggatgtaccatacgcggaagttgaggttatgaagatgtgcatgcctctcttgtcacctgcttctggtgtcattcattgtatgatgtctgagggccaggcattgcaggctggtgatcttatagcaaggttggatcttgatgacccttctgctgtgaaaagagctgagccatttgatggaatatttccacaaatggagctccctgttgctgtctctagtcaagtacacaaaagatatgctgcaagtttgaatgctgctcgaatggtccttgcaggatatgagcacaatattaatgaagtcgttcaagatttggtatgctgcctggacaaccctgagcttcctttcctacagtgggatgaacttatgtctgttctagcaacgaggcttccaagaaatctcaagagtgagttagaggataaatacaaggaatacaagttgaatttttaccatggaaaaaacgaggactttccatccaagttgctaagagacatcattgaggaaaatctttcttatggttcagagaaggaaaaggctacaaatgagaggcttgttgagcctcttatgaacctactgaagtcatatgagggtgggagagagagccatgcacattttgttgtcaagtctcttttcgaggagtatcttacagtggaagaactttttagtgatggcattcagtctgacgtgattgaaacattgcggcatcagcacagtaaagacctgcagaaggttgtagacattgtgttgtctcaccagggtgtgaggaacaaagctaagcttgtaacggcacttatggaaaagctggtttatccaaatcctggtggttacagggatctgttagttcgcttttcttccctcaatcataaaagatattataagttggcccttaaagcaagtgaacttcttgaacaaaccaaactaagtgaactccgtgcaagcgttgcaagaagcctttcggatctggggatgcataagggagaaatgagtattaaggataacatggaagatttagtctctgccccattacctgttgaagatgctctgatttctttgtttgattacagtgatcgaactgttcagcagaaagtgattgagacatacatatcacgattgtaccagcctcatcttgtaaaggatagcatccaaatgaaattcaaggaatctggtgctattactttttgggaattttatgaagggcatgttgatactagaaatggacatggggctattattggtgggaagcgatggggtgccatggtcgttctcaaatcacttgaatctgcgtcaacagccattgtggctgcattaaaggattcggcacagttcaacagctctgagggcaacatgatgcacattgcattattgagtgctgaaaatgaaagtaatataagtggaataagtgatgatcaagctcaacataagatggaaaagcttagcaagatactgaaggatactagcgttgcaagtgatctccaagctgctggtttgaaggttataagttgcattgttcaaagagatgaagctcgcatgccaatgcgccacacattcctctggttggatgacaagagttgttatgaagaagagcagattctccggcatgtggagcctcccctctctacacttcttgaattggataagttgaaggtgaaaggatacaatgaaatgaagtatactccttcgcgtgaccgccaatggcatatctacacactaagaaatactgaaaaccccaaaatgttgcatagggtgtttttccgaactattgtcaggcaacccaatgcaggcaacaagtttacatcggctcagatcagcgacgctgaagtaggatgtcccgaagaatctctttcatttacatcaaatagcatcttaagatcattgatgactgctattgaagaattagagcttcatgcaattaggacaggtcattctcacatgtatttgtgcatactgaaagagcaaaagcttcttgacctcattccattttcagggagtacaattgttgatgttggccaagatgaagctaccgcttgttcacttttaaaatcaatggctttgaagatacatgagcttgttggtgcaaggatgcatcatctgtctgtatgccagtgggaggtgaaactcaagttggactgtgatggccctgcaagtggtacctggagagttgtaactacaaatgttactggtcacacctgcaccattgatatataccgagaagtggaggaaatagaatcgcagaagttagtgtaccattcagccacttcgtcagctggaccattgcatggtgttgcactgaataatccatatcaacctttgagtgtgattgatctaaagcgctgctctgctaggaacaacagaacaacatattgctatgattttccgctggcctttgaaactgcactgcagaagtcatggcagtccaatggctctactgtttctgaaggcaatgaaaatagtaaatcctacgtgaaggcaactgagctagtgtttgctgaaaaacatgggtcctggggcactcctataattccgatggaacgccctgctgggctcaacgacattggtatggtcgcttggatcatggagatgtcaacacctgaatttcccaatggcaggcagattattgttgtagcaaatgatatcactttcagagctggatcatttggcccaagggaagatgcattttttgaaactgtcactaacctggcttgcgaaaggaaacttcctcttatatacttggcagcaaactctggtgctaggattggcatagctgatgaagtaaaatcttgcttccgtgttggatggtctgacgaaggcagtcctgaacgagggtttcagtacatctatctgactgaagaagactatgctcgcattagctcttctgttatagcacataagctggagctagatagtggtgaaattaggtggattattgactctgttgtgggcaaggaggatgggcttggtgtcgagaacatacatggaagtgctgctattgccagtgcttattctagggcatatgaggagacatttacacttacatttgtgactgggcggactgtaggaataggagcttatcttgctcgacttggtatacggtgcatacagcgtcttgaccagcctattattttaacagggttttctgccctgaacaagctccttgggcgggaagtgtacagctcccacatgcagcttggtggtcctaagatcatggcgaccaatggtgttgtccacctcactgttccagatgaccttgaaggtgtttccaatatattgaggtggctcagctatgttcctgcaaacattggtggacctcttcctattaccaaacctctggaccctccagacagacctgttgcttacatccctgagaacacatgcgatccacgtgcagctatctgtggtgtagatgacagccaagggaaatggttgggtggtatgtttgacaaagacagctttgtggagacatttgaaggatgggcaaaaacagtggttactggcagagcaaagcttggaggaattcctgtgggcgtcatagctgtggagacacagaccatgatgcagatcatccctgctgatccaggtcagcttgattcccatgagcgatctgtccctcgtgctggacaagtgtggttcccagattctgcaaccaagaccgctcaggcattattagacttcaaccgtgaaggattgcctctgttcatcctggctaattggagaggcttctctggtggacaaagagatctctttgaaggaattcttcaggctgggtcaacaattgtcgagaaccttaggacatataatcagcctgcttttgtgtacattcctatggctggagagcttcgtggaggagcttgggttgtggtcgatagcaaaataaatccagaccgcattgagtgttatgctgaaaggactgccaaaggtaatgttctcgaacctcaagggttaattgaaatcaagttcaggtcagaggaactccaagactgtatgggtaggcttgacccagagttgataaatctgaaagcaaaactccaagatgtaaatcatggaaatggaagtctaccagacatagaagggattcggaagagtatagaagcacgtacgaaacagttgctgcctttatatacccagattgcaatacggtttgctgaattgcatgatacttccctaagaatggcagctaaaggtgtgattaagaaagttgtagactgggaagaatcacgctcgttcttctataaaaggctacggaggaggatcgcagaagatgttcttgcaaaagaaataaggcagatagtcggtgataaatttacgcaccaattagcaatggagctcatcaaggaatggtaccttgcttctcaggccacaacaggaagcactggatgggatgacgatgatgcttttgttgcctggaaggacagtcctgaaaactacaaggggcatatccaaaagcttagggctcaaaaagtgtctcattcgctctctgatcttgctgactccagttcagatctgcaagcattctcgcagggtctttctacgctattagataagatggatccctctcagagagcgaagtttgttcaggaagtcaagaaggtccttgattgatgataccaacacatccaacacaatgtgtgcatgtcacatctttttgttctagtacatacatagaaggatattgcttggtcttgattgatcatgtctgatttaagtcgactattatttcttggaattttcttttggacctggtgctatggttgatggatgtatattggatatgtgcgttctgccaggtgtaagcacaaaggtttagacagaccgagagcaagagcgagtgaacctgttctggttttgcagtggttcagtaaggcagaaagttgttaaaccgtagttctgagatgtattaccagtggcgccatgctgtacttttagggtgtataatgcggatacaaataaacaatttagcggttcattaaagtttgaactcaaataacatgttctttgtaagcatatgtaccgtacctctacgtgaaataaagttgttgaattagcattcgacatcagaatttgttaggactaggttttgtatggtttagggaggtgtaatagtgtcacacccggatttcggggcatcaagacccgggcgcgaacataatcatcaggtataatcatcaggtgtgctgggaccaagtctcacacatatgatgaatcatggcacatgatcgaatgtcacatctttactatataatcgggg

SEQ ID NO: 220350 - DNA, 7868 bp, Zea Mays
ccgccctcctcctggctcgccagtcgcacctccccgcccccgcccctcggtctctccgcctccgccccgccgcctctctccgcctccttctctgctccgccccgccgccgcaaggatccaacacccgcgcgtcgccttctccgctgtctttcttaccgagattttccaggagttttcttccctttttatggcactgtgcgtttgagaaggtcttcaattgtgctgtctgggccacggaacgacaatgtcacagcttggattagccgcagctgcctcaaaggccttgccactactccctaatcgccagagaagttcagctgggactacattctcatcatcttcattatcgaggcccttaaacagaaggaaaagccgtactcgttcactccgtgatggcggagatggggtatcagatgccaaaaagcacagccagtctgttcgtcaaggtcttgctggcattatcgacctcccaagtgaggcaccttccgaagtggatatttcacatggatctgaggatcctagggggccaacagattcttatcaaatgaatgggattatcaatgaaacacataatggaagacatgcctcagtgtccaaggttgttgaattttgtgcggcactaggtggcaaaacaccaattcacagtatattagtggccaacaatggaatggcagcagcaaaatttatgaggagtgtccggacatgggctaatgatacttttggatctgagaaggcaattcaactcatagctatggcaactccggaagacatgaggataaatgcagaacacattagaattgctgaccaattcgtagaggtgcctggtggaacaaacaataataactacgccaatgttcaactcatagtggagatggcacaaaaactaggtgtttctgctgtttggcctggttggggtcatgcttctgagaatcctgaactgccagatgtattgaccgcaaaagggatcgtttttcttggcccacctgcatcatcaatgaatgctttgggagataaggtcggctcagctctcattgctcaagcagccggggtcccaactcttgcttggagtggatcacatgttgaagttccattagagtgctgcttagacgcgatacctgaggagatgtatagaaaagcttgcgttactaccacagaggaagcagttgcaagttgtcaagtggttggttatcctgccatgattaaggcatcctggggaggtggtggtaaaggaataagaaaggttcataatgatgatgaggttagagcgctgtttaagcaagtacaaggtgaagtccctggctccccaatatttgtcatgaggcttgcatcccagagtcggcatcttgaagttcagttgctttgtgatcaatatggtaatgtagcagcacttcacagtcgtgattgcagtgtgcaacggcgacaccagaagattattgaagaaggtccagttactgttgctcctcgtgagacagttaaagcacttgagcaggcagcaaggaggcttgctaaggctgtgggttatgttggtgctgctactgttgagtatctttacagcatggaaactggagactactattttctggaacttaatccccgactacaggttgagcatccagtcaccgagtggatagctgaagtaaatctgcctgcagctcaagttgctgttggaatgggcatacctctttggcagattccagaaatcagacgtttctatggaatggactatggaggagggtatgacatttggaggaaaacagcagctcttgctacaccatttaattttgatgaagtagattctcaatggccaaagggccattgtgtagcagttagaattactagtgaggacccagatgatggtttcaaacctactggtgggaaagtgaaggagataagttttaaaagcaagcctaatgtttgggcctacttctcagtaaagtctggtggaggcattcatgaatttgctgattctcagttcggacatgtttttgcatatgggctctctagatcagcagcaataacaaacatgactcttgcattaaaagagattcaaattcgtggagaaattcattcaaatgttgattacacagttgacctcttaaatgcttcagactttagagaaaacaagattcatactggttggctcgacaccagaatagctatgcgtgttcaagctgagaggcccccatggtatatttcagtggttgggggtgctttatataaaacagtaaccaccaatgcagccactgtttctgaatatgttagttatctcaccaagggccagattccaccaaagcatatatcccttgtcaattctacagttaatttgaatatagaagggagcaaatacacaattgaaactgtaaggactggacatggtagctacaggttgagaatgaatgattcaacagttgaagcgaatgtacaatctttatgtgatggtggcctcttaatgcagttggatggaaacagccatgtaatttatgcagaagaagaagctggtggtacacggcttcagattgatggaaagacatgtttattgcagaatgaccatgatccatcaaagttattagctgagacaccctgcaaacttcttcgtttcttggttgctgatggtgctcatgttgatgcggatgtaccatacgcggaagttgaggttatgaagatgtgcatgcctctcttgtcacctgcttctggtgtcattcattgtatgatgtctgagggccaggcattgcaggctggtgatcttatagcaaggttggatcttgatgacccttctgctgtgaaaagagctgagccatttgatggaatatttccacaaatggagctccctgttgctgtctctagtcaagtacacaaaagatatgctgcaagtttgaatgctgctcgaatggtccttgcaggatatgagcacaatattaatgaagtcgttcaagatttggtatgctgcctggacaaccctgagcttcctttcctacagtgggatgaacttatgtctgttctagcaacgaggcttccaagaaatctcaagagtgagttagaggataaatacaaggaatacaagttgaatttttaccatggaaaaaacgaggactttccatccaagttgctaagagacatcattgaggaaaatctttcttatggttcagagaaggaaaaggctacaaatgagaggcttgttgagcctcttatgaacctactgaagtcatatgagggtgggagagagagccatgcacattttgttgtcaagtctcttttcgaggagtatcttacagtggaagaactttttagtgatggcattcagtctgacgtgattgaaacattgcggcatcagcacagtaaagacctgcagaaggttgtagacattgtgttgtctcaccagggtgtgaggaacaaagctaagcttgtaacggcacttatggaaaagctggtttatccaaatcctggtggttacagggatctgttagttcgcttttcttccctcaatcataaaagatattataagttggcccttaaagcaagtgaacttcttgaacaaaccaaactaagtgaactccgtgcaagcgttgcaagaagcctttcggatctggggatgcataagggagaaatgagtattaaggataacatggaagatttagtctctgccccattacctgttgaagatgctctgatttctttgtttgattacagtgatcgaactgttcagcagaaagtgattgagacatacatatcacgattgtaccagcctcatcttgtaaaggatagcatccaaatgaaattcaaggaatctggtgctattactttttgggaattttatgaagggcatgttgatactagaaatggacatggggctattattggtgggaagcgatggggtgccatggtcgttctcaaatcacttgaatctgcgtcaacagccattgtggctgcattaaaggattcggcacagttcaacagctctgagggcaacatgatgcacattgcattattgagtgctgaaaatgaaagtaatataagtggaataagcagtgatgatcaagctcaacataagatggaaaagcttagcaagatactgaaggatactagcgttgcaagtgatctccaagctgctggtttgaaggttataagttgcattgttcaaagagatgaagctcgcatgccaatgcgccacacattcctctggttggatgacaagagttgttatgaagaagagcagattctccggcatgtggagcctcccctctctacacttcttgaattggataagttgaaggtgaaaggatacaatgaaatgaagtatactccttcgcgtgaccgccaatggcatatctacacactaagaaatactgaaaaccccaaaatgttgcatagggtgtttttccgaactattgtcaggcaacccaatgcaggcaacaagtttacatcggctcagatcagcgacgctgaagtaggatgtcccgaagaatctctttcatttacatcaaatagcatcttaagatcattgatgactgctattgaagaattagagcttcatgcaattaggacaggtcattctcacatgtatttgtgcatactgaaagagcaaaagcttcttgacctcattccattttcagggagtacaattgttgatgttggccaagatgaagctaccgcttgttcacttttaaaatcaatggctttgaagatacatgagcttgttggtgcaaggatgcatcatctgtctgtatgccagtgggaggtgaaactcaagttggactgtgatggccctgcaagtggtacctggagagttgtaactacaaatgttactggtcacacctgcaccattgatatataccgagaagtggaggaaatagaatcgcagaagttagtgtaccattcagccacttcgtcagctggaccattgcatggtgttgcactgaataatccatatcaacctttgagtgtgattgatctaaagcgctgctctgctaggaacaacagaacaacatattgctatgattttccgctggcctttgaaactgcactgcagaagtcatggcagtccaatggctctactgtttctgaaggcaatgaaaatagtaaatcctacgtgaaggcaactgagctagtgtttgctgaaaaacatgggtcctggggcactcctataattccgatggaacgccctgctgggctcaacgacattggtatggtcgcttggatcatggagatgtcaacacctgaatttcccaatggcaggcagattattgttgtagcaaatgatatcactttcagagctggatcatttggcccaagggaagatgcattttttgaaactgtcactaacctggcttgcgaaaggaaacttcctcttatatacttggcagcaaactctggtgctaggattggcatagctgatgaagtaaaatcttgcttccgtgttggatggtctgacgaaggcagtcctgaacgagggtttcagtacatctatctgactgaagaagactatgctcgcattagctcttctgttatagcacataagctggagctagatagtggtgaaattaggtggattattgactctgttgtgggcaaggaggatgggcttggtgtcgagaacatacatggaagtgctgctattgccagtgcttattctagggcatatgaggagacatttacacttacatttgtgactgggcggactgtaggaataggagcttatcttgctcgacttggtatacggtgcatacagcgtcttgaccagcctattattttaacagggttttctgccctgaacaagctccttgggcgggaagtgtacagctcccacatgcagcttggtggtcctaagatcatggcgaccaatggtgttgtccacctcactgttccagatgaccttgaaggtgtttccaatatattgaggtggctcagctatgttcctgcaaacattggtggacctcttcctattaccaaacctctggaccctccagacagacctgttgcttacatccctgagaacacatgcgatccacgtgcagctatctgtggtgtagatgacagccaagggaaatggttgggtggtatgtttgacaaagacagctttgtggagacatttgaaggatgggcaaaaacagtggttactggcagagcaaagcttggaggaattcctgtgggcgtcatagctgtggagacacagaccatgatgcagatcatccctgctgatccaggtcagcttgattcccatgagcgatctgtccctcgtgctggacaagtgtggttcccagattctgcaaccaagaccgctcaggcattattagacttcaaccgtgaaggattgcctctgttcatcctggctaattggagaggcttctctggtggacaaagagatctctttgaaggaattcttcaggctgggtcaacaattgtcgagaaccttaggacatataatcagcctgcttttgtgtacattcctatggctggagagcttcgtggaggagcttgggttgtggtcgatagcaaaataaatccagaccgcattgagtgttatgctgaaaggactgccaaaggtaatgttctcgaacctcaagggttaattgaaatcaagttcaggtcagaggaactccaagactgtatgggtaggcttgacccagagttgataaatctgaaagcaaaactccaagatgtaaatcatggaaatggaagtctaccagacatagaagggattcggaagagtatagaagcacgtacgaaacagttgctgcctttatatacccagattgcaatacggtttgctgaattgcatgatacttccctaagaatggcagctaaaggtgtgattaagaaagttgtagactgggaagaatcacgctcgttcttctataaaaggctacggaggaggatcgcagaagatgttcttgcaaaagaaataaggcagatagtcggtgataaatttacgcaccaattagcaatggagctcatcaaggaatggtaccttgcttctcaggccacaacaggaagcactggatgggatgacgatgatgcttttgttgcctggaaggacagtcctgaaaactacaaggggcatatccaaaagcttagggctcaaaaagtgtctcattcgctctctgatcttgctgactccagttcagatctgcaagcattctcgcagggtctttctacgctattagataagatggatccctctcagagagcgaagtttgttcaggaagtcaagaaggtccttgattgatgataccaacacatccaacacaatgtgtgcatgtcacatctttttgttctagtacatacatagaaggatattgcttggtcttgattgatcatgtctgatttaagtcgactattatttcttggaattttcttttggacctggtgctatggttgatggatgtatattggatatgtgcgttctgccaggtgtaagcacaaaggtttagacagaccgagagcaagagcgagtgaacctgttctggttttgcagtggttcagtaaggcagaaagttgttaaaccgtagttctgagatgtattaccagtggcgccatgctgtacttttagggtgtataatgcggatacaaataaacaatttagcggttcattaaagtttgaactcaaataacatgttctttgtaagcatatgtaccgtacctctacgtgaaataaagttgttgaattagcattcgacatcagaatttgttaggactaggttttgtatggtttagggaggtgtaatagtgtcacacccggatttcggggcatcaagacccgggcgcgaacataatcatcaggtataatcatcaggtgtgctgggaccaagtctcacacatatgatgaatcatggcacatgatcgaatgtcacatctttactatataatcgggg

SEQ ID NO: 220351 - DNA, 7806 bp, Zea Mays
ccccgcccctcggtctctccgcctccgccccgccgcctctctccgcctccttctctgctccgccccgccgccgcaaggatccaacacccgcgcgtcgccttctccgctgtctttcttaccgagattttccaggagttttcttccctttttatggcactgtgcgtttgagaaggtcttcaattgtgctgtctgggccacggaacgacaatgtcacagcttggattagccgcagctgcctcaaaggccttgccactactccctaatcgccagagaagttcagctgggactacattctcatcatcttcattatcgaggcccttaaacagaaggaaaagccgtactcgttcactccgtgatggcggagatggggtatcagatgccaaaaagcacagccagtctgttcgtcaaggtcttgctggcattatcgacctcccaagtgaggcaccttccgaagtggatatttcacatggatctgaggatcctagggggccaacagattcttatcaaatgaatgggattatcaatgaaacacataatggaagacatgcctcagtgtccaaggttgttgaattttgtgcggcactaggtggcaaaacaccaattcacagtatattagtggccaacaatggaatggcagcagcaaaatttatgaggagtgtccggacatgggctaatgatacttttggatctgagaaggcaattcaactcatagctatggcaactccggaagacatgaggataaatgcagaacacattagaattgctgaccaattcgtagaggtgcctggtggaacaaacaataataactacgccaatgttcaactcatagtggagatggcacaaaaactaggtgtttctgctgtttggcctggttggggtcatgcttctgagaatcctgaactgccagatgtattgaccgcaaaagggatcgtttttcttggcccacctgcatcatcaatgaatgctttgggagataaggtcggctcagctctcattgctcaagcagccggggtcccaactcttgcttggagtggatcacatgttgaagttccattagagtgctgcttagacgcgatacctgaggagatgtatagaaaagcttgcgttactaccacagaggaagcagttgcaagttgtcaagtggttggttatcctgccatgattaaggcatcctggggaggtggtggtaaaggaataagaaaggttcataatgatgatgaggttagagcgctgtttaagcaagtacaaggtgaagtccctggctccccaatatttgtcatgaggcttgcatcccagagtcggcatcttgaagttcagttgctttgtgatcaatatggtaatgtagcagcacttcacagtcgtgattgcagtgtgcaacggcgacaccagaagattattgaagaaggtccagttactgttgctcctcgtgagacagttaaagcacttgagcaggcagcaaggaggcttgctaaggctgtgggttatgttggtgctgctactgttgagtatctttacagcatggaaactggagactactattttctggaacttaatccccgactacaggttgagcatccagtcaccgagtggatagctgaagtaaatctgcctgcagctcaagttgctgttggaatgggcatacctctttggcagattccagaaatcagacgtttctatggaatggactatggaggagggtatgacatttggaggaaaacagcagctcttgctacaccatttaattttgatgaagtagattctcaatggccaaagggccattgtgtagcagttagaattactagtgaggacccagatgatggtttcaaacctactggtgggaaagtgaaggagataagttttaaaagcaagcctaatgtttgggcctacttctcagtaaagtctggtggaggcattcatgaatttgctgattctcagttcggacatgtttttgcatatgggctctctagatcagcagcaataacaaacatgactcttgcattaaaagagattcaaattcgtggagaaattcattcaaatgttgattacacagttgacctcttaaatgcttcagactttagagaaaacaagattcatactggttggctcgacaccagaatagctatgcgtgttcaagctgagaggcccccatggtatatttcagtggttgggggtgctttatataaaacagtaaccaccaatgcagccactgtttctgaatatgttagttatctcaccaagggccagattccaccaaagttaatttgaatatagaagggagcaaatacacaattgaaactgtaaggactggacatggtagctacaggttgagaatgaatgattcaacagttgaagcgaatgtacaatctttatgtgatggtggcctcttaatgcagttggatggaaacagccatgtaatttatgcagaagaagaagctggtggtacacggcttcagattgatggaaagacatgtttattgcagaatgaccatgatccatcaaagttattagctgagacaccctgcaaacttcttcgtttcttggttgctgatggtgctcatgttgatgcggatgtaccatacgcggaagttgaggttatgaagatgtgcatgcctctcttgtcacctgcttctggtgtcattcattgtatgatgtctgagggccaggcattgcaggctggtgatcttatagcaaggttggatcttgatgacccttctgctgtgaaaagagctgagccatttgatggaatatttccacaaatggagctccctgttgctgtctctagtcaagtacacaaaagatatgctgcaagtttgaatgctgctcgaatggtccttgcaggatatgagcacaatattaatgaagtcgttcaagatttggtatgctgcctggacaaccctgagcttcctttcctacagtgggatgaacttatgtctgttctagcaacgaggcttccaagaaatctcaagagtgagttagaggataaatacaaggaatacaagttgaatttttaccatggaaaaaacgaggactttccatccaagttgctaagagacatcattgaggaaaatctttcttatggttcagagaaggaaaaggctacaaatgagaggcttgttgagcctcttatgaacctactgaagtcatatgagggtgggagagagagccatgcacattttgttgtcaagtctcttttcgaggagtatcttacagtggaagaactttttagtgatggcattcagtctgacgtgattgaaacattgcggcatcagcacagtaaagacctgcagaaggttgtagacattgtgttgtctcaccagggtgtgaggaacaaagctaagcttgtaacggcacttatggaaaagctggtttatccaaatcctggtggttacagggatctgttagttcgcttttcttccctcaatcataaaagatattataagttggcccttaaagcaagtgaacttcttgaacaaaccaaactaagtgaactccgtgcaagcgttgcaagaagcctttcggatctggggatgcataagggagaaatgagtattaaggataacatggaagatttagtctctgccccattacctgttgaagatgctctgatttctttgtttgattacagtgatcgaactgttcagcagaaagtgattgagacatacatatcacgattgtaccagcctcatcttgtaaaggatagcatccaaatgaaattcaaggaatctggtgctattactttttgggaattttatgaagggcatgttgatactagaaatggacatggggctattattggtgggaagcgatggggtgccatggtcgttctcaaatcacttgaatctgcgtcaacagccattgtggctgcattaaaggattcggcacagttcaacagctctgagggcaacatgatgcacattgcattattgagtgctgaaaatgaaagtaatataagtggaataagcagtgatgatcaagctcaacataagatggaaaagcttagcaagatactgaaggatactagcgttgcaagtgatctccaagctgctggtttgaaggttataagttgcattgttcaaagagatgaagctcgcatgccaatgcgccacacattcctctggttggatgacaagagttgttatgaagaagagcagattctccggcatgtggagcctcccctctctacacttcttgaattggataagttgaaggtgaaaggatacaatgaaatgaagtatactccttcgcgtgaccgccaatggcatatctacacactaagaaatactgaaaaccccaaaatgttgcatagggtgtttttccgaactattgtcaggcaacccaatgcaggcaacaagtttacatcggctcagatcagcgacgctgaagtaggatgtcccgaagaatctctttcatttacatcaaatagcatcttaagatcattgatgactgctattgaagaattagagcttcatgcaattaggacaggtcattctcacatgtatttgtgcatactgaaagagcaaaagcttcttgacctcattccattttcagggagtacaattgttgatgttggccaagatgaagctaccgcttgttcacttttaaaatcaatggctttgaagatacatgagcttgttggtgcaaggatgcatcatctgtctgtatgccagtgggaggtgaaactcaagttggactgtgatggccctgcaagtggtacctggagagttgtaactacaaatgttactggtcacacctgcaccattgatatataccgagaagtggaggaaatagaatcgcagaagttagtgtaccattcagccacttcgtcagctggaccattgcatggtgttgcactgaataatccatatcaacctttgagtgtgattgatctaaagcgctgctctgctaggaacaacagaacaacatattgctatgattttccgctggcctttgaaactgcactgcagaagtcatggcagtccaatggctctactgtttctgaaggcaatgaaaatagtaaatcctacgtgaaggcaactgagctagtgtttgctgaaaaacatgggtcctggggcactcctataattccgatggaacgccctgctgggctcaacgacattggtatggtcgcttggatcatggagatgtcaacacctgaatttcccaatggcaggcagattattgttgtagcaaatgatatcactttcagagctggatcatttggcccaagggaagatgcattttttgaaactgtcactaacctggcttgcgaaaggaaacttcctcttatatacttggcagcaaactctggtgctaggattggcatagctgatgaagtaaaatcttgcttccgtgttggatggtctgacgaaggcagtcctgaacgagggtttcagtacatctatctgactgaagaagactatgctcgcattagctcttctgttatagcacataagctggagctagatagtggtgaaattaggtggattattgactctgttgtgggcaaggaggatgggcttggtgtcgagaacatacatggaagtgctgctattgccagtgcttattctagggcatatgaggagacatttacacttacatttgtgactgggcggactgtaggaataggagcttatcttgctcgacttggtatacggtgcatacagcgtcttgaccagcctattattttaacagggttttctgccctgaacaagctccttgggcgggaagtgtacagctcccacatgcagcttggtggtcctaagatcatggcgaccaatggtgttgtccacctcactgttccagatgaccttgaaggtgtttccaatatattgaggtggctcagctatgttcctgcaaacattggtggacctcttcctattaccaaacctctggaccctccagacagacctgttgcttacatccctgagaacacatgcgatccacgtgcagctatctgtggtgtagatgacagccaagggaaatggttgggtggtatgtttgacaaagacagctttgtggagacatttgaaggatgggcaaaaacagtggttactggcagagcaaagcttggaggaattcctgtgggcgtcatagctgtggagacacagaccatgatgcagatcatccctgctgatccaggtcagcttgattcccatgagcgatctgtccctcgtgctggacaagtgtggttcccagattctgcaaccaagaccgctcaggcattattagacttcaaccgtgaaggattgcctctgttcatcctggctaattggagaggcttctctggtggacaaagagatctctttgaaggaattcttcaggctgggtcaacaattgtcgagaaccttaggacatataatcagcctgcttttgtgtacattcctatggctggagagcttcgtggaggagcttgggttgtggtcgatagcaaaataaatccagaccgcattgagtgttatgctgaaaggactgccaaaggtaatgttctcgaacctcaagggttaattgaaatcaagttcaggtcagaggaactccaagactgtatgggtaggcttgacccagagttgataaatctgaaagcaaaactccaagatgtaaatcatggaaatggaagtctaccagacatagaagggattcggaagagtatagaagcacgtacgaaacagttgctgcctttatatacccagattgcaatacggtttgctgaattgcatgatacttccctaagaatggcagctaaaggtgtgattaagaaagttgtagactgggaagaatcacgctcgttcttctataaaaggctacggaggaggatcgcagaagatgttcttgcaaaagaaataaggcagatagtcggtgataaatttacgcaccaattagcaatggagctcatcaaggaatggtaccttgcttctcaggccacaacaggaagcactggatgggatgacgatgatgcttttgttgcctggaaggacagtcctgaaaactacaaggggcatatccaaaagcttagggctcaaaaagtgtctcattcgctctctgatcttgctgactccagttcagatctgcaagcattctcgcagggtctttctacgctattagataagatggatccctctcagagagcgaagtttgttcaggaagtcaagaaggtccttgattgatgataccaacacatccaacacaatgtgtgcatgtcacatctttttgttctagtacatacatagaaggatattgcttggtcttgattgatcatgtctgatttaagtcgactattatttcttggaattttcttttggacctggtgctatggttgatggatgtatattggatatgtgcgttctgccaggtgtaagcacaaaggtttagacagaccgagagcaagagcgagtgaacctgttctggttttgcagtggttcagtaaggcagaaagttgttaaaccgtagttctgagatgtattaccagtggcgccatgctgtacttttagggtgtataatgcggatacaaataaacaatttagcggttcattaaagtttgaactcaaataacatgttctttgtaagcatatgtaccgtacctctacgtgaaataaagttgttgaattagcattcgacatcagaatttgttaggactaggttttgtatggtttagggaggtgtaatagtgtcacacccggatttcggggcatcaagacccgggcgcgaacataatcatcaggtataatcatcaggtgtgctgggaccaagtctcacacatatgatgaatcatggcacatgatcgaatgtcacatctttactatataatcgggg

SEQ ID NO: 220352 - DNA, 1554 bp, Zea Mays
gacgccggaaagacggtgaagcaaaacattcggaatatgcccagctcaccgcgtctataaactcacccgacccgtagggcacgcacaaacatgtgtcactcaccagcgctttccgtcccgtactcccgtgtaccctgtcccgtcctcctagctcgcattccgatttccgagttccagccagcgagcgagccaaccaactgaaccaaccaaccaccgctccttcttccttccttccttccccagttcccctcgtctcaccagtcaccaaggttccgagagcagagcgagataaaaaaaaaggtaatccgacggaaacgacaagggcgcggcgagggcggggacagggtcgggaaggccctgggcgcgggggcgccaagcgcatggcatcgtcgagggtgatgccgtcctcctcgccgtcgcacacggcctctgatctcgcgcgcctagcgcaggccgccagcaggcccggcggcgggggcagcgggctgggctccatgaacgtggaggagctcctccgcggcatctacagcgacatgcccaccccggcgccgcccgcgtcggagcccgaacgcccgaggtcgccggccccggcgccggaggtcgccacgcggaggacggcggaggaggtgtggaaggagatcaccggcggaggtggcagtggggaacccgtgccccccgtggcggctcaggctgccgtccccgctggtggtggtggcgccggcggcccggagatgacgctggaggacttcctggccagggaggagggcgcggtgaaggaggatggggttagggtttcgggcccctctgcgccggccatggggttcctgggcggagcggagggcgtgggtgtgcctggcggcggaggcgggaggggaaggaagcggcagctcatggatccagtggatcgcgccgcgatgcagcgacagaaacgaatgatcaaaaaccgcgagtctgctgcccggtcacgggagaggaagcaggcttatatcgccgagctagaatcgctggtaacgcacctcgaggaggagaatgccgagttgttgagagaacaggaagagcggcaccagaagcggcttaaagagctcttggaacgggtgacgccagtcattctgaggaaaaaaccatcaggagatcttagaagaacgaactcaatgcagtggtagattggagccaagctcagtcgccgtctctttacagttataacatagaatttgcccctgtatgtcatttttctatttatatatgcgccaactaagttgtagtatcttagctgaaatagcatgggcaattagccgacacaaaggttaaacgaaatcatattatgtaggagtgctcatgaccaagaaaggttgctgttcctgcctgctcgtgtgttcattctgcctggtttatttttaagattttgttgtcaacatggcagcgtctcggggcgcctacctgtggcttacctgcgtaaactgaaacatcgtaatgccagggagcttccagaggcgtgtaccttgttggtgcttgaatgatcaaaatattcaagataaagcgtgaacttgacgtgat

SEQ ID NO: 220353 - DNA, 1529 bp, Zea Mays
gtgaagcaaaacattcggaatatgcccagctcaccgcgtctataaactcacccgacccgtagggcacgcacaaacatgtgtcactcaccagcgctttccgtcccgtactcccgtgtaccctgtcccgtcctcctagctcgcattccgatttccgagttccagccagcgagcgagccaaccaactgaaccaaccaaccaccgctccttcttccttccttccttccccagttcccctcgtctcaccagtcaccaaggttccgagagcagagcgagataaaaaaaaaggtaatccgacggaaacgacaagggcgcggcgagggcggggacagggtcgggaaggccctgggcgcgggggcgccaagcgcatggcatcgtcgagggtgatgccgtcctcctcgccgtcgcacacggcctctgatctcgcgcgcctagcgcaggccgccagcaggcccggcggcgggggcagcgggctgggctccatgaacgtggaggagctcctccgcggcatctacagcgacatgcccaccccggcgccgcccgcgtcggagcccgaacgcccgaggtcgccggccccggcgccggaggtcgccacgcggaggacggcggaggaggtgtggaaggagatcaccggcggaggtggcagtggggaacccgtgccccccgtggcggctcaggctgccgtccccgctggtggtggtggcgccggcggcccggagatgacgctggaggacttcctggccagggaggagggcgcggtgaaggaggatggggttagggtttcgggcccctctgcgccggccatggggttcctgggcggagcggagggcgtgggtgtgcctggcggcggaggcgggaggggaaggaagcggcagctcatggatccagtggatcgcgccgcgatgcagcgacagaaacgaatgatcaaaaaccgcgagtctgctgcccggtcacgggagaggaagcaggcttatatcgccgagctagaatcgctggtaacgcacctcgaggaggagaatgccgagttgttgagagaacagataccagtgcctcatgaatgttcatctttatcgatatgcaaacatcttaccttctaaatgatgttgccattcccttgtcataagcttttgatgttcgtgtatttcaggaagagcggcaccagaagcggcttaaagagctcttggaacgggtgacgccagtcattctgaggaaaaaaccatcaggagatcttagaagaacgaactcaatgcagtggtagattggagccaagctcagtcgccgtctctttacagttataacatagaatttgcccctgtaggtttggcaaggaagtagacaatcgtactccaataagcaggcctactttaagtgaaactgaaacgtcataatgctacgcagcgtctcggggcgcctacctgtggcttacctgcgtaaactgaaacatcgtaatgccagggagcttccagaggcgtgtaccttgttggtgcttgaatgatcaaaatattcaagataaagcgtgaacttgacgtgat

SEQ ID NO: 220354 - DNA, 1398 bp, Zea Mays
ctttatcaattatctatcccaaggttgaccttgatccttatgggtcaccagctgcattccttgattcagcggttcaatgtgtagcagatgggggcatcttgatgtgctcagctacagacatggcagtgcttgctggtggaaatgcagaagtttgtttttctaagtatggttcttatccattaagaggtaaacactgccatgaaatggcgctgaggattcttcttgcctgcattgagtcacatgcaatccgtcacaagcgctacatagttcctataatatcagtacacatggatttctacattagggtttttgtgcgaatcttcacctcggctagcacagtaaaaagctcaccactcaaattggcacatgtttaccaatgcactgggtgcaattcattttacctgcaaaatattggaagaattcattcaaaggtagtctttcttatcttctttcattgtcttgcatgttcttaatgttacaataatttgatccaggataaggaaaacatagctgtaccaaattttcgccttactctgcctgaagtatgttctgaatgtggccatcaatttgttatggggggacctctttggagttatccaatacatgacaaggtatgggctgcttcaatattatcagatattcatgctatgagagaagcatatccagcttatccaaaaatttcggctatactatcttcagtctcagaggaattgctggaggcacctttatttgtgagtcttcacaatctgtgtgcaatactgaagtgcactactccaaccatggttatgttacaatgtgctatcagaaatgctgggtatcaagtatcaggaagtcatgtggacccgctagctcttaaaacagatgccccgatgtcagtgatctgggacatcatgcgatgctgggtcaagcttcacccagttaaacatcgacctggaaatcatcctggcaatgtgatactttcccaagagcctaaatttcaggcaaaattttccagagtactgggggcctcggtcacccggaagcgcgcaagattcatgccaaatcctgagaagtattggggtcctgggacgaaggctggcaggaatccgagaacatttcagatggataaccgtaactgacgcgatctccgcgccagagcccagaagacggataatttagtttattgctttgtcaattgatatagtttgtgcgattgcaatatttgaatgatgtttgtgagtttgttccttaagttcacccttcctaaaattttaggttgagtccaccggtgaccggcagcatggctccaacactagacaggacatacgttaggtatttttggtcgaagatcgttatggacagtcttcattatcatcaaagatacatctatgattttttgaagagaaaaacgacttctac

SEQ ID NO: 220355 - DNA, 2065 bp, Zea Mays
caccaaactcagacccacacactgaaattcccctaaaatcactacggaccacttcaccggcggctcgccgtactccgccgccgtaaaccgatgaccctttcattaggcttgttgcggtcaggcctcctcaaccggcgcatcaaccaaccggcgaatcaagtccttcgcctccacctcgcattctcctccgcctcgccgtccccgtccgacccctccgccgccgccgccggcccccagaccaccatcagggaagggaaagtggaaatatttttggacgagtccaactcagtcttctacaacaagacccagagatatttccattgctgtattgagatcatttattttgaaaagacatgaagaatatgctgcccgatcaagaaaagcaggaccaggagacactacattgagtgcgcaagctaagtataaagagccgaaagttcttgaggcattagctgcatcagggctaagagccattaggtatgctgttgaggtagatggaattggtgaagttactgctgttgacaataatgaagccgctgtagaagcctgcaagaaaaatatacagcacaatggcagtcttgcatcttcgaaggtggtaccacatcacgctgatgcacgtgtctacatgctcacacacccaaaagaatttgatgtggttgaccttgatccttatgggtcaccagctgcattccttgattcagcggttcaatgtgtagcagatgggggcatcttgatgtgctcagctacagacatggcagtgcttgctggtggaaatgcagaagtttgtttttctaagtatggttcttatccattaagaggtaaacactgccatgaaatggcgctgaggattcttcttgcctgcattgagtcacatgcaatccgtcacaagcgctacatagttcctataatatcagtacacatggatttctacattagggtttttgtgcgaatcttcacgttgtctcctgcttccatctttttcctgatacattcttttccttatggttaagatatgctattttctctatgatggtacttttttggtatctaataatatttctttgccaatgttcctctattatattcagctcggctagcacagtaaaaagctcaccactcaaattggcacatgtttaccaatgcactgggtgcaattcattttacctgcaaaatattggaagaattcattcaaaggtagtctttcttatcttctttcattgtcttgcatgttcttaatgttacaataatttgatccaggataaggaaaacatagctgtaccaaattttcgccttactctgcctgaagtatgttctgaatgtggccatcaatttgttatggggggacctctttggagttatccaatacatgacaaggaattgctggaggcacctttatttgtgagtcttcacaatctgtgtgcaatactgaagtgcactactccaaccatggttatgttacaatgtgctatcagaaatgctgggtatcaagtatcaggaagtcatgtggacccgctagctcttaaaacagatgccccgatgtcagtgatctgggacatcatgcgatgctgggtcaagcttcacccagttaaacatcgacctggaaatcatcctggcaatgtgatactttcccaagagcctaaatttcaggcaaaattttccagagtactgggggcctcggtcacccggaagcgcgcaagattcatgccaaatcctgagaagtattggggtcctgggacgaaggctggcaggaatccgagaacatttcagatggataaccgtaactgacgcgatctccgcgccagagcccagaagacggataatttagtttattgctttgtcaattgatatagtttgtgcgattgcaatatttgaatgatgtttgtgagtttgttccttaagttcacccttcctaaaattttaggttgagtccaccggtgaccggcagcatggctccaacactagacaggacatacgttaggtatttttggtcgaagatcgttatggacagtcttcattatcatcaaagatacatctatgattttttgaagagaaaaacgacttctac

SEQ ID NO: 220356 - DNA, 1842 bp, Zea Mays
caccaaactcagacccacacactgaaattcccctaaaatcactacggaccacttcaccggcggctcgccgtactccgccgccgtaaaccgatgaccctttcattaggcttgttgcggtcaggcctcctcaaccggcgcatcaaccaaccggcgaatcaagtccttcgcctccacctcgcattctcctccgcctcgccgtccccgtccgacccctccgccgccgccgccggcccccagaccaccatcagggaagggaaagtggaaatatttttggacgagtccaactcagtcttctacaacaagacccagagatatttccattgctgtattgagatcatttattttgaaaagacatgaagaatatgctgcccgatcaagaaaaggaccaggagacactacattgagtgcgcaagctaagtataaagagccgaaagttcttgaggcattagctgcatcagggctaagagccattaggtatgctgttgaggtagatggaattggtgaagttactgctgttgacaataatgaaggttgaccttgatccttatgggtcaccagctgcattccttgattcagcggttcaatgtgtagcagatgggggcatcttgatgtgctcagctacagacatggcagtgcttgctggtggaaatgcagaagtttgtttttctaagtatggttcttatccattaagaggtaaacactgccatgaaatggcgctgaggattcttcttgcctgcattgagtcacatgcaatccgtcacaagcgctacatagttcctataatatcagtacacatggatttctacattagggtttttgtgcgaatcttcacctcggctagcacagtaaaaagctcaccactcaaattggcacatgtttaccaatgcactgggtgcaattcattttacctgcaaaatattggaagaattcattcaaaggataaggaaaacatagctgtaccaaattttcgccttactctgcctgaagtatgttctgaatgtggccatcaatttgttatggggggacctctttggagttatccaatacatgacaaggtatgggctgcttcaatattatcagatattcatgctatgagagaagcatatccagcttatccaaaaatttcggctatactatcttcagtctcagaggaattgctggaggcacctttatttgtgagtcttcacaatctgtgtgcaatactgaagtgcactactccaaccatggttatgttacaatgtgctatcagaaatgctgggtatcaagtatcaggaagtcatgtggacccgctagctcttaaaacagatgccccgatgtcagtgatctgggacatcatgcgatgctgggtcaagcttcacccagttaaacatcgacctggaaatcatcctggcaatgtgatactttcccaagagcctaaatttcaggcaaaattttccagagtactgggggcctcggtcacccggaagcgcgcaagattcatgccaaatcctgagaagtattggggtcctgggacgaaggctggcaggaatccgagaacatttcagatggataaccgtaactgacgcgatctccgcgccagagcccagaagacggataatttagtttattgctttgtcaattgatatagtttgtgcgattgcaatatttgaatgatgtttgtgagtttgttccttaagttcacccttcctaaaattttaggttgagtccaccggtgaccggcagcatggctccaacactagacaggacatacgttaggtatttttggtcgaagatcgttatggacagtcttcattatcatcaaagatacatctatgattttttgaagagaaaaacgacttctac

SEQ ID NO: 220357 - DNA, 1975 bp, Zea Mays
caccaaactcagacccacacactgaaattcccctaaaatcactacggaccacttcaccggcggctcgccgtactccgccgccgtaaaccgatgaccctttcattaggcttgttgcggtcaggcctcctcaaccggcgcatcaaccaaccggcgaatcaagtccttcgcctccacctcgcattctcctccgcctcgccgtccccgtccgacccctccgccgccgccgccggcccccagaccaccatcagggaagggaaagtggaaatatttttggacgagtccaactcagtcttctacaacaagacccaggttaacaatagagatatttccattgctgtattgagatcatttattttgaaaagacatgaagaatatgctgcccgatcaagaaaaggaccaggagacactacattgagtgcgcaagctaagtataaagagccgaaagttcttgaggcattagctgcatcagggctaagagccattaggtatgctgttgaggtagatggaattggtgaagttactgctgttgacaataatgaagccgctgtagaagcctgcaagaaaaatatacagcacaatggcagtcttgcatcttcgaaggtggtaccacatcacgctgatgcacgtgtctacatgctcacacacccaaaagaatttgatgtggttgaccttgatccttatgggtcaccagctgcattccttgattcagcggttcaatgtgtagcagatgggggcatcttgatgtgctcagctacagacatggcagtgcttgctggtggaaatgcagaagtttgtttttctaagtatggttcttatccattaagaggtaaacactgccatgaaatggcgctgaggattcttcttgcctgcattgagtcacatgcaatccgtcacaagcgctacatagttcctataatatcagtacacatggatttctacattagggtttttgtgcgaatcttcacctcggctagcacagtaaaaagctcaccactcaaattggcacatgtttaccaatgcactgggtgcaattcattttacctgcaaaatattggaagaattcattcaaaggataaggaaaacatagctgtaccaaattttcgccttactctgcctgaagtatgttctgaatgtggccatcaatttgttatggggggacctctttggagttatccaatacatgacaaggtatgggctgcttcaatattatcagatattcatgctatgagagaagcatatccagcttatccaaaaatttcggctatactatcttcagtctcagaggaattgctggaggcacctttatttgtgagtcttcacaatctgtgtgcaatactgaagtgcactactccaaccatggttatgttacaatgtgctatcagaaatgctgggtatcaagtatcaggaagtcatgtggacccgctagctcttaaaacagatgccccgatgtcagtgatctgggacatcatgcgatgctgggtcaagcttcacccagttaaacatcgacctggaaatcatcctggcaatgtgatactttcccaagagcctaaatttcaggcaaaattttccagagtactgggggcctcggtcacccggaagcgcgcaagattcatgccaaatcctgagaagtattggggtcctgggacgaaggctggcaggaatccgagaacatttcagatggataaccgtaactgacgcgatctccgcgccagagcccagaagacggataatttagtttattgctttgtcaattgatatagtttgtgcgattgcaatatttgaatgatgtttgtgagtttgttccttaagttcacccttcctaaaattttaggttgagtccaccggtgaccggcagcatggctccaacactagacaggacatacgttaggtatttttggtcgaagatcgttatggacagtcttcattatcatcaaagatacatctatgattttttgaagagaaaaacgacttctac

SEQ ID NO: 220358 - DNA, 1858 bp, Zea Mays
ccccattcccaatctcgtcttgtgttgttcggagcgggcagcagcacacagccccatcccaatcctagtcgatcttcttcccctcctcaagccggttccttcgtccacacgaccgcgcgctcggaaaactccgcggagggcgaaggaggcgaaccaagggcgacgtatccgccgccggagaaggtagccctcgatccgccgtctcccgcgattcgtttgtcttgcgacagctgggcgaccgtcgtcgccgccgcccttctccaggtgcccaggtcttcgccggtccctttgccgcctccttgccgccgacgagcaccagccaggaagaaaagaagctgaaccatggggaagagaaagtcagctgctaagccacctcctaagaagcggatggacaagcttgacactgtcttttcctgcccattctgcaaccacgggagtagtgttgagtgccgaattgacatgaagaatctgattggcgaagcatcttgtagaatctgtcaggaaaacttcagcacaactgttaatggtatgccaaacctatgtataaaactgtaccggttgctcctaatttcacttctatgaactgtactaatttgcatcgaagaaagtttggtcccaaacaactcgtgaactcgttttcttattattgggctgatggacaaggcaacgtgaaatttttcatggtacctgggaacagaacttagcctacaaactgcagaaccattctcatttcatcttgtagtcttgtcttgctaataatggactttgtgggctgtctgttccctgtgtaattcatttggccatgacagttcttgatcatgtgatatcatagaatgtgtcaaaaaccgcatcacatcaaaattaaaactggatacaacactatacataggtaatagtagaattaaatgataagaagtatttctttttgtttattttaattactaattgtcttatgtgatctcttttcttgcagcactcactgagcctattgatatatatagtgaatggattgatgagtgtgagcgtgtcaacactgttgaaggcgacgatgatgcgtgagcttgccccatgcgatgaaactgttacctacaatcgtaatgtaatgtgctggtattctcgaatgccatagcccatagtcagccatggcttggaataacgtagtggctgactgatatgccagtaggcacctgtctagtacttacagaactacaaaaagtttgtactatacatatatggacaaccttataagtggctatgtgtgtacctatcctaacgcttatcccagatggtgtatcagcgtttttctgtgagattgttttcaagcaaggggttgttcattcattgggtcttctcgggaaaaagagaattatgctgcagtcaaccagatggccgctgttgtgccgacaatacagggtaaaccaaatgcaaccagaatataatctgcagcggaagatattcatagatacaattgttttcagttcattcaacgctgaaagcggtttcggtctggaggctgagctttggatcattggatggcactatgcagctttggcacctggagtaccgctcattagtttttcataaagtcccgttcatttcttgtgcacattgctggagattgagagatcgagatcaagactgtacgcatcataaaccgatcagtctattctttgctgtgtacacctgggttgtctttgtgcctgtggtctctgccaggagggtgttcttcgaagtttgaagtacatgtggtttgtgtcttaatgcagttcggtttcatggacgggttgtcaagtgttttaccaggaacagttgtcggtgcagcagtatgcttaatcatgaataaatgatttttgtattt

SEQ ID NO: 220359 - DNA, 1433 bp, Zea Mays
cccacctctttctcgcctctttccccattcccaatctcgtcttgtgttgttcggagcgggcagcagcacacagccccatcccaatcctagtcgatcttcttcccctcctcaagccggttccttcgtccacacgaccgcgcgctcggaaaactccgcggagggcgaaggaggcgaaccaagggcgacgtatccgccgccggagaaggtagccctcgatccgccgtctcccgcgattcgtttgtcttgcgacagctgggcgaccgtcgtcgccgccgcccttctccaggtgcccaggtcttcgccggtccctttgccgcctccttgccgccgacgagcaccagccaggaagaaaagaagctgaaccatggggaagagaaagtcagctgctaagccacctcctaagaagcggatggacaagcttgacactgtcttttcctgcccattctgcaaccacgggagtagtgttgagtgccgaattgacatgaagaatctgattggcgaagcatcttgtagaatctgtcaggaaaacttcagcacaactgttaatgcactcactgagcctattgatatatatagtgaatggattgatgagtgtgagcgtgtcaacactgttgaaggcgacgatgatgcgtgagcttgccccatgcgatgaaactgttacctacaatcgtaatgtaatgtgctggtattctcgaatgccatagcccatagtcagccatggcttggaataacgtagtggctgactgatatgccagtaggcacctgtctagtacttacagaactacaaaaagtttgtactatacatatatggacaaccttataagtggctatgtgtgtacctatcctaacgcttatcccagatggtgtatcagcgtttttctgtgagattgttttcaagcaaggggttgttcattcattgggtcttctcgggaaaaagagaattatgctgcagtcaaccagatggccgctgttgtgccgacaatacagggtaaaccaaatgcaaccagaatataatctgcagcggaagatattcatagatacaattgttttcagttcattcaacgctgaaagcggtttcggtctggaggctgagctttggatcattggatggcactatgcagctttggcacctggagtaccgctcattagtttttcataaagtcccgttcatttcttgtgcacattgctggagattgagagatcgagatcaagactgtacgcatcataaaccgatcagtctattctttgctgtgtacacctgggttgtctttgtgcctgtggtctctgccaggagggtgttcttcgaagtttgaagtacatgtggtttgtgtcttaatgcagttcggtttcatggacgggttgtcaagtgttttaccaggaacagttgtcggtgcagcagtatgcttaatcatgaataaatgatttttgtattt

SEQ ID NO: 220360 - DNA, 2973 bp, Zea Mays
accatcacttgttctctcttctctctctctcgtcgtgtgcctgggtcgaccagcgacctggctagctagctctccagctgcgcgcgccatggccaacccaacagctaccaagcatgctttcaagcgtattttgacgagcctgcttaagcctggcggtggtgaatacggcaagttcttcagccttccggcgctaaatgatccaaggatcgataagcttccctactctatacgtgttctcctggaatcagctatccgccattgtgataacttccaagttacagagagtgatgttgagaaaatcattgattgggagaacacatctccaaagctggctgagatacctttcaagccagcgagatgcattctaatggacaacactggagtcccagcagttgtagaccttgcagctatgcgtgatatgatgccaaagttgggatgtgatccctacaagattaatccattgattcccgtggatgctgttattgaccacgcagtgcgagtggatgtagcagggacctatgatgcattggatagaaacgaggagctggagttccaacgcaacaaagaaaggtttgcttttcttaaatgggcatccaatgctttccacaacatgcaggttttccctcctggttcgggcactgtacaccaggtaaatcttgagtatcttgcccgagttgtcttcaacgaagatggcattctttacttcgacagcgtggttggcacagactcacacaccactatgattaatagtcttggagttgctgggtggggagtaggcggtattgaagcagtcgttgcaatgcttggccagccaatgggcatggttttgcctggtgtggttggattcaaattgagtgggaagttacgggatggtgtcactactactgacattgttcttaccatgacccaaatgctaaggaagcacggtgctattggcaaattcgttgaattctatggtgtcgatgattgaagcatacctgcgagctaacaaaatgtttgtggacaagcatgagcctgagacggaacgcgttttctcttcacatctggagctggaccttagtgaggtggagccttgcgtttcaggccccaaaaggcctcatgatcgtgtccctttgaaggaaatgaagtcagactggcatgcttgcctggacaacgaagttggcttcaagggctatgcggtgccaaaggaacagcaaggcaaagttgtgaaattcgacttccatggaaggccagctgaaatcaagcatggcagtgttgttcttgcagcaatatgtagctccacaaacacatcaaatcccagcgtcatgattggtgctggccttgtggcaaagaaagcctgcgaattaggccttgaggtgaagccatgggtaaagacaagccttacccctggatctgtggttgctaccgagtacttgaaacatagtggccttcaagattatctgaaccagcaagggttccatgtcgctgcgcatggttgcgccacttgtgtgggcaactccggtgacctggatggatctgtatcagctgctatcacagaaaatgatatggttgctgctgcggtgctgtcggccaaccgaaacttcgaggggcgtgtgaaccctctcactcgggctaactaccttgcctcgccgcctctggttgttgcctatgctcttgccggcactgttgacattgactttgagaaagagcccattggagttggaaagggtggtaaggaagttttcttgagggacatatggccttcaaaccaagagatcgatgaggttgtggagtccagcgtgcagactcacctggagggcatgtccatgacgccgcctgcagccccgcccacggtgacggaggcctactgcctgctcaaccttggggacagcatcaccacggaccacatctcctactcggggaagatccccgagggcacacctgcggccaagtatctgctcgagtatggcgtggagcccaagaacttcagctcctatggtggccgccgcgggaacaacgaggtggtgatgaggggagcgtttgccaatatgaggatcgtgaataagcttcttgatggcaaggctggtccctggacgatccatgttcctaccggggagaagctctatgtttacgacgcggcaatgaagtacaagtcggaaggtcatgacatggtcatcattgctggctccgagtacggcagtggcagctctcgtgactctgctgccaagggaccaatgctactgggtgtcaagtcggtgattgcaaagagcttcgagcggatccaccggagcaacttggtggggatggggatcattcctctctgctttaaagcaggagaggatgccgattcactcggcctcaccggacgtgagcgctacaccatccacctccctaccagcaccgccgagctcagtccaggccaggacgtgaccgtcacaacccacgacggcagatccttcacttgcactcttcgcttggacacacagcttgaggtcacatacttcaaccatggaggcatccttccctacatggtccgcaacctggcagcacagatgaaataagttaaaaagcaagctagcttattggcgcggtgggaataaattaaaaaggtactcagtgccccacgtatttgacgtatgtctgtaaataagtggcacattcgagcgctcttcgctctgccattgaggtggatcgaagctgccacatattttctccgcaggacatcggcacgaattttgtcttagcaaaccagttaattttgtactctttagattctttaattggttccatgctctctttggtacttttcatgtcagtttgctttgcaaacattatcagcgtgcccttgtagatttcgtaatggttatatgtatatgccctattgaaattgtcattttgctttgcaaaaaaatatcagcgtgccgttgtagattttcaaatgtatatgtctgccgtcaaactctctcgtgaatatgtttggttacaataatggaa

SEQ ID NO: 220361 - DNA, 3091 bp, Zea Mays
accatcacttgttctctcttctctctctctcgtcgtgtgcctgggtcgaccagcgacctggctagctagctctccagctgcgcgcgccatggccaacccaacagctaccaagcatgctttcaagcgtattttgacgagcctgcttaagcctggcggtggtgaatacggcaagttcttcagccttccggcgctaaatgatccaaggatcgataagcttccctactctatacgtgttctcctggaatcagctatccgccattgtgataacttccaagttacagagagtgatgttgagaaaatcattgattgggagaacacatctccaaagctggctgagatacctttcaagccagcgagatgcattctaatggacaacactggagtcccagcagttgtagaccttgcagctatgcgtgatatgatgccaaagttgggatgtgatccctacaagattaatccattgattcccgtggatgctgttattgaccacgcagtgcgagtggatgtagcagggacctatgatgcattggatagaaacgaggagctggagttccaacgcaacaaagaaaggtttgcttttcttaaatgggcatccaatgctttccacaacatgcaggttttccctcctggttcgggcactgtacaccaggtaaatcttgagtatcttgcccgagttgtcttcaacgaagatggcattctttacttcgacagcgtggttggcacagactcacacaccactatgattaatagtcttggagttgctgggtggggagtaggcggtattgaagcagtcgttgcaatgcttggccagccaatgggcatggttttgcctggtgtggttggattcaaattgagtgggaagttacgggatggtgtcactactactgacattgttcttaccatgacccaaatgctaaggaagcacggtgctattggcaaattcgttgaattctatggtgttggtgtgggcgagctatctttgcctgctagggccacaattgccaacatgtctccagaatatggagctaccatgggcttcttccctgtagaccaagtagcattggactatctcaaactgacaggccgaagcgatgaaactgtgtcgatgattgaagcatacctgcgagctaacaaaatgtttgtggacaagcatgagcctgagacggaacgcgttttctcttcacatctggagctggaccttagtgaggtggagccttgcgtttcaggccccaaaaggaaatgaagtcagactggcatgcttgcctggacaacgaagttggcttcaagggctatgcggtgccaaaggaacagcaaggcaaagttgtgaaattcgacttccatggaaggccagctgaaatcaagcatggcagtgttgttcttgcagcaatatgtagctccacaaacacatcaaatcccagcgtcatgattggtgctggccttgtggcaaagaaagcctgcgaattaggccttgaggtgaagccatgggtaaagacaagccttacccctggatctgtggttgctaccgagtacttgaaacatagtggccttcaagattatctgaaccagcaagggttccatgtcgctgcgcatggttgcgccacttgtgtgggcaactccggtgacctggatggatctgtatcagctgctatcacagaaaatgatatggttgctgctgcggtgctgtcggccaaccgaaacttcgaggggcgtgtgaaccctctcactcgggctaactaccttgcctcgccgcctctggttgttgcctatgctcttgccggcactgttgacattgactttgagaaagagcccattggagttggaaagggtggtaaggaagttttcttgagggacatatggccttcaaaccaagagatcgatgaggttgtggagtccagcgtgcagactcacctggagggcatgtccatgacgccgcctgcagccccgcccacggtgacggaggcctactgcctgctcaaccttggggacagcatcaccacggaccacatctcctactcggggaagatccccgagggcacacctgcggccaagtatctgctcgagtatggcgtggagcccaagaacttcagctcctatggtggccgccgcgggaacaacgaggtggtgatgaggggagcgtttgccaatatgaggatcgtgaataagcttcttgatggcaaggctggtccctggacgatccatgttcctaccggggagaagctctatgtttacgacgcggcaatgaagtacaagtcggaaggtcatgacatggtcatcattgctggctccgagtacggcagtggcagctctcgtgactctgctgccaagggaccaatgctactgggtgtcaagtcggtgattgcaaagagcttcgagcggatccaccggagcaacttggtggggatggggatcattcctctctgctttaaagcaggagaggatgccgattcactcggcctcaccggacgtgagcgctacaccatccacctccctaccagcaccgccgagctcagtccaggccaggacgtgaccgtcacaacccacgacggcagatccttcacttgcactcttcgcttggacacacagcttgaggtcacatacttcaaccatggaggcatccttccctacatggtccgcaacctggcagcacagatgaaataagttaaaaagcaagctagcttattggcgcggtgggaataaattaaaaaggtactcagtgccccacgtatttgacgtatgtctgtaaataagtggcacattcgagcgctcttcgctctgccattgaggtggatcgaagctgccacatattttctccgcaggacatcggcacgaattttgtcttagcaaaccagttaattttgtactctttagattctttaattggttccatgctctctttggtacttttcatgtcagtttgctttgcaaacattatcagcgtgcccttgtagatttcgtaatggttatatgtatatgccctattgaaattgtcattttgctttgcaaaaaaatatcagcgtgccgttgtagattttcaaatgtatatgtctgccgtcaaactctctcgtgaatatgtttggttacaataatggaa

SEQ ID NO: 220362 - DNA, 2993 bp, Zea Mays
accatcacttgttctctcttctctctctctcgtcgtgtgcctgggtcgaccagcgacctggctagctagctctccagctgcgcgcgccatggccaacccaacagctaccaagcatgctttcaagcgtattttgacgagcctgcttaagcctggcggtggtgaatacggcaagttcttcagccttccggcgctaaatgatccaaggatcgataagcttccctactctatacgtgttctcctggaatcagctatccgccattgtgataacttccaagttacagagagtgatgttgagaaaatcattgattgggagaacacatctccaaagctggctgagatacctttcaagccagcgagatgcattctaatggacaacactggagtcccagcagttgtagaccttgcagctatgcgtgatatgatgccaaagttgggatgtgatccctacaagattaatccattgattcccgtggatgctgttattgaccacgcagtgcgagtggatgtagcagggacctatgatgcattggatagaaacgaggagctggagttccaacgcaacaaagaaaggtttgcttttcttaaatgggcatccaatgctttccacaacatgcaggttttccctcctggttcgggcactgtacaccaggtaaatcttgagtatcttgcccgagttgtcttcaacgaagatggcattctttacttcgacagcgtggttggcacagactcacacaccactatgattaatagtcttggagttgctgggtggggagtaggcggtattgaagcagtcgttgcaatgcttggccagccaatgggcatggttttgcctggtgtggttggattcaaattgagtgggaagttacgggatggtgtcactactactgacattgttcttaccatgacccaaatgctaaggaagcacggtgctattggcaaattcgttgaattctatggtgttggtgtgggcgagctatctttgcctgctagggccacaattgccaacatgtctccagaatatggagctaccatgggcttcttccctgtagaccaagtagcattggactatctcaaactgacaggccgaagcgatgaaactgtgtcgatgattgaagcatacctgcgagctaacaaaatgtttgtggacaagcatgagcctgagacggaacgcgttttctcttcacatctggagctggaccttagtgaggtggagccttgcgtttcaggccccaaaaggcctcatgatcgtgtccctttgaaggaaatgaagtcagactggcatgcttgcctggacaacgaagttggcttcaagggctatgcggtgccaaaggaacagcaaggcaaagttgtgaaattcgacttccatggaaggccagctgaaatcaagcatggcagtgttgttcttgcagcaatatgtagctccacaaacacatcaaatcccagcgtcatgattggtgctggccttgtggcaaagaaagcctgcgaattaggccttgaggtgaagccatgggtaaagacaagccttacccctggatctgtggttgctaccgagtacttgaaacatagtggccttcaagattatctgaaccagcaagggttccatgtcgctgcgcatggttgcgccacttgtgtgggcaactccggtgacctggatggatctgtatcagctgctatcacagaaaatgatatggttgctgctgcggtgctgtcggccaaccgaaacttcgaggggcgtgtgaaccctctcactcgggctaactaccttgcctcgccgcctctggttgttgcctatgctcttgccggcactgttgacattgactttgagaaagagcccattggagttggaaagggtggtaaggaagttttcttgagggacatatggccttcaaaccaagagatcgatgaggttgtggagtccagcgtgcagactcacctggagggcatgtccatgacgccgcctgcagccccgcccacggtgacggaggcctactgcctgctcaaccttggggacagcatcaccacggaccacatctcctactcggggaagatccccgagggcacacctgcggccaagtatctgctcgagtatggcgtggagcccaagaacttcagctcctatggtggccgccgcgggaacaacgaggtggtgatgaggggagcgtttgccaatatgaggatcgtgaataagcttcttgatggcaaggctggtccctggacgatccatgttcctaccggggagaagctctatgtttacgacgcggcaatgaagtacaagtcggaaggtcatgacatggtcatcattgctggctccgagtacggcagtggcagctctcgtgactctgctgccaagggaccaatgctactgggtgtcaagtcggtgattgcaaagagcttcgagcggatccaccggagcaacttggtggggatggggatcattcctctctgctttaaagcaggagaggatgccgattcactcggcctcaccggacgtgagcgctacaccatccacctccctaccagcaccgccgagctcagtccaggccaggacgtgaccgtcacaacccacgacggcagatccttcacttgcactcttcgcttggacacacaggtactcagtgccccacgtatttgacgtatgtctgtaaataagtggcacattcgagcgctcttcgctctgccattgaggtggatcgaagctgccacatattttctccgcaggacatcggcacgaattttgtcttagcaaaccagttaattttgtactctttagattctttaattggttccatgctctctttggtacttttcatgtcagtttgctttgcaaacattatcagcgtgcccttgtagatttcgtaatggttatatgtatatgccctattgaaattgtcattttgctttgcaaaaaaatatcagcgtgccgttgtagattttcaaatgtatatgtctgccgtcaaactctctcgtgaatatgtttggttacaataatggaa

SEQ ID NO: 220363 - DNA, 1395 bp, Zea Mays
gtcgtcgtcatggagtacaccgtcggtggcacgctgtgcaaaggcctgaacagagcgtcggggacgctggtcgccggcttcatcgccgtcggggctcacaaggtggcctacatgtgtggggacaaggcagagcccgtactgctcgccatcttcgtcttcttactgtgtacgtacctgctggccgaccatttttaccgcaccgcacgcatgcatatgcaatgctgtgttgcatgcacttcttgcagcgtcggcggcgacgttctcgcggttcatcccggaggtgaaggcgcggtacgactacggcgtgaccatcttcatcctcaccttcagcctggtggccgtgtcgagctaccgcgtcgacgagctcatccgcctcgcgcaccgccgcttctccaccatcgccgtcggcgtcgccacctgcctctgcaccaccatcttcgtcttcccggtctgggccggtgagggcctccacaagctcgccatcgcaaacctcaacaagctggcggagttcttggaaggaatcgaatctgaatgcttcagagagaacgctacattcgagaatttggaagctaaaccctttctccaagtgtaccagagcgtcctcaactccaaggccactgaagactctttgtgcaacttcgccaagtgggagccatgccatggcaaattcaaattgcgacatccatggagccaataccagaagctcggcgctctttgtcgcgagtgcgcttcttcaatggaggctctctcctcctacgtcgtcaccctagcaagaaccgaggttcgaacagcatgccgccagatgagcttgcactcggccaaggcgctccgagagctcacagcagcgatgcggacgatgacgactgtaccgtccccagccagcgtccacgtgtctgcagcgatcaaagcggcgaaaggcctcagagacgggttatcagagggtgcggatctggcgcgagcgatgcatgttgctgttatcgcatctcttctctctgagttggttaccaagaccaagcagatcactgagtccgttgatgtcctcgcgcgacttgcccgcttcagaaaccctgaaaccactcagactcacaagggtgtggctatcgatgtagtgagctgagagtgagaagcagacgatcttcggtgggacttcactagtgatactctgtatttgtatcagaagccttttgctgaatgggataaaacagcgagctagtatgaagtacaatactaactgtgcatacagcaagtgactgatcctttgatttgtggaatcaattatgatgctggattgcgacggtaaatgtcactgtcttccacagttgcacagcaattagcttttctcagaagtaaaaataaaaacaatattcttctcaatattagggaagaaaaaaaaat

SEQ ID NO: 220364 - DNA, 2073 bp, Zea Mays
  misc_feature (2073)..(2073): n is a, c, g, or t
tgcttattggctgaagtctccgacaatgtggcctcaaatttaactagtcagcgtgcggatatagctggtgataacagtgaggcaaaaattgaaccatcggcttctgtcggtgatcaacaagaagcagcacctcaagctggtgacgttaagaactacacccaaagtgttactgaagaaaacactatagctcctgagccaactgtacaagaagagagtgtgaaagcaactgaatctcttcccgattcatctggcatgcagattgttggtgatgtcggtggaaattggaaagcagtaatgcatgaacagagtaatcagtgttattactggaacacagttactggagaaacttcttgggatataccaaatggattagcttcaggagttgcaactgcatttgttccttctgatgtggactattcaaatgaagctcaaacccatgtccttccccacagcacactggaagcatatccaagtgatatgtctgttgggaacggcacaacttatcctaatttgggaatggcatgtggaagtgcacatgttactcaagatgcttatgcttatgctgctcctatcgccagtaatgagcctttggacattgatcccttgtatcttgcaaaatatggtgatggtttgctgcaaagattggacctgctggaaaggctctgtggctcgaacaaaggtcttgaattgataagaagagaaattgagatacggatgtcggacttaaatgcactttcatcttatggatcttctttgctcccattgtggttgcatgctgaggtgcacctgaagcaactagactcttctatttccaagctggaaatgaactatcatgcagattcagaacctaggaattcaaagacagaggttgctgaacacagggcacctgatgatgctgacttgataacaccctccaatggcgaggctttgaagtatgaagtttgtgctgggattactatcgatgcaaatatgaagattggtaagccagcttcaacgtctcagaattcacaaggtagggataatgcagctgttcctccaaaaattgaatctgacaatgatgaagatatggatgtggaaatggaagttgatgaagataatgtcgaagagcaggcacagtgcagttctgtacctgaaaaggagcatcctccttcagaacagttgagttcatctaatttgccatcatttgaagatcctacacctcctgaggataattctgttcctccacctccgccagaagaggaatggattccacctccaccacctgaacacgaacacgaaccagctcctccagcttccccagaagagccggctgcatcatatgttcaggtggatacaattcctcagccatatatagctcaagaaaatgttggctatacaatttcaggaatggagtattatagtactgaaggtacaaatgccaattactatatgcaagtgagtgagcctcatgtccttcaagcacaacattcttattatgcaccagtatctgggagtggcatatctgtttctgttgatggcacatctattgccccagaatcttattatacctatccttcagtcactgtggctgcaagcgctgtagcagctgaacattctggatactacgcttcatcagtctctgccatttatagcagtgcagcagatatcaaaacaagctcagcttctcttgtttctgcaattagcaattcggatctaaaaaatcatgataatgttatatccaatgatgcaagtattgtgcctttcacccaagctgtagtagcaacatcagctgcaggaacgacatctgttcctgaaagttctacacagccttctagcagtactacaaaccagatcaaagttattcgcaacaagaagcgggttgttggtattacatcgtctctgaggtctaataagaaggtttcaagtttggtagataaggttgctctctacaacgaatctctgtattctgttattattgcatattaggtgcctgaaatttacatttttagcatgttcctgtatattcatggaattaacaaatcctagtttcttactctcgatttgagacgttctctcaactctcaaccatctaan

SEQ ID NO: 220365 - DNA, 2551 bp, Zea Mays
cagcagcaggctagctctgctccgccgctcactgctcgctagctactggaccgcgcttccctctctccatcgcgccggcgcgcacggctagctctagctcccggagccgccctttcatggtccccgccgtggtcgggacgagatgcctccgctcgcattcctccgccgctacctccccgcgaggaaccgagtgtctgttatcgatcctgagttgcgtctgtctgtttgtttccctgagcaaaggcttctcgcgcgagcgtgcgatggtggagtccgggggagcccgggcgtggcgcgggacgaggaggccggaggcagcggcggactgagcggccggtcggcgggggcgccgtccggggagtgctacgcgtgcacgcagcccggggtgccggcgttccactccacggcctgcgaccaggtgcactcgccggactgggacgccgacgcggggtcctcgctggtgccggtccaggcgcagcagcaggcccagccggcggcggcggcggcgcagcacgcggcgcggtggctgttcgggcccgtgctggacccgcgcagcaagcgcgtgcagcgctggaaccgctggatcctgctcggccgcgccgccgcgctggcgctggacccgctcttcttctacgcgctctccatcggccgcgccggccggccctgcctctacttggacgccggcctcgccgccgcggtcaccgcgctccggacctgcgccgacgtcgcgcacctcgcgcacgtgctcctgcagttccgcctcgcctacgtctcccgcgagtccctcgtcgtcgggtgcggcaagctcgtctgggacgcccgcgccatcgccgcgcactacgcccgctccgtcaagggcctctgcttcgacctcttcgtcatcctccccatcccgcaggtcatcttctggttggttataccaaagttaattagggaagaacgtgttaggcttatcatgacgatactgctactcatgttcatatttcaatttctccccaaggtctaccatagtatacacatcatgaggaaaatgcagaaggtgacgggttacatctttggatcgatatggtggggatttggtttaaatctatttgcctatttcattgcttctcatattgcaggtgggtgctggtatgttcttgcaatccagcgcattgcttcctgcctccaggaagaatgcaagaaaaacaatagttgtgatctaatatcactagcttgttcgaaggagatatgctttcaccctccttggtcttcgaatgttaatgggttcgcatgtgatacgaacatgacctcctttagtcaacgaaatgtgtctacttgtttaagtggtaaagggtcgtttgcttatggaatctatttgggggctcttcctgttatatcgagcaattcgcttgctgtcaaaattctctatcctatattttggggactcatgacactcagtacttttggtaacgatcttgccccaacaagcaatggtattgaggtatttctgcacgcggtcctggcaaggaagcggaagatgcagctgcggttccgagacatggaatggtggatgagacggaggcagctgccgtctcggctgaggcagagggtgcgcaaatatgagcgcgaacgctgggccgccgtcacgggagacgaggagatggagatgatcaaggatctgcctgaaggactgaggcgggacatcaagcgctacctctgcctcgagctggttaagcaggttccgctgttccatggcatggacgatctgatcctggataacatctgcgaccggctgcggccactggtgttctccagcggggagaaggtgatccgagagggcgaccccgtgcagcgcatggtgttcatcctgcagggcaagctccggagcacgcagccgctgaccaagggcgtggtggcaacgtgcatgctaggggcgggcaacttcctaggcgacgagctgctgtcgtggtgcctgcgccgccccttcgtggaccggctccccgcgtcgtcggccacgttcgagtgcgtggaggcggcgcaggcgttctgcctcgacgcgccggacctgcggttcatcaccgagcacttccgctacaagttcgccaacgagaagctcaggcgcacggcgcggtactactcgtccaactggcggacgtgggccgccgtcaacatccagctcgcgtggcgcaggtatagggcccgggcatcgacggacctggcggcgatggccgcgccgccgttggcgggcggacccgacgacggggaccggcggctcagacactacgcggccatgttcatgtcgctccggccgcatgaccacctagagtgatcaggaggggggacgggaccatcctagctgtgccggccgggtcatggtgtctgtacagtgtacactagtggtatgttgttgtcatcttctgcgtgagtgaactggtggttcgggatttgtcatttaaagaaggtcaataatggagaaatagtttcttagcccgattcaattgtcttcctttcaccaagaataaaaattacttctgccggactgcctctccgcgttggtctggattgcttt

SEQ ID NO: 220366 - DNA, 959 bp, Zea Mays
gaaaaagtcagggttgtggtcgagcaatttaatgattatacatttcatggaggaccactgagggtgaactatgggccaccgccacccatggctctgttgaggaggtcaacaatgccatatcaaacctgatggcatcataggtacgctagatgattatgcgatatgaagggcatgaaccaaactgaaccacaagatggatgatctgacccagtgccaggatgagagatgctcaccgagtggtcgtcgtttgacaacactagcttagtgttattcgaggcaactctttcacatggatttttaaaatctgtagtgtttaaagaaccagaaatggatttgcttgtttctaattcattttgcttgttggatgtcgatatgcacatgcattttcagtcagcttatgatcaagggtacaaataagatcatgccaactctactccatgtactgctggtgtcacagactcacctctgcggcagtatgccctgcctttgctgtgtacttaaatctgctggaggatgatgcatgggcatgcacgacattagattctattgctgtttgtttgactcacgataatgatcacagaaaagtggaaaaaacactgttgaaaaaagaggccattcagaatttagtgaagttcttccaagattgcccagaacagttttttggccatatattggacgctttcttgaagataataacgaaatcttctaggctaaatacaacaatggctaccaatggtttaacaacattgctcattgcaagacttgaccattcaaatttggtggtcgcaaaagtgtggagacttgaattcatataatgtgaggcttaacattagtgcaaacagttgtattttagtttagatttagagcacacttatgtatgcgttgtttgacaatgcttatttatgatatattgaatggtacttatttatattatattaattataatgttgttcaatata

SEQ ID NO: 220367 - DNA, 1190 bp, Zea Mays
ttcacctcctgctcgcccgcatccgacttgcccgccgaccacctcatccctcctaccgtgtagccctagccccaaccccttggtggcctagctccgtcggtcggcggccaaccgtagcagtcgctcgtcagcaacatcacccagccctagcctcacactgctctcaccagcagtcgccaacaacagcagccagtggcagtgagcatccgcgcacagcacagctcccgccttgattccccgccctccgctcgcggcctcgcgctccagtcactaacaggtagcatcagcaagcagtggcatcgaaggcgtggagaccggccagccgccaacgccctctgtagatcgctcggcctctccaaacgaccagggccagaagtagtgctaacatttcatggaggaccactgagggtgaactatgggccaccgccacccatggctctgttgaggaggtcaacaatgccatatcaaacctgatggcatcataggtacgctagatgattatgcgatatgaagggcatgaaccaaactgaaccacaagatggatgatctgacccagtgccaggatgagagatgctcaccgagtggtcgtcgtttgacaacactagcttagtgttattcgagtcagcttatgatcaagggtacaaataagatcatgccaactctactccatgtactgctggtgtcacagactcacctctgcggcagtatgccctgcctttgctgtgtacttaaatctgctggaggatgatgcatgggcatgcacgacattagattctattgctgtttgtttgactcacgataatgatcacagaaaagtggaaaaaacactgttgaaaaaagaggccattcagaatttagtgaagttcttccaagattgcccagaacagttttttggccatatattggacgctttcttgaagataataacgaaatcttctaggctaaatacaacaatggctaccaatggtttaacaacattgctcattgcaagacttgaccattcaaatttggtggtcgcaaaagtgtggagacttgaattcatataatgtgaggcttaacattagtgcaaacagttgtattttagtttagatttagagcacacttatgtatgcgttgtttgacaatgcttatttatgatatattgaatggtacttatttatattatattaattataatgttgttcaatata

SEQ ID NO: 220368 - DNA, 1213 bp, Zea Mays
cccaaaccctagcgcacagtagccgtcattcacctcctgctcgcccgcatccgacttgcccgccgaccacctcatccctcctaccgtgtagccctagccccaaccccttggtggcctagctccgtcggtcggcggccaaccgtagcagtcgctcgtcagcaacatcacccagccctagcctcacactgctctcaccagcagtcgccaacaacagcagccagtggcagtgagcatccgcgcacagcacagctcccgccttgattccccgccctccgctcgcggcctcgcgctccagtcactaacaggtagcatcagcaagcagtggcatcgaaggcgtggagaccggccagccgccaacgccctctgtagatcgctcggcctctccaaacgaccagggccagaagtagtgctagtcaacatttcatggaggaccactgagggtgaactatgggccaccgccacccatggctctgttgaggaggtcaacaatgccatatcaaacctgatggcatcataggtacgctagatgattatgcgatatgaagggcatgaaccaaactgaaccacaagatggatgatctgacccagtgccaggatgagagatgctcaccgagtggtcgtcgtttgacaacactagcttagtgttattcgaggcaactctttcacatggatttttaaaatctgtagtgtttaaagaaccagaaatggatttgcttgtttctaattcattttgcttgttggatgtcgatatgcacatgcattttcagtcagcttatgatcaagggtacaaataagatcatgccaactctactccatgtactgctggtgtcacagaaaagtggaaaaaacactgttgaaaaaagaggccattcagaatttagtgaagttcttccaagattgcccagaacagttttttggccatatattggacgctttcttgaagataataacgaaatcttctaggctaaatacaacaatggctaccaatggtttaacaacattgctcattgcaagacttgaccattcaaatttggtggtcgcaaaagtgtggagacttgaattcatataatgtgaggcttaacattagtgcaaacagttgtattttagtttagatttagagcacacttatgtatgcgttgtttgacaatgcttatttatgatatattgaatggtacttatttatattatattaattataatgttgttcaatata

SEQ ID NO: 220369 - DNA, 881 bp, Zea Mays
ttcacctcctgctcgcccgcatccgacttgcccgccgaccacctcatccctcctaccgtgtagccctagccccaaccccttggtggcctagctccgtcggtcggcggccaaccgtagcagtcgctcgtcagcaacatcacccagccctagcctcacactgctctcaccagcagtcgccaacaacagcagccagtggcagtgagcatccgcgcacagcacagctcccgccttgattccccgccctccgctcgcggcctcgcgctccagtcactaacaggtagcatcagcaagcagtggcatcgaaggcgtggagaccggccagccgccaacgccctctgtagatcgctcggcctctccaaacgaccagggccagaagtagtgctagtcaacatttcatggaggaccactgagggtgaactatgggccaccgccacccatggctctgttgaggaggtcaacaatgccatatcaaacctgatggcatcataggtacgctagatgattatgcgatatgaagggcatgaaccaaactgaaccacaagatggatgatctgacccagtgccaggatgagagatgctcaccgagtggtcgtcgtttgacaacactagcttagtgttattcgaggcaactctttcacatggatttttaaaatctgtagtgtttaaagaaccagaaatggatttgcttgtttctaattcattttgcttgttggatgtcgatatgcacatgcattttcagtcagcttatgatcaagggtacaaataagatcatgccaactctactccatgtactgctggtgtcacaggtccttaatgctttgttcaacctttgcaaaattaataaaagaagacatgaacaagcaaccgaaaatagaatcatc

SEQ ID NO: 220370 - DNA, 877 bp, Zea Mays
ttcacctcctgctcgcccgcatccgacttgcccgccgaccacctcatccctcctaccgtgtagccctagccccaaccccttggtggcctagctccgtcggtcggcggccaaccgtagcagtcgctcgtcagcaacatcacccagccctagcctcacactgctctcaccagcagtcgccaacaacagcagccagtggcagtgagcatccgcgcacagcacagctcccgccttgattccccgccctccgctcgcggcctcgcgctccagtcactaacaggtagcatcagcaagcagtggcatcgaaggcgtggagaccggccagccgccaacgccctctgtagatcgctcggcctctccaaacgaccagggccagaagtagtgctaacatttcatggaggaccactgagggtgaactatgggccaccgccacccatggctctgttgaggaggtcaacaatgccatatcaaacctgatggcatcataggtacgctagatgattatgcgatatgaagggcatgaaccaaactgaaccacaagatggatgatctgacccagtgccaggatgagagatgctcaccgagtggtcgtcgtttgacaacactagcttagtgttattcgaggcaactctttcacatggatttttaaaatctgtagtgtttaaagaaccagaaatggatttgcttgtttctaattcattttgcttgttggatgtcgatatgcacatgcattttcagtcagcttatgatcaagggtacaaataagatcatgccaactctactccatgtactgctggtgtcacaggtccttaatgctttgttcaacctttgcaaaattaataaaagaagacatgaacaagcaaccgaaaatagaatcatc

SEQ ID NO: 220371 - DNA, 1532 bp, Zea Mays
gccctgattgctgcagccaaattggtgcttcaagcaatggttcaaatgggtgtccttgttcctactggagatatgactgttgtcagaagaaccgctcaatttttccttaatagctttcaagagtgcctaatagcacaaaggaaggagagagaaatggcaaccgcagaactgggtttcaaaaagcaattaactaaggaggagaagtttgaaaagaggaagcagagacttgctgcaatcggagaggatcttttggcgattgctgctgatcaaccatttcgcttccctgccacatttacatttgtggtcagagcattctcagttctagatggtactgggaaaggccttcatcctaggtttcatattacagagattgctaagccgtgagtactttttgcattactagcatctgaatacttattcaaaaacacacaaagcttgcacatcttcacttattatgtactgtctatattttcatcttgaacttttctggtactgacttgaaatgtctgttaaatttgctagaaatgccaaggaattgctaagatttaatgacgctggtgttgaaatagttgtgaaggtgtgtggagagacatgtgtattcctcctatgacgaattccttaggctccatgaaggtaagcctgtcttaatgggcttgattgttgaacctgacttagtacttttatccatgtcacggcgttgaaccagacagtcactcatgtccttaggatattaacggtatacatcaacaattcattctattttaattgcttgcaaaacttttttggcccttcaaatgagttccacgcatcaagaagtcaagattccaggaggcctaaaataggagaggagggcgcagcttgattcaatccatgtcaagtcagaggctgctgcgaggtttgcacatgcaagtagaatttagatggtttattcaatttcggttgtaatgcttctgacagcagttgtatcagtcctcttgttcagcttccataataatgtactaaacttcagtttggtgtctatctcagtgtacctacactcagttggaaaacttcaaccacactgcaacaaggtttataaaaggtttgctatgaggaaaaacaaatttatgggctcaaacaaagtgtgatagtgaaagtcattttgcttccagcttaagaaccaagccaagaaaacagatatcaactgtgacgccacactcaaaagcttgtttggtgggagggacaaggttgggatgctggagatctccgagcttttgagccgtggcttcccgaaaatctccaagcttttgtggtccatggagccagggatggctctttggtaaaagacttcgttgtggatggcctcttttatggtccatgttaagtcccaagtcccactaggtggttaagcagaaaaatcttgtgatggcattaagactttcagactttgtttttgggtctgatgcatgtaaaaaggattcccagtgtttctgttgctcttgcgatcctgtgaggacacatatgagagaaatatttagtttgttgatggcaaa

SEQ ID NO: 220372 - DNA, 1444 bp, Zea Mays
atggagaaggcacttctcaggtactgtgctagctttctcactcctgacgacaaaaggatgatcctcgggatcaaggaccaggcaaagcaaatgatccaatcagaggtgcttcaagcaatggttcaaatgggtgtccttgttcctactggagatatgactgttgtcagaagaaccgctcaatttttccttaatagctttcaagagtgcctaatagcacaaaggaaggagagagaaatggcaaccgcagaactgggtttcaaaaagcaattaactaaggaggagaagtttgaaaagaggaagcagagacttgctgcaatcggagaggatcttttggcgattgctgctgatcaaccatttcgcttccctgccacatttacatttgtggtcagagcattctcagttctagatggtactgggaaaggccttcatcctagaaatgccaaggaattgctaagatttaatgacgctggtgttgaaatagttgtgaaggtgtgtggagagacatgtgtattcctcctatgacgaattccttaggctccatgaaggtaagcctgtcttaatgggcttgattgttgaacctgacttagtacttttatccatgtcacggcgttgaaccagacagtcactcatgtccttaggatattaacggtatacatcaacaattcattctattttaattgcttgcaaaacttttttggcccttcaaatgagttccacgcatcaagaagtcaagattccaggaggcctaaaataggagaggagggcgcagcttgattcaatccatgtcaagtcagaggctgctgcgaggtttgcacatgcaagtagaatttagatggtttattcaatttcggttgtaatgcttctgacagcagttgtatcagtcctcttgttcagcttccataataatgtactaaacttcagtttggtgtctatctcagtgtacctacactcagttggaaaacttcaaccacactgcaacaaggtttataaaaggtttgctatgaggaaaaacaaatttatgggctcaaacaaagtgtgatagtgaaagtcattttgcttccagcttaagaaccaagccaagaaaacagatatcaactgtgacgccacactcaaaagcttgtttggtgggagggacaaggttgggatgctggagatctccgagcttttgagccgtggcttcccgaaaatctccaagcttttgtggtccatggagccagggatggctctttggtaaaagacttcgttgtggatggcctcttttatggtccatgttaagtcccaagtcccactaggtggttaagcagaaaaatcttgtgatggcattaagactttcagactttgtttttgggtctgatgcatgtaaaaaggattcccagtgtttctgttgctcttgcgatcctgtgaggacacatatgagagaaatatttagtttgttgatggcaaa

SEQ ID NO: 220373 - DNA, 1337 bp, Zea Mays
ctggcagcaggtctcttatgacccacaagcgaggtttaaccagatagcagaccaaattgacaaggatgctgggatgacacggcttaacctattctcaccttgcaaaattaatgtgttcttgaggataacgggcaagagaccagatgggttccatgacctggcttctctatttcatgtcataagtttgggtgatactatcaaattctcattgtcaccaagtaaaagtagagatcgcctgtcaaccaatgttccaggtgtcccagttgatgaaagcaatttgatcatcaaggcactcaacctttaccgacagaaaactgggactaataacttcttctggatacatcttgataagaaggtcccaactggtgctggtcttggtggtggaagcagtaatgctgcaactgcactatgggccgctaaccagtttgctggctgcatagcttcagagaaggatcttcaagagtggtctggtgagattggatcagatatcccctttttcttttcacgaggagcagcatattgtacaggtagaggagagattgtccaagatatcccaaatcccttgccggaaaatttaccaatggttcttataaagccacctgaagcatgctcaactgctgaagtttacaagaatcttcttgtgctgcagcgattcaggttggaacaaacaagtcaagctgatcccatgaccctgctcgaggaaataactcagaatgggatatcacaagatgtttgtgttaatgacctagagcctccagcttttgaggtgttgccctcacttaagaggttgaagaaacgaattattgcagctggccgggatgattatagtgctgtttttatgtcaggaagtggaagcacaattgttggtattggttcaccggatcctcctgcattcgtgtatgacgatgaagactacaaggatgtttttgtgtcagaggcttgcttgctcactcgcgacgagaacgagtggtacagggaaccaatctcggccaatgccacgtctggcaaagaaggtttgcaagcctcggttgctgactgatttaagtcaggttctgtatcagttttgtgactattatacagatacaggatttgatcaacgcctcgacatggtaggaaagaacactacggtataggcggggattgttcacaagacaatctggttctggaatggaccattttcagtatagcaactattgatttgagcaacagtcagactaatggttccaggagaaatttatcccgtagatgtataaggatcaaatgaacaagggaaaatgactttctccgtgaatttttaacaatacaagcacacgtagttttgaaacaattatgcaaat

SEQ ID NO: 220374 - DNA, 1246 bp, Zea Mays
ctttattgctgaacctcactctgcagctgattctgggctctctgatgaccagggttcaaattctaaaaaacgcaagagaggaggtgaaagtgcacaaatttatcaatgacagcacttctagtaaaaggcagaaaaaagcgctcgagtatgatactgatgaggatgaatccatgaagtcagacagtgaggaaaacagagatgaagattcagatgaagctggtgacaaacaggaaggtgactatgtatctgggaaagaaaaggcagggaagttctcagaggtaaaagaatcttcaggcaaaaagaaggcaaacacagggagtggccaccaatcaggtcctccaaagaaaattatcagaagtccggtaaaaaaagtatcatccaagattcatgaggaaaaagaaagccccaataatagtgcaaaggttttttctaggaagaagaaacccacagcagaaaaggagatcaaagaaaaaaagtcatcaggcaaaaaggtgacaaagggtaaaggagaatccgttgaagcagttcttcccagcaaggatgatctgaggaagaccattactgaaatcctcaagaaagttgacttcaacacggcaactttcagtgacatccttaagaagcttgacaatcactataaaatggatctggccccaaagaaagaagccatcaaagttatgatccaagacgagttaaccaagttatcagaggaggacgaaggagagggagccggagacaccgagaagaaacagcagcagcctcaggcgaaggagatcgaggcatgaggattcgtggaaccccatagctgtagtagccgctgttaattatcctgtacttaatgtgtttgtttgcgtcgcctgtacaggcatctcgttgattatcgccgcaccaactcgagaacctcacccctgatcgtgtatgttatggggcatgatgtgtaggcagcctccacacctttttagctgactgatcggagagttactcctaggcaactcttgtttctagatttgcaaatggtgtctgaaactctgcgtttgctgcggcagaacgtgtacttaattgttcgtgataggtctgaataacacatggatggtatcagtctgtagcttattttttttacttgatccgtttcttctgtgggttgtgatttgtgaatgaccaaaagatggatgctgtattccagtttctgttctctcagagtaggcatgcaagaataacagctgaaccaaaccgagaaacagaacagtgg

SEQ ID NO: 220375 - DNA, 1728 bp, Zea Mays
gtcttgtctcgtctgccaacgcaccgcgacgtggcgtctggcgtggtcgagcctctagagaagcgagccgtgcccgtctctcccaatccactccgtactcggcgctcctcccccgtcgccgccggaaatcaggaagcccaagtgctctcttgggtgcgctcgtcgccggtggcagtgagccagtgatgcatcttcatctccggcttccttattaggatcagcccgtcgatcgatcatggcgtcgtcgagctcggctgctactactagtggtgacagtcagggtctcaaggctcgagatgcctgcatcgtcggcgtcgcccgcacgcccatcggcgcacttctcgggtcgctgtcgtccctccccgccaccaagctcggctccatcgccatccagggtgctctcaagagggcgaaggtcgacccggcgctcgtgcaggaggttttcatgggcaacgtcctcagcgccaaccttggccaggctccggcaaggcaggcagcccttggcgccggcttgcccaactccgtgccatgtaccaccgtcaacaaagtttgttcctcgggaatgaaggctgtcatgtttgcggctcaaagtattcagctggggatcaacgatgttgtggtcgccggtggcatggaaagcatgtcgaatgccccaaaatatgtggctgaagcaagacgaggatcacggttcggacatgatgtccttgttgatgggatgctcaaggatggcctgtgggatgtctataacgatttcccgatgggaatgtgtgctgaattgtgttcagaccagcactcaatctcaagggaggagcaggattcgtatgctatcctcagcaatgaacgtggcatagcagctcaggacagcggtgcattttcttgggagattgttcctgttgaaatttcttctggtagagggaaaccaccagttgttgttgacaaggatgagagtcttgcaaagtttgatccagtaaagctgaagaaacttgggccaacttttaagacgaatggttctgtaacggctggcaattcttctagtataagtgatggcgctgctgcaattgtccttgtcagtggagagaaagccaagaatcttggccttgaagttattgcaaggattacagggtatgctgatgctgcacaggcacctgagctgtttacgacagctccagcccttgccattccaaaggctatatcaaatgcagctcttcaaacttcacagatagattattatgaagtaaatgaggctttctctgttgttgctatagctaatcagaggcttcttggtatcccttccggaaagctaaacttaagtggtggtgctgtttccctgggccatcctatcggttgcagtggtgcacggataattgtcactttgcttgggattcttagacagaaaaatggaaaatttggtgttgctggagtttgcaatggcggcggcggcgcttcagccctcgttttggagctcatgtccgggtcaaatctgcggcgtcccccgtactccccgcctttcgcctgcacagcgacccacccacctgtaaagccggccccaatttggatgtccccttatcttgccgtccctatatatgcccccaattcgcttcatccacccagcaaatcccgatggaacaaacaagtttaaaaccgcgatgttgtttgacgatgttctaggtagttcaagattttttttagatatttttcatgtaccttatgttttctccaagctacgag

SEQ ID NO: 220376 - DNA, 1876 bp, Zea Mays
ctcgtctgccaacgcaccgcgacgtggcgtctggcgtggtcgagcctctagagaagcgagccgtgcccgtctctcccaatccactccgtactcggcgctcctcccccgtcgccgccggaaatcaggaagcccaagtgctctcttgggtgcgctcgtcgccggtggcagtgagccagtgatgcatcttcatctccggcttccttattaggatcagcccgtcgatcgatcatggcgtcgtcgagctcggctgctactactagtggtgacagtcagggtctcaaggctcgagatgcctgcatcgtcggcgtcgcccgcacgcccatcggcgcacttctcgggtcgctgtcgtccctccccgccaccaagctcggctccatcgccatccagggtgctctcaagagggcgaaggtcgacccggcgctcgtgcaggaggttttcatgggcaacgtcctcagcgccaaccttggccaggctccggcaaggcaggcagcccttggcgccggcttgcccaactccgtgccatgtaccaccgtcaacaaagtttgttcctcgggaatgaaggctgtcatgtttgcggctcaaagtattcagctggggatcaacgatgttgtggtcgccggtggcatggaaagcatgtcgaatgccccaaaatatgtggctgaagcaagacgaggatcacggttcggacatgatgtccttgttgatgggatgctcaaggatggcctgtgggatgtctataacgatttcccgatgggaatgtgtgctgaattgtgttcagaccagcactcaatctcaagggaggagcaggattcgtatgctatcctcagcaatgaacgtggcatagcagctcaggacagcggtgcattttcttgggagattgttcctgttgaaatttcttctggtagagggaaaccaccagttgttgttgacaaggatgagagtcttgcaaagtttgatccagtaaagctgaagaaacttgggccaacttttaagacgaatggttctgtaacggctggcaattcttctagtataagtgatggcgctgctgcaattgtccttgtcagtggagagaaagccaagaatcttggccttgaagttattgcaaggattacagggtatgctgatgctgcacaggcacctgagctgtttacgacagctccagcccttgccattccaaaggctatatcaaatgcagctcttcaaacttcacagatagattattatgaagtaaatgaggctttctctgttgttgctatagctaatcagaggcttcttggtatcccttccggaaagctaaacttaagtggtggtgctgtttccctgggccatcctatcggttgcagtggtgcacggataattgtcactttgcttgggattcttagacagaaaaatggaaaatttggtgttgctggagtttgcaatggcggcggcggcgcttcagccctcgttttggagctcatgcaaccctcttcgcatatccattcatcattgtgaagttggtgcgagcaaattagcaagacaaaatttgtaaaatgtgctgtatctgtcgtgctgctcagcacagggcattatcttgtactcccttatatgggaaaatatagacgtatatatacccatggaaataacagaggcccggaagaataatgtacagacactgatacagccactgaaagaagacatgggtagtgaacaatctgcgtggacgtgattttgccttgccattttatgttggggcaattgtgagtgcagttgtaagaatctttatgaggaagattcttcaataggcaacaccgaattgaattggtgtaacgtgtgccccaacatgaaatgtaatcatcagcgcaattatcctgtcaactggagacaggacaggaca

SEQ ID NO: 220377 - DNA, 2138 bp, Zea Mays
cgcgacgtggcgtctggcgtggtcgagcctctagagaagcgagccgtgcccgtctctcccaatccactccgtactcggcgctcctcccccgtcgccgccggaaatcaggaagcccaagtgctctcttgggtgcgctcgtcgccggtggcagtgagccagtgatgcatcttcatctccggcttccttattaggatcagcccgtcgatcgatcatggcgtcgtcgagctcggctgctactactagtggtgacagtcagggtctcaaggctcgagatgcctgcatcgtcggcgtcgcccgcacgcccatcggcgcacttctcgggtcgctgtcgtccctccccgccaccaagctcggctccatcgccatccagggtgctctcaagagggcgaaggtcgacccggcgctcgtgcaggaggttttcatgggcaacgtcctcagcgccaaccttggccaggctccggcaaggcaggcagcccttggcgccggcttgcccaactccgtgccatgtaccaccgtcaacaaagtttgttcctcgggaatgaaggctgtcatgtttgcggctcaaagtattcagctggggatcaacgatgttgtggtcgccggtggcatggaaagcatgtcgaatgccccaaaatatgtggctgaagcaagacgaggatcacggttcggacatgatgtccttgttgatgggatgctcaaggatggcctgtgggatgtctataacgatttcccgatgggaatgtgtgctgaattgtgttcagaccagcactcaatctcaagggaggagcaggattcgtatgctatcctcagcaatgaacgtggcatagcagctcaggacagcggtgcattttcttgggagattgttcctgttgaaatttcttctggtagagggaaaccaccagttgttgttgacaaggatgagagtcttgcaaagtttgatccagtaaagctgaagaaacttgggccaacttttaagacgaatggttctgtaacggctggcaattcttctagtataagtggagagaaagccaagaatcttggccttgaagttattgcaaggattacagggtatgctgatgctgcacaggcacctgagctgtttacgacagctccagcccttgccattccaaaggctatatcaaatgcagctcttcaaacttcacagatagattattatgaagtaaatgaggctttctctgttgttgctatagctaatcagaggcttcttggtatcccttccggaaagctaaacttaagtggtggtgctgtttccctgggccatcctatcggttgcagtggtgcacggataattgtcactttgcttgggattcttagacagaaaaatggaaaatttggtgttgctggagtttgcaatggcggcggcggcgcttcagccctcgttttggagctcatgcaaccctcttcgcatatccattcatcattgtgaagttggtgcgagcaaattagcaagacaaaatttgtaaaatgtgctgtatctgtcgtgctgctcagcacagggcattatcttgtactcccttatatgggaaaatatagacgtatatatacccatggaaataacagaggcccggaagaataatgtacagacactgatacagccactgaaagaagacatgggtagtgaacaatctgcgtggacgtgattttgccttgccattttatgttggggcaattgtgagtgcagttgtaagaatctttatgaggaagattcttcaataggcaacaccgaattgaattggtgtaacgtgtgccccaacatgaaatgtaatcatcaggtatggacgtattacagtacaacacactcctgtgcaacagcttctatgttaggtaacaaagctacttatccaatggtagattccgatgacaaattatgagctgctcatagttaaggttaagaagaggcgcaggtcagtgactacgcacgctacaaattcgcccaggcgtgcaactgaatcattacagattttggtttttgaaattggcacaagcgatgctgtttgcggattagcagaagccagaattaagcattggccgtagaaattcagcagtaaacagcaactctgccagagggaaagaaaaaagaaattcgagaccacagtccttcaaagctttattacccg

SEQ ID NO: 220378 - DNA, 1466 bp, Zea Mays
cgcgacgtggcgtctggcgtggtcgagcctctagagaagcgagccgtgcccgtctctcccaatccactccgtactcggcgctcctcccccgtcgccgccggaaatcaggaagcccaagtgctctcttgggtgcgctcgtcgccggtggcagtgagccagtgatgcatcttcatctccggcttccttattaggatcagcccgtcgatcgatcatggcgtcgtcgagctcggctgctactactagtggtgacagtcagggtctcaaggctcgagatgcctgcatcgtcggcgtcgcccgcacgcccatcggcgcacttctcgggtcgctgtcgtccctccccgccaccaagctcggctccatcgccatccagggtgctctcaagagggcgaaggtcgacccggcgctcgtgcaggaggttttcatgggcaacgtcctcagcgccaaccttggccaggctccggcaaggcaggcagcccttggcgccggcttgcccaactccgtgccatgtaccaccgtcaacaaagtttgttcctcgggaatgaaggctgtcatgtttgcggctcaaagtattcagctggggatcaacgatgttgtggtcgccggtggcatggaaagcatgtcgaatgccccaaaatatgtggctgaagcaagacgaggatcacggttcggacatgatgtccttgttgatgggatgctcaaggatggcctgtgggatgtctataacgatttcccgatgggaatgtgtgctgaattgtgttcagaccagcactcaatctcaagggaggagcaggattcgtatgctatcctcagcaatgaacgtggcatagcagctcaggacagcggtgcattttcttgggagattgttcctgttgaaatttcttctggtagagggaaaccaccagttgttgttgacaaggatgagagtcttgcaaagtttgatccagtaaagctgaagaaacttgggccaacttttaagacgaatggttctgtaacggctggcaattcttctagtataagtgatggcgctgctgcaattgtccttgtcagtggagagaaagccaagaatcttggccttgaagttattgcaaggattacagggtatgctgatgctgcacaggcacctgagctgtttacgacagctccagcccttgccattccaaaggctatatcaaatgcagctcttcaaacttcacagatagattattatgaagtaaatgaggctttctctgttgttgctatagctaatcagaggcttcttggtatcccttccggaaagctaaacttaagtggtggtgctgtttccctgggccatcctatcggttgcagtggtgcacggataattgtcactttgcttgggattcttagacagaaaaatggaaaatttggtgttgctggagtttgcaatggcggcggcggcgcttcagccctcgttttggagctcatctccatgtcaccgtcggatctag

SEQ ID NO: 220379 - DNA, 1996 bp, Zea Mays
cgcaaccctccattataacgcccaaaatacaggcggaaaagcaagaagcgtgaccacttccttatcgtctcctcctttcctcccctcaactccaatcgaatcgctcgaaccattcccaggtttgtgcgtcgatctaggcttgcgcgaggatccaattgcatcccgctcccctttgagcttgtgatcttgggagccggagttcttcgcgagcctcctcccacccccacccccaccccaccccccgatttcttttggtttatttgtgcgagttttctcaagagcagaaaaggctgtttgcaattccggtgcactcaggcctcaagatccaactctgaggcctttcccgcgctatccgcatcgatctacgcaagaggatgggcaacgcgggtagcaacggtggaggcgctgccgctggtcaccgccgtcggagctccggccacggccaccaccaccaggcgccgccgcctcaccagccgcaggagactgcggccaaccgctacgtgttcgcggccgccacgccgtacccgccccagtaccctaaccccaacccgccgcagtactacccgcagtacgggaactactacccaccaccaccaccatccgtgccggtgccccttccggcgccgtacgaccaccaccacaggccacccaccgccgcccccggcgagttcccgcccccgcccctcacccacccccaccactaccctggctgggctgggcggtatccctcctacggacaacatctgcctatgcccactccctacgttgagcaccagaaggccgtcactatccgcaacgacgtcaaccttaagaaggagacgcttaggatcgagcctgatgaagagtgccctggccacttcctcgttgccttcacctttgacgccacggtcgctggcagcatgactgtttacttgtttgcaaaggaagagctcaactgcaatctaacagcagtgaaagaagacctaatgaagcccgttactgttagcttcaaagagggtcttggtcaaaaattcaggcaaccttcaggaacaggaattgacttttcagtgtttgaagaatcagatttattaaagcagggggacatggatgtatatccacttgcagttaaagctgaaacaacattgcttgttgatcacccaccagaaggggatgaccaaaagatgaaaactcctaactcacagatcacccaggccgtgtttgaaaagaaagaaaatggggattatcatgtaagagttgtttgccagatcctttgggtcaatggaactaggtatgaactgcaagaaatatatggcatagggaactccgtggaaggtgatgctgatgcaaatgatccagggaaagaatgtgttatttgcctctcagaaccaagggatactactgtcctcccatgtaggcatatgtgcatgtgcagtgagtgcgccaaggtcctgaggtaccaaaccactcggtgccccatctgcaggcagcctgttgagcgtctcctcgagatcaaagtgaacaacaaatctgaagatcagcaacagatgccccaatcgccaccgctcccagcactggatccgcagcaggaagaggttctggcatggctttgccgacctctgctgtatctgcctatctggaggtgggagaccaagatgccaagaagagtgtgtaccatatatacaccatgcatgcgtgtgccatggctaccttaagaagcgtagcgaggaggattcctcatttctggttgacttcctccaggaaaccaggggaagagaaggttgtctcataaatttgtacaaaaaatgactatttcaccttgattacatgccttctctgttatgccctgaaaagtcgatgattattttccttgtgccagtcataaaacattccaagtgcaatagctcgtctggtggtgagagattttgtgtgactaaggcccgagggactaatctttagtccttggcttttagatggtgtttggtttagacatagttaagggatgacaatgagatatctt

SEQ ID NO: 220380 - DNA, 666 bp, Zea Mays
atgcctgcccctatcagcgtctattcctcctcgtcctcctgctctttaactaccctggtacgacgggtcgggatgcggagcggataacgcgcgtcggccgtgcaggcaggcaggcagccaaggaggcgaagcggccgccgtgccgaggaaacagacgcccagccacccaggtggagcgcgggacccacggcctggagccgtccgtggtgacgaccttccccaccgtcaagctcggcgacggcggccagcaaccgccgccggtgcaggaggaatcgcagtgcaccgtgtgcctggaggagtacgaggccaaggacgtggtgcgcgtgctgcccgcctgcggccacgccttccacgcgacctgcatcgacgcctggctgaggcagcaccccacctgccccgtctgccgcgcctccctgcgcgccaggaacggctgccgcgccacgccggtcgactacagcctcctcgtcgccggcgccgacgccgcagccaccgtccagcatgttcccgcgtcctcgtccggcgcgtcaccgcaggcagtcggacgccagcgacagaccgacgacactgggcgggcggatggcttgctggagatcgtctccgaagagcccgcctcctcgcgagatccgagccctgctgttgctgctgctggttggtaaccattctctt

SEQ ID NO: 220381 - DNA, 1075 bp, Zea Mays
cttgctaatccgacgacgacgacgagcgagcgcattaacaacgggaatagattccctgcctccggatatgattatcgccgtgtccccagcggtcgacaacaagcgagcatagattattagtaatcgcgattaggaggagctaaaaactaaacaacttcccacaggcgcggcagacgcagagggcagagcacactcgccgtcgccgtcgccgtcgccatgcctgcccctatcagcgtctattcctcctcgtcctcctgctctttaactaccctggtacgacgggtcgggatgcggagcggataacgcgcgtcggccgtgcaggcaggcaggcagccaaggaggcgaagcggccgccgtgccgaggaaacagacgcccagccacccagacggccgcgccggttctgagatgctggagcgatgtcagattccaagggcggcgccggcggcatgggcatgaacatggtgaccacggtgatggccttctcggtcagcgccttcttcgtgctcttcgtcttcaccaggctgctctgcgcgcgcctccacctgtccagggccgccgccgccgcccagggctacaacgtggagcgcgggacccacggcctggagccgtccgtggtgacgaccttccccaccgtcaagctcggcgacggcggccagcaaccgccgccggtgcaggaggaatcgcagtgcaccgtgtgcctggaggagtacgaggccaaggacgtggtgcgcgtgctgcccgcctgcggccacgccttccacgcgacctgcatcgacgcctggctgaggcagcaccccacctgccccgtctgccgcgcctccctgcgcgccaggaacggctgccgcgccacgccggtcgactacagcctcctcgtcgccggcgccgacgccgcagccaccgtccagcatgttcccgcgtcctcgtccggcgcgtcaccgcaggcagtcggacgccagcgacagaccgacgacactgggcgggcggatggcttgctggagatcgtctccgaagagcccgcctcctcgcgagatccgagccctgctgttgctgctgctggttggtaaccattctctt

SEQ ID NO: 220382 - DNA, 2112 bp, Zea Mays
cactgacccaaccgtgtgactgtgtgagtctgactctgatcgctgccaaggtctcaagtctcaacgcgatgttgcgaggaagctgtggcccacctgcctctcttttttctaccacaccggcacacccacaccttcccacaaggccggaggtgagccccgcatccgcggccaagtacccatgacgacgaggctgacagcgacgttgttgctctccagaaccctcgtccgccgcgtaacctcgcgaaccccgacacccctcggccctttcggtctcgaaccatccgcaggaatccccatctcctggtccagacgcgcctcctcgaccgcctcgggagatcggggccaggaaccgccaccggccatggattcgcctatcaaggtggtttctcacctggggggcggacgaggaggaggagggggagagggagagggagagggagagggaggggccgcagcgatcgacgcggggaagtcggcacggaggccgctcagcctgtggcccgggatgtaccactccccggtgaccaacgcgctctgggaggcgcggtccagcatcttcgagcggatgatggacgctgggaacggcgcttcctctgccgagcagcggccgcagactgagctgctcgtcaagacgcccgcgcagagccggaccagcatcgtgtacaagttcgccaccgacgacatcctcagggagcagtaccgggacccctggaacgaggtgcgcatcggcaagctgctcgaggatcttgacgccctcgccggcaccatcgccgtcaagcactgttcagatgaagacagcacaacaagaccccttttggttgtgactgcttccgttgacaaaatggagctgaaaaagccaattcgtgtggacactgatttgaagatagctggcgctgttacttatgttgggcgttcatcaattgacatacagattgaagtgactcaggttgataaagatggcgataatcagtctgatcccattgcattgaccgctaacttcacctttgtcgcacgcgattctaagactggaaaatctgctccggttaaccgcctttcacctgaaaccgaaagagagaagcagctatttggagaaagtgaagcacgcgataagatgagaaaaaggaagagagaagaacagaagggaggactcgaaaatgggatacataggctccgtgccgaggccgagaggctggacgtgttgctcgcggagggccgtgttttctctgacctgcctgctttggccgatagagatagcatcttgctgaaggatacccgcctggagaattctcttgtctgccagccccaacaacggaacttgcatggtcgaattttcggtggtttcctgatgcaccgagcatttgagcttgccttctcgactgcgtatgcttttgttgggcagagaccttgtttccttgaagtcgatcatgttgacttcttgaaaccagtggacgtaggggacttccttcgattcaaatcatgtgtcttgtacacccagcttgacaatccagagcagcctctggtcaacgtcgaagttgttgctcatgtaacaagacctgagctccggaaaagtgaggtctccaacaccttccatttcaccttcacggtctgtagtgacacgctgaagaacgggttgaagattcgcaatgttgtcccctcgaccgaagaagaggcgcggcggatattggagcgcatggaggcagagggtttatgcaactaatctttccgcagatccacttgtttcggagttcggacgtgctttacttgatatatgtctcacttaccgttccacggtaccagctaaaacggggggatttggcgacgatttgagcagcagccagcagctatcataacacgccggcaatagaacggcatagctgtagctccatgcctccatggtactatttgtgattttttttacagagaccgcatgttgcgtataataacatactcctcgagactcaaaatgttcttttgagaaagcatcaaagcactatcgtttttttttatttgctcttgaaatggacggcggccgttcccatgactccaagaaccatgagtcccttttccccagttgcctttggcatcatcgctttgtcaaagggtcttgtcggt

SEQ ID NO: 220383 - DNA, 1418 bp, Zea Mays
acgcgatgttgcgaggaagctgtggcccacctgcctctcttttttctaccacaccggcacacccacaccttcccacaaggccggaggtgagccccgcatccgcggccaagtacccatgacgacgaggctgacagcgacgttgttgctctccagaaccctcgtccgccgcgtaacctcgcgaaccccgacacccctcggccctttcggtctcgaaccatccgcaggaatccccatctcctggtccagacgcgcctcctcgaccgcctcgggagatcggggccaggaaccgccaccggccatggattcgcctatcaaggtggtttctcacctggggggcggacgaggaggaggagggggagagggagagggagagggagagggaggggccgcagcgatcgacgcggggaagtcggcacggaggccgctcagcctgtggcccgggatgtaccactccccggtgaccaacgcgctctgggaggcgcggtccagcatcttcgagcggatgatggacgctgggaacggcgcttcctctgccgagcagcggccgcagactgagctgctcgtcaagacgcccgcgcagagccggaccagcatcgtgtacaagttcgccaccgacgacatcctcagggagcagtaccgggacccctggaacgaggtgcgcatcggcaagctgctcgaggatcttgacgccctcgccggcaccatcgccgtcaagcactgttcagatgaagacagcacaacaagaccccttttggttgtgactgcttccgttgacaaaatggagctgaaaaagccaattcgtgtggacactgatttgaagatagctggcgctgttacttatgttgggcgttcatcaattgacatacagattgaagtgactcaggttgataaagcagatggcgataatcagtctgatcccattgcattgaccgctaacttcacctttgtcgcacgcgattctaagactggaaaatctgctccggttaaccgcctttcacctgaaaccgaaagagagaagcagctatttggagaaagtgaagcacgcgataagatgagaaaaaggaagagagaagaacagaagggaggactcgaaaatgggatacataggctccgtgccgaggccgagaggctggacgtgttgctcgcggagggccgtgttttctctgacctgcctgctttggccgatagagatagcatcttgctgaaggatacccgcctggagaattctcttgtctgccagccccaacaacggaacttgcatggtcgaattttcggtggtttcctgatgcaccgagcatttgagcttgccttctcgactgcgtatgcttttgttgggcagagaccttgtttccttgaagtcgatcatgttgacttcttgaaaccagtataaacatgtcgttgtcaggggcggaccgacg

SEQ ID NO: 220384 - DNA, 1388 bp, Zea Mays
cgtgaaccaatactacgtagctgcctgtgcctctttctggctccctgctgtctgcctggccggtgctcctgctcacagacacgcgcaagatggccggacgcacggaggaggctcgcaggagcggggagagggagacggtgtgcgtgacgggcgccggcgggtacatcgcctcatggctcgtcaagctcctcctctcccgcggctacgccgtgcacgccaccgtccgtgacccgcgtgatcccaagaacgcccacctggggcagctggaatgggccgcggagaatctccggctgttcaaggccgacgtgctcgacagcgacgcgctggctgccgcagtctccgggtgccggggggtcttccatgttgcctgtccggtgcccacggatagggttcttgatccggagtcagaagtactggctcctgctgtgcaaggtaccttaaacattcttcaggcttgctcagctaataatattcagaaggttgttgtggtttcgtctaccgccgctgttcatttcgacccaaattggcctccacatagacctaaagacgaggattgctggtcggacataaacttttgcaaaaagaacgaggactggtatatggttgccaaggttattgctgaaaagacagccctagaatacggagagagaaatggattaaatgttgttacagtttgccctactatggctttaggaccgctcttgcggcctatgctcaatgtcagccatgaattcctcatgtacattattaaaggaggtcctactatgatgaagaacattccatggcacatagttgatgtccgagatgtggttgatgctttgcttatggtatacaagaaagaggaatcgacagggagatacatctgtgcaccaaattgcatcagtgcaaaagatctggtgaacatgctgaagagggattatcctaattacaattatcgacaatgatatggtgcttaactctatagttacaccacttatgtcggagaaactgaagaatttgggctggaaaccaatgaagacactagaggaaacattattggatagtgttgaatgctataagaagatggggcttctaaaagatgctgagggatgcccttgtcgtcttcctcacctttttcatatggctatagaaaaatgaagaatactcaccattgcttcttgtgttacctaattactctttgaacattgttgggtatgtgttctaatcacacaccaataatgttgacattcaatgggttgtggttgatttgaaataaatgtttggtttcttatgtaatctatatggaacaaagtgcacctttcactttttttgtatggaagttgtcatgcatcttttttctcaaagcagatggaagacacatcacccattttacagcagaactagcctag

SEQ ID NO: 220385 - DNA, 1644 bp, Zea Mays
aacgtgggacctactacgtcagtatccgatctccggctccggccggctacctcgtctacggctctccaccctccaatcctccatagccacccctcattctccgatggcatcagccgtctgcgccgaatcggcagctcgagctcggcattctcctcgccacagcctccgttcactagcaggtgtaatgcaatagcaaacatggaataaatgggaggtacaaccatgcaactcaagcacgcctggttgactgacaccaaaggaaaataaccatgcatccagatcgatgactcaatactcagcttcctcgtcctcatcttcaacttcagctccgacttcctcataatccttctccagtgctgcaagatcctcccttgcctctgagaactccccttcttccatcccttcaccgacataccaatgaacgaatgcacgtttggcatacatgagatcaaacttgcggtcaatacgagagaagacctcagccacggctgtgttgttgctgatcatgcagactgctcgttgcaccttggccaggtcccctccagggactacagttggtggttggtagtttatcccacacttgaaaccagtagggcacctgtgcatgagacagcagagaaagacattcatgtctcgcgcagctatcttttcagtggaagattacaatctataatctgatataacttggtaagagttgtgagcatataccaatcaacaaactgcactgctctcttggtcttgattgaatggacagcagcattcacatcttttggaacaacgtcgccacggtacatcaaacagcatgccatgtactttccatgcctgggatcacattttgccatcacacttgatggctcaaacacagaatttgtgatctcaggaacagagtgttgttcatggtaggccttttccactgagataattggagcatacgaagagagcataaagtgtatgcggggataaggcacaaggttggtctggaactcagttatgtcaacattaatagctccttcaaacctcagagaggtagtcagagatgatataacttgtgatataagcctgttcagattggtgtatgttggacgctcaatgtcgagggacctcttgcatatgtcatagatagcttcattgtcaagaagcacaacaacatctgtgtgttcaatcaaggaatgtgtggagagcacgctgttataaggctcgaccacagcagtcgagatctgcaatgaaaatggtttcagtacagagttcttgtacattacaatgacaggggtgtcatcgactcttaagagaagatttttagaggtcagagcatccagcgaagtttctctagcttttagagtgctgtctgtgatcaacaagtaaagatcttcctcaggattatctcaaaaacccaaccttttgaggcgactgctacaagaacccagatggcagccctatcttaaataattatctgagctggaactggaataatcatctcagagagaagtacagaacaaaatctgacataattctcaaggaaaggatgagttggaatggaaaggggcctcacctgggcatgaggccgtcaggctggataccgtgctcgaggcagtagagctcccagcaagaattccctacctggatgcctgcctgcccgatatggat

SEQ ID NO: 220386 - DNA, 1313 bp, Zea Mays
aacgtgggacctactacgtcagtatccgatctccggctccggccggctacctcgtctacggctctccaccctccaatcctccatagccacccctcattctccgatggcatcagccgtctgcgccgaatcggcagctcgagctcggcattctcctcgccacagcctccgttcactagcaggtgtaatgcaatagcaaacatggaataaatgggaggtacaaccatgcaactcaagcacgcctggttgactgacaccaaaggaaaataaccatgcatccagatcgatgactcaatactcagcttcctcgtcctcatcttcaacttcagctccgacttcctcataatccttctccagtgctgcaagatcctcccttgcctctgagaactccccttcttccatcccttcaccgacataccaatgaacgaatgcacgtttggcatacatgagatcaaacttgcggtcaatacgagagaagacctcagccacggctgtgttgttgctgatcatgcagactgctcgttgcaccttggccaggtcccctccagggactacagttggtggttggtagtttatcccacacttgaaaccagtagggcacctgtgcatgagacagcagagaaagacattcatgtctcgcgcagctatcttttcagtggaagattacaatctataatctgatataacttggtaagagttgtgagcatataccaatcaacaaactgcactgctctcttggtcttgattgaatggacagcagcattcacatcttttggaacaacgtcgccacggtacatcaaacagcatgccatgtactttccatgcctgggatcacattttgccatcacacttgatggctcaaacacagaatttgtgatctcaggaacagagtgttgttcatggtaggccttttccactgagataattggagcatacgaagagagcataaagtgtatgcggggataaggcacaaggttggtctggaactcagttatgtcaacattaatagctccttcaaacctcagagaggtagtcagagatgatataacttgtgatataagcctgttcagattggtgtatgttggacgctcaatgtcgagggacctcttgcatatgtcatagatagcttcattgtcaagaagcacaacaacatctgtgtgttcaatcaaggaatgtgtggagagcacgctgttataaggctcgaccacagcagtcgagatctgcaatgaaaatggtttcagtacagagttcttgtacattacaatgacagctcagggtgaggggaacatgtcacacctgtgtaatgtccacgggcg

SEQ ID NO: 220387 - DNA, 3034 bp, Zea Mays
atgggggcgattggaggtgacgagcaggtgcagttggacaatgtggatggggccgaggtggccaatgacggcggtgcaggtgctgcgggaaggctggagaagatactggtctctgtgaggctgagaccgctcagcgacaaggagattgcaaggagggacccggcggagtgggagtgcatcaacgacactaccatcatctcccggagcaccttcccggaccggcctactgctccgactacgtattcatttgatagggtatttcgttctgactgtaataccaaagaagtatatgaggaaggggccaaagcagttgctctctctgtacaagtgtttttgcatatggtcaaacaagtagtggaaaaacatacaccatgactggaataacggaacatacagcagcagatatctatgattacattggcaagcatgaagagagagcatttgtattgaaattttcagcaattgaaatatataacgaagttgtaagggatcttcttagtgcagaaaacacatcacttagactttgggatgatgcagagaagggaacatatatagagaaccttacagaggtgatcttgagggatttggaccacctgaaagaacttatttctgtgtgtgaagctcaaaggaggaccggcgagacatacttaaatggaaacagctccagatcacaccaaatacttaaactgactattgaaagttctgctcgtgagttctcaggtaaggacaagtcaacaacacttgttgctagtgtgaacttcgttgatttggctggaagtgaacgtgcatctcaggcattgtcagttggggctaggctgaaggaaggttgtcatattaatagaagtctacttaccctaggaactgtgatccggaaactaagcaaggtaagaaatgggcacataccataccgagattcaaagctcacacgcatattacagatttctctaggaggcaatgcaagaacagcaattatttgtacaatgagcccagcccgaagccatatggaacagtcaaggaataccttgttgtttgcaagttgtgcaaaggaagtggtgacaaatgcccaggttaatgtggttatgtctgataaagcattaattaagcaattacaaaaagaacttgcaaggttggaaagtgaattgcgatgcccagcttcatatcctggtcttgaagcattagtgaaggaaaaagataatcaaatcctggagatggagaaagaaattaaggaactgaagttacaacgtgatgtcgctgaatctagactgcaagatctgctcaaggttgttggagataaccatggttcaaagcaccccctggcttcttctggaagaaactttgatgttcctcagccatgtgaggatgagcaatcgacgacatcagaagttgtcagcagtggccaaaattttaggcttcaaggacgccagacaacacaaagagattataggttacagcaatctgaaaatgatgtgcagtttgctacctctcttagctgttcagtcagcagtcccccgttcagtgggatgcccccaactaatggcagagatgataactctcaaatatctaatgaagattcaggggatctttgcaaagaagtacggtgcatagagaccaatgaaacagaggaaaacaaatgtttagagtcgtcagctgtgggaagcactagtctgcaagattcaaatgtagcttccagcatgcatgggaacaacaatacaaatcgatctgtgaattctagacagcatgatgagtctcctattaccctggagcaacatttggagaatgccaataattcgttagccaatcttgggatggatctgggatcctctacaggtaattcaccaagctcaaaagtaattgacagaagcaggagctgtaggtctctgatgggttctaccttgttggaagacttggagaaacaagattgcacccctccaagcagaagttttgtggactacccagggagacccgaaacatgtcaaagaagggtacctgcactgaactatgatgtagagagtgaaactttatccagaacaggatcaatgctatctgaaattattaccgcgagggacggactgaaggaaaacagctctattgctggtgatacagaatctgttgctggcataggtgaatttgttgcggagctaaaagaaatggtccaggcacagtatcagaagcaacgtggtaatcagggtgatgatggagaattggctgaagggaccataaggagcgtggggctagatcccattatggatgacttgcaatcaccatctcgctggccattggatttcgagaagaaacaacaagagatcattgacctgtggcatggatgcaacgtttccttggtccacaggacttactttttcctgctgttcaaaggggacccagccgacgccatttacatggaagtggagcttaggaggttatcatttctcaaaaatacatactccaacggaagcatggggcgtaatgtggtagcaggcagcgtgagcgcttctctggttttaaggcaaagaaactgcaacgtgagagggagatgctctgtaggcagatgcagaagcggctggcgatccaggaacgggagagcttgtacaccaagtggggagtctcactgtcctccaagaggaggcggctgcaggtcgctcggcgcctttggacggagaccaaggatctggagcatgttagggagagcgcgtccctcgtggccagactgatcgtgctcctggagcctgggaaggcgctgagggagatgtttggtctgagcttcgcgccgcagcagttcacccggagatcgcacaatagttggcgatatggccgttcttctctagactgactgaactcgaaaaactaagctgagggggaaaaacgttccgtccttttgtttttgtgtaatagattgttgccctcttggaaatagaaatccctgattccgagtccgttgcaacgccgtaatgtgactaactatcagatggatatacatttgatcgatgtgtgatgatgtgtccagggcgcacaaatcggaaaacaaacagagcaattg

SEQ ID NO: 220388 - DNA, 485 bp, Zea Mays
ttgcaggttaaggtccagccgaagaaggttattcaaccgaagaaaagtacacaacctgctaaacaggagtccagtgatgacagcagctctgagagctcctcagacgatgaacctccacaaaagaaaactaagaattctgcaccttctggtgctgcaaaggctgccactaatgtttcaaagaaaaaaagcagcagtgatgaagatgatgaaagttcagaagaaagctctgatgatgaggatacagaacaagttgaaactaaggaaacttctgtagtcactacccagaagccggcacataatgaacctaaaactcctgccaaaagccaaagtcaggctactggttcaaagactatttttgttgggaatttagcctacagtatagagcgtgaacaagttaaggaattttttgaggaggctggtgaagttgttgatgttcgtttggctacttttgatgatgggagtttcaagggttttggacatgttcc

SEQ ID NO: 220389 - DNA, 1084 bp, Zea Mays
cgcagacgcagaggcaggtcctttcacatgcccacgacgcacagcctttaccaccgctgctctgctcccctcaaagccaaggccagtagaaaccagcccagcttgctctctctgctcttccccctcacacttctccctcgctcatcactcatagtcacacagtcacactacagagcccagagccctagtgtcctcccctcccctccccatggcccctcaccgcctcctccagcttctactgctcctcgccgccgccatgaccaccgcccggtcccagacccagtcaccagccgccgcgccatccacctcaccctcctctaccgccgccgccgccccaagcccctcatcctcctcctccccgccgccctccaaggacacccacatctccacctcgcccgccgcgtccccgtcctcctcctcgccgccgcccgcattgccgcccccggccgcggcgccggcgccggcgcccgtgggcgcgagcgcccctccgcccgccgcgtcctccccgccggtcccagcgccgacgctcgcccccgcgccgtcgtcgtcccctccggccccggcgcccgtcctcgcggcgcccgcgcccgcgcccagcaagaagccgacgccgacgaagaagaagcacgcgccagcaccgctcgcggccgcgtccccggccaccggcaccggcaccggcgtgggcctcgcccccggccctggcccctccaccgccgacatgatgagcggagcggcgcggggctgcggcgggtgggcggcgacggcgacggcggcgctggttcttctggccgcgtcgctgacggtgggtccgatggtggcgtgatggatggtagagccacctgtcagggtcgagagagtggtgggttgatgtgatgggatctgcatgggtagtacgtgcattggttcaaacacgctgtattttgtgctactgccgcacgtcacgttattattctctgcgtggagttgacgcccagaatatatagtaccaccactattatattttgtttgctattgtacaacattttcatgcttgattacttctaccgtgcctatgatggtcatttgcttctgtcctttttttttc

SEQ ID NO: 220390 - DNA, 384 bp, Zea Mays
cggggcgtgggtctgggattctggagcggagcggcgcggggctgcggcgggtgggcggcgacggcgacggcggcgctggttcttctggccgcgtcgctgacggtgggtccgatggtggcgtgatggatggtagagccacctgtcagggtcgagagagtggtgggttgatgtgatgggatctgcatgggtagtacgtgcattggttcaaacacgctgtattttgtgctactgccgcacgtcacgttattattctctgcgtggagttgacgcccagaatatatagtaccaccactattatattttgtttgctattgtacaacattttcatgcttgattacttctaccgtgcctatgatggtcatttgcttctgtcctttttttttc

SEQ ID NO: 220391 - DNA, 1695 bp, Zea Mays
cgtgaacatgtcccttagcgcaagttttagaggttggttgtggagctgggaacacaatctatccattgctttctacatacccagatatttttgtccacgcctgcgatttttctccacgagctgtcaatttggtcaagaaacacaaggacttcaaagctgaccggataaatgcatttgtttgtgatattgcatcagaacaactaaccgagaatgtggaaccttcttctgctgacattgtaacgatgttgcaccagataaaatgcctatagttctggagaatgttagaagtgtcttaaaacatggtggccgtgttctttttcgggactatgccttcggtgaccttgcacaggaaagactgatgtcaaagggccaacaaataagtgagaacttctatgtcagaggtgatggtacgcgtgcatattacttttcaaatgaatatctggtagatttattttcaaaatgtggacttactcttgaggagatatgtgtgcacaacaagcaagttgaaaaccgttcactggagctggtgatgaacaggaattggatccaagctaccttcaccctaaattcagctagtcctcaaggtccaaatggtcaacacgatctccttgcttacgaaggagaggatgataaggtagttactgacacatctaagaagaaaagcagcggtgaagaaatcgatctttctgaagatttttgcaacatgtttgggacatcacacagccttgatgaggtacaaatcattggggtgaaagcaaaaggccacgacttcaaaataagaatgctcaggaaggaataccagcacacctgcagatcaactggcttaatgctctgggaatctgctcaattcatgtgctgtcttttagcagagaacccttcgatcgttgcaagcaaaagggtcctggagttgggctgtggctcagctggcatctgctcgatggttgctgcaagtttcactccctttgttttagctacagatggggatgaagaatcactggacctccttagacaaaatatctcctcgaacatggagcctaatttgctgagcagaatcatggttaggaagttattctggggcaacgaagatgatatgaaggcagtccgagagcttcatggtaacggcgtgggttttgattgcataataggcaccgacgtgacatacaatcctgatgctatactccctctcttcaagactgctaggggagtgatttctgagaaagctaacgaggactcggtacctgctctcattctttgctacatccagcgacgagttgatgaggactccatcctttctaatgcaacgtcccagggtttcaggcttgtggacaaatggataaatggagttcacgagagtaacggtaccatcagttcttggttctctggtaatgatgtctgcagtgctttccggcatacagtactttcagtactgtacttcgagctgtgaatgctgctatgcatgtgcaaggttactgtataacctgaaggatttttgtagcagctgtatcaagcaacggcaaaccaactttgaatctttaggccttgtttaatgatttcaattttacgtgaatcggactgtactggaatggattgagatagattttgacttctatggatttaaattgacttagtgccatccaatccatatggattaacggtgaaacgaataagcccttactgtgtttttttatatttgtg

SEQ ID NO: 220392 - DNA, 4409 bp, Zea Mays
gcgcttttgtggacgacgccgtcgtcgccaggcagcttgcatgtggctctgcgctgcgcccttgtcttcctcttcctccccactccgcatctccagaaaattccgttattttactcccagtatttagcctcgacgattgctcgggactctctttacaggtcctatttcgcggtttcctcatcctcctaatcctaacctccttccctgttttattcttcctcgtcgagcctgattcccctgccgccaccgcggccagcgccgccctcgccgccggtcgccaccgccgccgccaccgtccactcctcgccctcacctaatctcactcggagggagaaaaaaaaaacctcgccctcgccgccgggttgagttgaatctgtggtcgctgggttgaattgaatcgatttagatccgtttatccctagttcgggtgcccgtgttctggaaggtggaagctttggttgggttttctcttccagagcattaatgtttctgagggcctaagatgctctatttgaagcagcccacgaggagctgagtctttgtgttttttttatcgttctctctcgtcgtctgttgatctgatcggatggaggctatgacgggtggcaaattccttcaaaagtttcgactctacgaaaccagatcgaaattttatcttattggaagagacaagagcaggattcactggagggtgctaaaaattgatcggttggagtccactgagctgggtgtcgatgaggatccaactatttacacggaaagtgaatgtcaagaactgctttggcggatccatgaggggaacatgttgactggtggactgaaatttgtcacaaaatgttacggaatagttggttttgtaaagtttcttggtccttattacatggttataataaccagtagaaggaaaatcggcacaatatgcggccatgaaatttattccgtcggcaagagtgaaatgattgcaatttcaagtgttacagtctggcccaacgtggcttattctagggacgagaacaggtctttttttttcaacatgtaaatattgtgtattgcctgttgtaatttaatcagtggttcttaacattatcaataattccagcttgctatctagtgtacgttttatagctttgctattcatctacctcattgttggttgctctctttccacatatttgatctcattttggttgctatgttgtgttgagaactcttggtgttgctgtgccccctccctctcctttgtccgtattgttttgcataatgacattccagttttttttcatttgttcatgtcctagtagaacatggacaattccattttatgattttgttcgattgtacaataatacagtaacattttgtcgttgtgttcatttagctccatttctcctatgtgtataaatttgtttgttcagaaacaacgtacatccaactcatatagccaatatacataatggaacaatggaaattcttgcagttctgagccttgtgtacttgctcatatggttggaggtatatatagaaaagtttcgaatttccttgctcctgtagtattctgcttattatcattcaccattctatacgacaagtatatttttcaacttcttttttcatttttgtcttatgaagaaatttatgctctcacctctcaatttctgtagatataagcgccttctttgctcagttgacctttcgaaggatttcttcttcagctactcttacaacatcatgcgcagccttcagaagaacataacccagaagaatactgggcaggctgtttatgaaccaatgtgtgtatggaatgaatttctgacacgagcaattcggaatcatctcaagaatacatgttggactgttgccttagtccatggattttttaaacagtatcatctattcatcattgaagaccacaagtagggctgctgctaactcaatgacacccccactaacttaagtgttttactccgcgtctcatgacctgatatatagtgaaagcttgaaacaagtcgaagctctccgtatctgggaaggatttttggttgacccttatagctaggcgctcacgacactttgcgggaaccagattcttgaaacgtggcgttaatgaaaagggcagggtagcgaatgatgttgagactgagcagattgtttttgaagacacatctgatggaatcccaactcagatggcttctgctgtacagcatagaggatcgatacctcttgtctggtttcaggaaacttcaagacttaatattagaccagatattatattgaaacctgatgtggactacaaggcgactcgccttcattttgagaaccttgcacttagatatgggaatccagtaatcatcttgaacttaataaagacccgtgagaagaagccccgtgaatctctgctccgtgcagaatttgcaaaggctatccattacattaacaagagcctgcctgatgacaagcgtctaaaatttttacacatggatctgagtaagctttctcgaaggaaaggcaccaatgtgcttgcactgttgaccaaggtggcatcagatgtgttggatctaactgaattcctccactgtgaaataagtacatcaacaaaacctgatgacacctcaagtggagaaagaactgctgccaaaccacatgatgacagaagtagcagtgatcaaactgaatgtgcagctaagttggcacctcttttattacagaagggtgtcctcaggacaaattgcatagactgcttagatcgcacaaatgttgcacaatttgcatatggtttagctgctttagggcgtcaacttcatgcattggggcttactgaagcacagaaaattgaattgcacgatcctctggctgatgatctgatggacttctatgaatggatgggtgatacattagctattcagtatggtggttctgctgctcacaacaagatcttctgcgagcaaaggggtcaatggaaggcagcaacccaatctcaggagttccttcggaccattcaacgctactataataacgcctacactgatcacgacaagcaggatgctataaacatgttcttaggtcatttccaacctcagcaagggaaacctgcactgtggaagctggactcagatcagcattacaacattgggaggcaagggactttaaaagaagagattggaagatcgttcataaagaggtcactatcagatggtaacatactgttggagaacaacttgcctgtaactagctgtaacaatgaaacaaacaacacagaattgcttccaatgcaacagctggatgatattagagaacctaccgactctgcgccagagatctccatatgtgaacctaacccgtgctccagtgtgaactacggcagagtgcctggaagacactctatttcagaagagcggcagagttatttgaaaagattaggttaccctgaattgcattcttcaaatttcctcgaccttgatttgttgtcgtcttctgggaattcctgtgacgaggaagtttttgagaggtcatcactgatcaattcacctatggatgtggtcagcgttgaatcatctacgtcgtacagtgaacaaggacacactgatgagggaagggatgacatggatctttcccgttcaagcagccaggtctcagacgttcgggactattctgaccggtttgcgcactgggtcgcggatggaggcatgctttggtaaaaggccatggacttttgtcttgcttgacaactcggtagaatctgtgaccgcaggaaatggatgcgagcagatgacatggctagatgcagagatggtgggcgtggaaaaagtctcgcatcggtatggttgtgaccactggaaggcttgaacgctgatattcatcggatggggatggagatttcggtggttgggttgagtacaagattcaatttgctgtggtgaaaaattttaccatagtttgtttagacaataaataggcaaaatatatatgattcttttattttagcttacagtgcgtcccccttctccatagaaaattctgaaaagcaaaaaaaaaaaggaaaatctagaaaaaggaggaaaaaaaacttagataaagaacacttttgctgtaaatagttagtatgttacggaagtataaatattgtgaaattttgctgacgacacgacttcgctcaaacgtgtaatatactgttggacagtgttaacaaaatatatcccgtatcagtacgaaaactgtgtaaatttactgtaacgcacagtatgcattatttatttatttgtttctcagattatggaagagataaaattgcaaaaatatcttaacctctgacttctcacggtgcggccagcctcggtcaagctccccggcggcgggacgaggccggtgtccgcttcctaccacagctagggatggaaacgaaagactcgagc

SEQ ID NO: 220393 - DNA, 4812 bp, Zea Mays
gcgcttttgtggacgacgccgtcgtcgccaggcagcttgcatgtggctctgcgctgcgcccttgtcttcctcttcctccccactccgcatctccagaaaattccgttattttactcccagtatttagcctcgacgattgctcgggactctctttacaggtcctatttcgcggtttcctcatcctcctaatcctaacctccttccctgttttattcttcctcgtcgagcctgattcccctgccgccaccgcggccagcgccgccctcgccgccggtcgccaccgccgccgccaccgtccactcctcgccctcacctaatctcactcggagggagaaaaaaaaaacctcgccctcgccgccgggttgagttgaatctgtggtcgctgggttgaattgaatcgatttagatccgtttatccctagttcgggtgcccgtgttctggaaggtggaagctttggttgggttttctcttccagagcattaatgtttctgagggcctaagatgctctatttgaagcagcccacgaggagctgagtctttgtgttttttttatcgttctctctcgtcgtctgttgatctgatcggatggaggctatgacgggtggcaaattccttcaaaagtttcgactctacgaaaccagatcgaaattttatcttattggaagagacaagagcaggattcactggagggtgctaaaaattgatcggttggagtccactgagctgggtgtcgatgaggatccaactatttacacggaaagtgaatgtcaagaactgctttggcggatccatgaggggaacatgttgactggtggactgaaatttgtcacaaaatgttacggaatagttggttttgtaaagtttcttggtccttattacatggttataataaccagtagaaggaaaatcggcacaatatgcggccatgaaatttattccgtcggcaagagtgaaatgattgcaatttcaagtgttacagtctggcccaacgtggcttattctagggacgagaacaggtctttttttttcaacatgtaaatattgtgtattgcctgttgtaatttaatcagtggttcttaacattatcaataattccagcttgctatctagtgtacgttttatagctttgctattcatctacctcattgttggttgctctctttccacatatttgatctcattttggttgctatgttgtgttgagaactcttggtgttgctgtgccccctccctctcctttgtccgtattgttttgcataatgacattccagttttttttcatttgttcatgtcctagtagaacatggacaattccattttatgattttgttcgattgtacaataatacagtaacattttgtcgttgtgttcatttagctccatttctcctatgtgtataaatttgtttgttcagaaacaacgtacatccaactcatatagccaatatacataatggaacaatggaaattcttgcagttctgagccttgtgtacttgctcatatggttggagatataagcgccttctttgctcagttgacctttcgaaggatttcttcttcagctactcttacaacatcatgcgcagccttcagaagaacataacccagaagaatactgggcaggctgtttatgaaccaatgtgtgtatggaatgaatttctgacacgagcaattcggaatcatctcaagaatacatgttggactgttgccttagtccatggattttttaaacagtatcatctattcatcattgaagaccacaagtagggctgctgctaactcaatgacacccccactaacttaagtgttttactccgcgtctcatgacctgatatatagtgaaagcttgaaacaaggttggcaaaggcatgctttgtataacctgctgatttttttttcagtttgagctgcttgaagctttcttgagttgaaacctttgctcataagtctcagcagacttattatttttattcagttctaatctatcttttgaagggcaggcctggtgcagtggtgagagctgtctcacttagtcaccaggccgtgggttcaaagcagcctctccgcatttgcgggggaagacttgcatcggtttatctctttcctagaccccactcatgtgggagcctccggtacttggtctgctccttctaatctattgtttataaatgttgttgaatgttgatacagactaacatcatatagtcttaacttttattcctaatccttcattatgaaatttcattgctatattttatccattttgatttttctcacaagtgccaggcactgtctcttgatcctagtccaaggacaacaaaaacatctcaaaaaatgccagtcctgattacatatgcaaataaagtgccatatgaagacatgctaatacatttgttttggtatgacagtcgaagctctccgtatctgggaaggatttttggttgacccttatagctaggcgctcacgacactttgcgggaaccagattcttgaaacgtggcgttaatgaaaagggcagggtagcgaatgatgttgagactgagcagattgtttttgaagacacatctgatggaatcccaactcagatggcttctgctgtacagcatagaggatcgatacctcttgtctggtttcaggaaacttcaagacttaatattagaccagatattatattgaaacctgatgtggactacaaggcgactcgccttcattttgagaaccttgcacttagatatgggaatccagtaatcatcttgaacttaataaagacccgtgagaagaagccccgtgaatctctgctccgtgcagaatttgcaaaggctatccattacattaacaagagcctgcctgatgacaagcgtctaaaatttttacacatggatctgagtaagctttctcgaaggaaaggcaccaatgtgcttgcactgttgaccaaggtggcatcagatgtgttggatctaactgaattcctccactgtgaaataagtacatcaacaaaacctgatgacacctcaagtggagaaagaactgctgccaaaccacatgatgacagaagtagcagtgatcaaactgaatgtgcagctaagttggcacctcttttattacagaagggtgtcctcaggacaaattgcatagactgcttagatcgcacaaatgttgcacaatttgcatatggtttagctgctttagggcgtcaacttcatgcattggggcttactgaagcacagaaaattgaattgcacgatcctctggctgatgatctgatggacttctatgaatggatgggtgatacattagctattcagtatggtggttctgctgctcacaacaagatcttctgcgagcaaaggggtcaatggaaggcagcaacccaatctcaggagttccttcggaccattcaacgctactataataacgcctacactgatcacgacaagcaggatgctataaacatgttcttaggtcatttccaacctcagcaagggaaacctgcactgtggaagctggactcagatcagcattacaacattgggaggcaagggactttaaaagaagagattggaagatcgttcataaagaggtcactatcagatggtaacatactgttggagaacaacttgcctgtaactagctgtaacaatgaaacaaacaacacagaattgcttccaatgcaacagctggatgatattagagaacctaccgactctgcgccagagatctccatatgtgaacctaacccgtgctccagtgtgaactacggcagagtgcctggaagacactctatttcagaagagcggcagagttatttgaaaagattaggttaccctgaattgcattcttcaaatttcctcgaccttgatttgttgtcgtcttctgggaattcctgtgacgaggaagtttttgagaggtcatcactgatcaattcacctatggatgtggtcagcgttgaatcatctacgtcgtacagtgaacaaggacacactgatgagggaagggatgacatggatctttcccgttcaagcagccaggtctcagacgttcgggactattctgaccggtttgcgcactgggtcgcggatggaggcatgctttggtaaaaggccatggacttttgtcttgcttgacaactcggtagaatctgtgaccgcaggaaatggatgcgagcagatgacatggctagatgcagagatggtgggcgtggaaaaagtctcgcatcggtatggttgtgaccactggaaggcttgaacgctgatattcatcggatggggatggagatttcggtggttgggttgagtacaagattcaatttgctgtggtgaaaaattttaccatagtttgtttagacaataaataggcaaaatatatatgattcttttattttagcttacagtgcgtcccccttctccatagaaaattctgaaaagcaaaaaaaaaaaggaaaatctagaaaaaggaggaaaaaaaacttagataaagaacacttttgctgtaaatagttagtatgttacggaagtataaatattgtgaaattttgctgacgacacgacttcgctcaaacgtgtaatatactgttggacagtgttaacaaaatatatcccgtatcagtacgaaaactgtgtaaatttactgtaacgcacagtatgcattatttatttatttgtttctcagattatggaagagataaaattgcaaaaatatcttaacctctgacttctcacggtgcggccagcctcggtcaagctccccggcggcgggacgaggccggtgtccgcttcctaccacagctagggatggaaacgaaagactcgagc

SEQ ID NO: 220394 - DNA, 3611 bp, Zea Mays
gcgcttttgtggacgacgccgtcgtcgccaggcagcttgcatgtggctctgcgctgcgcccttgtcttcctcttcctccccactccgcatctccagaaaattccgttattttactcccagtatttagcctcgacgattgctcgggactctctttacaggtcctatttcgcggtttcctcatcctcctaatcctaacctccttccctgttttattcttcctcgtcgagcctgattcccctgccgccaccgcggccagcgccgccctcgccgccggtcgccaccgccgccgccaccgtccactcctcgccctcacctaatctcactcggagggagaaaaaaaaaacctcgccctcgccgccgggttgagttgaatctgtggtcgctgggttgaattgaatcgatttagatccgtttatccctagttcgggtgcccgtgttctggaaggtggaagctttggttgggttttctcttccagagcattaatgtttctgagggcctaagatgctctatttgaagcagcccacgaggagctgagtctttgtgttttttttatcgttctctctcgtcgtctgttgatctgatcggatggaggctatgacgggtggcaaattccttcaaaagtttcgactctacgaaaccagatcggattcactggagggtgctaaaaattgatcggttggagtccactgagctgggtgtcgatgaggatccaactatttacacggaaagtgaatgtcaagaactgctttggcggatccatgaggggaacatgttgactggtggactgaaatttgtcacaaaatgttacggaatagttggttttgtaaagtttcttggtccttattacatggttataataaccagtagaaggaaaatcggcacaatatgcggccatgaaatttattccgtcggcaagagtgaaatgattgcaatttcaagtgttacagtctggcccaacgtggcttattctagggacgagaacagatataagcgccttctttgctcagttgacctttcgaaggatttcttcttcagctactcttacaacatcatgcgcagccttcagaagaacataacccagaagaatactgggcaggctgtttatgaaccaatgtgtgtatggaatgaatttctgacacgagcaattcggaatcatctcaagaatacatgttggactgttgccttagtccatggattttttaaacagtcgaagctctccgtatctgggaaggatttttggttgacccttatagctaggcgctcacgacactttgcgggaaccagattcttgaaacgtggcgttaatgaaaagggcagggtagcgaatgatgttgagactgagcagattgtttttgaagacacatctgatggaatcccaactcagatggcttctgctgtacagcatagaggatcgatacctcttgtctggtttcaggaaacttcaagacttaatattagaccagatattatattgaaacctgatgtggactacaaggcgactcgccttcattttgagaaccttgcacttagatatgggaatccagtaatcatcttgaacttaataaagacccgtgagaagaagccccgtgaatctctgctccgtgcagaatttgcaaaggctatccattacattaacaagagcctgcctgatgacaagcgtctaaaatttttacacatggatctgagtaagctttctcgaaggaaaggcaccaatgtgcttgcactgttgaccaaggtggcatcagatgtgttggatctaactgaattcctccactgtgaaataagtacatcaacaaaacctgatgacacctcaagtggagaaagaactgctgccaaaccacatgatgacagaagtagcagtgatcaaactgaatgtgcagctaagttggcacctcttttattacagaagggtgtcctcaggacaaattgcatagactgcttagatcgcacaaatgttgcacaatttgcatatggtttagctgctttagggcgtcaacttcatgcattggggcttactgaagcacagaaaattgaattgcacgatcctctggctgatgatctgatggacttctatgaatggatgggtgatacattagctattcagtatggtggttctgctgctcacaacaagatcttctgcgagcaaaggggtcaatggaaggcagcaacccaatctcaggagttccttcggaccattcaacgctactataataacgcctacactgatcacgacaagcaggatgctataaacatgttcttaggtcatttccaacctcagcaagggaaacctgcactgtggaagctggactcagatcagcattacaacattgggaggcaagggactttaaaagaagagattggaagatcgttcataaagaggtcactatcagatggtaacatactgttggagaacaacttgcctgtaactagctgtaacaatgaaacaaacaacacagaattgcttccaatgcaacagctggatgatattagagaacctaccgactctgcgccagagatctccatatgtgaacctaacccgtgctccagtgtgaactacggcagagtgcctggaagacactctatttcagaagagcggcagagttatttgaaaagattaggttaccctgaattgcattcttcaaatttcctcgaccttgatttgttgtcgtcttctgggaattcctgtgacgaggaagtttttgagaggtcatcactgatcaattcacctatggatgtggtcagcgttgaatcatctacgtcgtacagtgaacaaggacacactgatgagggaagggatgacatggatctttcccgttcaagcagccaggtctcagacgttcgggactattctgaccggtttgcgcactgggtcgcggatggaggcatgctttggtaaaaggccatggacttttgtcttgcttgacaactcggtagaatctgtgaccgcaggaaatggatgcgagcagatgacatggctagatgcagagatggtgggcgtggaaaaagtctcgcatcggtatggttgtgaccactggaaggcttgaacgctgatattcatcggatggggatggagatttcggtggttgggttgagtacaagattcaatttgctgtggtgaaaaattttaccatagtttgtttagacaataaataggcaaaatatatatgattcttttattttagcttacagtgcgtcccccttctccatagaaaattctgaaaagcaaaaaaaaaaaggaaaatctagaaaaaggaggaaaaaaaacttagataaagaacacttttgctgtaaatagttagtatgttacggaagtataaatattgtgaaattttgctgacgacacgacttcgctcaaacgtgtaatatactgttggacagtgttaacaaaatatatcccgtatcagtacgaaaactgtgtaaatttactgtaacgcacagtatgcattatttatttatttgtttctcagattatggaagagataaaattgcaaaaatatcttaacctctgacttctcacggtgcggccagcctcggtcaagctccccggcggcgggacgaggccggtgtccgcttcctaccacagctagggatggaaacgaaagactcgagc

SEQ ID NO: 220395 - DNA, 4337 bp, Zea Mays
catggttttgccccccttgccaccccccctgctcgcagcgcagttgcgtggcgcttttgtggacgacgccgtcgtcgccaggcagcttgcatgtggctctgcgctgcgcccttgtcttcctcttcctccccactccgcatctccagaaaattccgttattttactcccagtatttagcctcgacgattgctcgggactctctttacaggtcctatttcgcggtttcctcatcctcctaatcctaacctccttccctgttttattcttcctcgtcgagcctgattcccctgccgccaccgcggccagcgccgccctcgccgccggtcgccaccgccgccgccaccgtccactcctcgccctcacctaatctcactcggagggagaaaaaaaaaacctcgccctcgccgccgggttgagttgaatctgtggtcgctgggttgaattgaatcgatttagatccgtttatccctagttcgggtgcccgtgttctggaaggtggaagctttggttgggttttctcttccagagcattaatgtttctgagggcctaagatgctctatttgaagcagcccacgaggagctgagtctttgtgttttttttatcgttctctctcgtcgtctgttgatctgatcggatggaggctatgacgggtggcaaattccttcaaaagtttcgactctacgaaaccagatcgaaattttatcttattggaagagacaagagcaggattcactggagggtgctaaaaattgatcggttggagtccactgagctgggtgtcgatgaggatccaactatttacacggaaagtgaatgtcaagaactgctttggcggatccatgaggggaacatgttgactggtggactgaaatttgtcacaaaatgttacggaatagttggttttgtaaagtttcttggtccttattacatggttataataaccagtagaaggaaaatcggcacaatatgcggccatgaaatttattccgtcggcaagagtgaaatgattgcaatttcaagtgttacagtctggcccaacgtggcttattctagggacgagaacaggtctttttttttcaacatgtaaatattgtgtattgcctgttgtaatttaatcagtggttcttaacattatcaataattccagcttgctatctagtgtacgttttatagctttgctattcatctacctcattgttggttgctctctttccacatatttgatctcattttggttgctatgttgtgttgagaactcttggtgttgctgtgccccctccctctcctttgtccgtattgttttgcataatgacattccagttttttttcatttgttcatgtcctagtagaacatggacaattccattttatgattttgttcgattgtacaataatacagtaacattttgtcgttgtgttcatttagctccatttctcctatgtgtataaatttgtttgttcagaaacaacgtacatccaactcatatagccaatatacataatggaacaatggaaattcttgcagttctgagccttgtgtacttgctcatatggttggaggtatatatagaaaagtttcgaatttccttgctcctgtagtattctgcttattatcattcaccattctatacgacaagtatatttttcaacttcttttttcatttttgtcttatgaagaaatttatgctctcacctctcaatttctgtagatataagcgccttctttgctcagttgacctttcgaaggatttcttcttcagctactcttacaacatcatgcgcagccttcagaagaacataacccagaagaatactgggcaggctgtttatgaaccaatgtgtgtatggaatgaatttctgacacgagcaattcggaatcatctcaagaatacatgttggactgttgccttagtccatggattttttaaacagtcgaagctctccgtatctgggaaggatttttggttgacccttatagctaggcgctcacgacactttgcgggaaccagattcttgaaacgtggcgttaatgaaaagggcagggtagcgaatgatgttgagactgagcagattgtttttgaagacacatctgatggaatcccaactcagatggcttctgctgtacagcatagaggatcgatacctcttgtctggtttcaggaaacttcaagacttaatattagaccagatattatattgaaacctgatgtggactacaaggcgactcgccttcattttgagaaccttgcacttagatatgggaatccagtaatcatcttgaacttaataaagacccgtgagaagaagccccgtgaatctctgctccgtgcagaatttgcaaaggctatccattacattaacaagagcctgcctgatgacaagcgtctaaaatttttacacatggatctgagtaagctttctcgaaggaaaggcaccaatgtgcttgcactgttgaccaaggtggcatcagatgtgttggatctaactgaattcctccactgtgaaataagtacatcaacaaaacctgatgacacctcaagtggagaaagaactgctgccaaaccacatgatgacagaagtagcagtgatcaaactgaatgtgcagctaagttggcacctcttttattacagaagggtgtcctcaggacaaattgcatagactgcttagatcgcacaaatgttgcacaatttgcatatggtttagctgctttagggcgtcaacttcatgcattggggcttactgaagcacagaaaattgaattgcacgatcctctggctgatgatctgatggacttctatgaatggatgggtgatacattagctattcagtatggtggttctgctgctcacaacaagatcttctgcgagcaaaggggtcaatggaaggcagcaacccaatctcaggagttccttcggaccattcaacgctactataataacgcctacactgatcacgacaagcaggatgctataaacatgttcttaggtcatttccaacctcagcaagggaaacctgcactgtggaagctggactcagatcagcattacaacattgggaggcaagggactttaaaagaagagattggaagatcgttcataaagaggtcactatcagatggtaacatactgttggagaacaacttgcctgtaactagctgtaacaatgaaacaaacaacacagaattgcttccaatgcaacagctggatgatattagagaacctaccgactctgcgccagagatctccatatgtgaacctaacccgtgctccagtgtgaactacggcagagtgcctggaagacactctatttcagaagagcggcagagttatttgaaaagattaggttaccctgaattgcattcttcaaatttcctcgaccttgatttgttgtcgtcttctgggaattcctgtgacgaggaagtttttgagaggtcatcactgatcaattcacctatggatgtggtcagcgttgaatcatctacgtcgtacagtgaacaaggacacactgatgagggaagggatgacatggatctttcccgttcaagcagccaggtctcagacgttcgggactattctgaccggtttgcgcactgggtcgcggatggaggcatgctttggtaaaaggccatggacttttgtcttgcttgacaactcggtagaatctgtgaccgcaggaaatggatgcgagcagatgacatggctagatgcagagatggtgggcgtggaaaaagtctcgcatcggtatggttgtgaccactggaaggcttgaacgctgatattcatcggatggggatggagatttcggtggttgggttgagtacaagattcaatttgctgtggtgaaaaattttaccatagtttgtttagacaataaataggcaaaatatatatgattcttttattttagcttacagtgcgtcccccttctccatagaaaattctgaaaagcaaaaaaaaaaaggaaaatctagaaaaaggaggaaaaaaaacttagataaagaacacttttgctgtaaatagttagtatgttacggaagtataaatattgtgaaattttgctgacgacacgacttcgctcaaacgtgtaatatactgttggacagtgttaacaaaatatatcccgtatcagtacgaaaactgtgtaaatttactgtaacgcacagtatgcattatttatttatttgtttctcagattatggaagagataaaattgcaaaaatatcttaacctctgacttctcacggtgcggccagcctcggtcaagctccccggcggcgggacgaggccggtgtccgcttcctaccacagctagggatggaaacgaaagactcgagc

SEQ ID NO: 220396 - DNA, 3721 bp, Zea Mays
gaaaaagatactgttccttcaatgattacatggttttgccccccttgccaccccccctgctcgcagcgcagttgcgtggcgcttttgtggacgacgccgtcgtcgccaggcagcttgcatgtggctctgcgctgcgcccttgtcttcctcttcctccccactccgcatctccagaaaattccgttattttactcccagtatttagcctcgacgattgctcgggactctctttacaggtcctatttcgcggtttcctcatcctcctaatcctaacctccttccctgttttattcttcctcgtcgagcctgattcccctgccgccaccgcggccagcgccgccctcgccgccggtcgccaccgccgccgccaccgtccactcctcgccctcacctaatctcactcggagggagaaaaaaaaaacctcgccctcgccgccgggttgagttgaatctgtggtcgctgggttgaattgaatcgatttagatccgtttatccctagttcgggtgcccgtgttctggaaggtggaagctttggttgggttttctcttccagagcattaatgtttctgagggcctaagatgctctatttgaagcagcccacgaggagctgagtctttgtgttttttttatcgttctctctcgtcgtctgttgatctgatcggatggaggctatgacgggtggcaaattccttcaaaagtttcgactctacgaaaccagatcgaaattttatcttattggaagagacaagagcaggattcactggagggtgctaaaaattgatcggttggagtccactgagctgggtgtcgatgaggatccaactatttacacggaaagtgaatgtcaagaactgctttggcggatccatgaggggaacatgttgactggtggactgaaatttgtcacaaaatgttacggaatagttggttttgtaaagtttcttggtccttattacatggttataataaccagtagaaggaaaatcggcacaatatgcggccatgaaatttattccgtcggcaagagtgaaatgattgcaatttcaagtgttacagtctggcccaacgtggcttattctagggacgagaacagatataagcgccttctttgctcagttgacctttcgaaggatttcttcttcagctactcttacaacatcatgcgcagccttcagaagaacataacccagaagaatactgggcaggctgtttatgaaccaatgtgtgtatggaatgaatttctgacacgagcaattcggaatcatctcaagaatacatgttggactgttgccttagtccatggattttttaaacagtcgaagctctccgtatctgggaaggatttttggttgacccttatagctaggcgctcacgacactttgcgggaaccagattcttgaaacgtggcgttaatgaaaagggcagggtagcgaatgatgttgagactgagcagattgtttttgaagacacatctgatggaatcccaactcagatggcttctgctgtacagcatagaggatcgatacctcttgtctggtttcaggaaacttcaagacttaatattagaccagatattatattgaaacctgatgtggactacaaggcgactcgccttcattttgagaaccttgcacttagatatgggaatccagtaatcatcttgaacttaataaagacccgtgagaagaagccccgtgaatctctgctccgtgcagaatttgcaaaggctatccattacattaacaagagcctgcctgatgacaagcgtctaaaatttttacacatggatctgagtaagctttctcgaaggaaaggcaccaatgtgcttgcactgttgaccaaggtggcatcagatgtgttggatctaactgaattcctccactgtgaaataagtacatcaacaaaacctgatgacacctcaagtggagaaagaactgctgccaaaccacatgatgacagaagtagcagtgatcaaactgaatgtgcagctaagttggcacctcttttattacagaagggtgtcctcaggacaaattgcatagactgcttagatcgcacaaatgttgcacaatttgcatatggtttagctgctttagggcgtcaacttcatgcattggggcttactgaagcacagaaaattgaattgcacgatcctctggctgatgatctgatggacttctatgaatggatgggtgatacattagctattcagtatggtggttctgctgctcacaacaagatcttctgcgagcaaaggggtcaatggaaggcagcaacccaatctcaggagttccttcggaccattcaacgctactataataacgcctacactgatcacgacaagcaggatgctataaacatgttcttaggtcatttccaacctcagcaagggaaacctgcactgtggaagctggactcagatcagcattacaacattgggaggcaagggactttaaaagaagagattggaagatcgttcataaagaggtcactatcagatggtaacatactgttggagaacaacttgcctgtaactagctgtaacaatgaaacaaacaacacagaattgcttccaatgcaacagctggatgatattagagaacctaccgactctgcgccagagatctccatatgtgaacctaacccgtgctccagtgtgaactacggcagagtgcctggaagacactctatttcagaagagcggcagagttatttgaaaagattaggttaccctgaattgcattcttcaaatttcctcgaccttgatttgttgtcgtcttctgggaattcctgtgacgaggaagtttttgagaggtcatcactgatcaattcacctatggatgtggtcagcgttgaatcatctacgtcgtacagtgaacaaggacacactgatgagggaagggatgacatggatctttcccgttcaagcagccaggtctcagacgttcgggactattctgaccggtttgcgcactgggtcgcggatggaggcatgctttggtaaaaggccatggacttttgtcttgcttgacaactcggtagaatctgtgaccgcaggaaatggatgcgagcagatgacatggctagatgcagagatggtgggcgtggaaaaagtctcgcatcggtatggttgtgaccactggaaggcttgaacgctgatattcatcggatggggatggagatttcggtggttgggttgagtacaagattcaatttgctgtggtgaaaaattttaccatagtttgtttagacaataaataggcaaaatatatatgattcttttattttagcttacagtgcgtcccccttctccatagaaaattctgaaaagcaaaaaaaaaaaggaaaatctagaaaaaggaggaaaaaaaacttagataaagaacacttttgctgtaaatagttagtatgttacggaagtataaatattgtgaaattttgctgacgacacgacttcgctcaaacgtgtaatatactgttggacagtgttaacaaaatatatcccgtatcagtacgaaaactgtgtaaatttactgtaacgcacagtatgcattatttatttatttgtttctcagattatggaagagataaaattgcaaaaatatcttaacctctgacttctcacggtgcggccagcctcggtcaagctccccggcggcgggacgaggccggtgtccgcttcctaccacagctagggatggaaacgaaagactcgagc

SEQ ID NO: 220397 - DNA, 3843 bp, Zea Mays
gaaaaagatactgttccttcaatgattacatggttttgccccccttgccaccccccctgctcgcagcgcagttgcgtggcgcttttgtggacgacgccgtcgtcgccaggcagcttgcatgtggctctgcgctgcgcccttgtcttcctcttcctccccactccgcatctccagaaaattccgttattttactcccagtatttagcctcgacgattgctcgggactctctttacaggtcctatttcgcggtttcctcatcctcctaatcctaacctccttccctgttttattcttcctcgtcgagcctgattcccctgccgccaccgcggccagcgccgccctcgccgccggtcgccaccgccgccgccaccgtccactcctcgccctcacctaatctcactcggagggagaaaaaaaaaacctcgccctcgccgccgggttgagttgaatctgtggtcgctgggttgaattgaatcgatttagatccgtttatccctagttcgggtgcccgtgttctggaaggtggaagctttggttgggttttctcttccagagcattaatgtttctgagggcctaagatgctctatttgaagcagcccacgaggagctgagtctttgtgttttttttatcgttctctctcgtcgtctgttgatctgatcggatggaggctatgacgggtggcaaattccttcaaaagtttcgactctacgaaaccagatcgaaattttatcttattggaagagacaagagcaggattcactggagggtgctaaaaattgatcggttggagtccactgagctgggtgtcgatgaggatccaactatttacacggaaagtgaatgtcaagaactgctttggcggatccatgaggggaacatgttgactggtggactgaaatttgtcacaaaatgttacggaatagttggttttgtaaagtttcttggtccttattacatggttataataaccagtagaaggaaaatcggcacaatatgcggccatgaaatttattccgtcggcaagagtgaaatgattgcaatttcaagtgttacagtctggcccaacgtggcttattctagggacgagaacagatataagcgccttctttgctcagttgacctttcgaaggatttcttcttcagctactcttacaacatcatgcgcagccttcagaagaacataacccagaagaatactgggcaggctgtttatgaaccaatgtgtgtatggaatgaatttctgacacgagcaattcggaatcatctcaagaatacatgttggactgttgccttagtccatggattttttaaacagtatcatctattcatcattgaagaccacaagtagggctgctgctaactcaatgacacccccactaacttaagtgttttactccgcgtctcatgacctgatatatagtgaaagcttgaaacaagtcgaagctctccgtatctgggaaggatttttggttgacccttatagctaggcgctcacgacactttgcgggaaccagattcttgaaacgtggcgttaatgaaaagggcagggtagcgaatgatgttgagactgagcagattgtttttgaagacacatctgatggaatcccaactcagatggcttctgctgtacagcatagaggatcgatacctcttgtctggtttcaggaaacttcaagacttaatattagaccagatattatattgaaacctgatgtggactacaaggcgactcgccttcattttgagaaccttgcacttagatatgggaatccagtaatcatcttgaacttaataaagacccgtgagaagaagccccgtgaatctctgctccgtgcagaatttgcaaaggctatccattacattaacaagagcctgcctgatgacaagcgtctaaaatttttacacatggatctgagtaagctttctcgaaggaaaggcaccaatgtgcttgcactgttgaccaaggtggcatcagatgtgttggatctaactgaattcctccactgtgaaataagtacatcaacaaaacctgatgacacctcaagtggagaaagaactgctgccaaaccacatgatgacagaagtagcagtgatcaaactgaatgtgcagctaagttggcacctcttttattacagaagggtgtcctcaggacaaattgcatagactgcttagatcgcacaaatgttgcacaatttgcatatggtttagctgctttagggcgtcaacttcatgcattggggcttactgaagcacagaaaattgaattgcacgatcctctggctgatgatctgatggacttctatgaatggatgggtgatacattagctattcagtatggtggttctgctgctcacaacaagatcttctgcgagcaaaggggtcaatggaaggcagcaacccaatctcaggagttccttcggaccattcaacgctactataataacgcctacactgatcacgacaagcaggatgctataaacatgttcttaggtcatttccaacctcagcaagggaaacctgcactgtggaagctggactcagatcagcattacaacattgggaggcaagggactttaaaagaagagattggaagatcgttcataaagaggtcactatcagatggtaacatactgttggagaacaacttgcctgtaactagctgtaacaatgaaacaaacaacacagaattgcttccaatgcaacagctggatgatattagagaacctaccgactctgcgccagagatctccatatgtgaacctaacccgtgctccagtgtgaactacggcagagtgcctggaagacactctatttcagaagagcggcagagttatttgaaaagattaggttaccctgaattgcattcttcaaatttcctcgaccttgatttgttgtcgtcttctgggaattcctgtgacgaggaagtttttgagaggtcatcactgatcaattcacctatggatgtggtcagcgttgaatcatctacgtcgtacagtgaacaaggacacactgatgagggaagggatgacatggatctttcccgttcaagcagccaggtctcagacgttcgggactattctgaccggtttgcgcactgggtcgcggatggaggcatgctttggtaaaaggccatggacttttgtcttgcttgacaactcggtagaatctgtgaccgcaggaaatggatgcgagcagatgacatggctagatgcagagatggtgggcgtggaaaaagtctcgcatcggtatggttgtgaccactggaaggcttgaacgctgatattcatcggatggggatggagatttcggtggttgggttgagtacaagattcaatttgctgtggtgaaaaattttaccatagtttgtttagacaataaataggcaaaatatatatgattcttttattttagcttacagtgcgtcccccttctccatagaaaattctgaaaagcaaaaaaaaaaaggaaaatctagaaaaaggaggaaaaaaaacttagataaagaacacttttgctgtaaatagttagtatgttacggaagtataaatattgtgaaattttgctgacgacacgacttcgctcaaacgtgtaatatactgttggacagtgttaacaaaatatatcccgtatcagtacgaaaactgtgtaaatttactgtaacgcacagtatgcattatttatttatttgtttctcagattatggaagagataaaattgcaaaaatatcttaacctctgacttctcacggtgcggccagcctcggtcaagctccccggcggcgggacgaggccggtgtccgcttcctaccacagctagggatggaaacgaaagactcgagc

SEQ ID NO: 220398 - DNA, 1412 bp, Zea Mays
ccctgctcgcagcgcagttgcgtggcgcttttgtggacgacgccgtcgtcgccaggcagcttgcatgtggctctgcgctgcgcccttgtcttcctcttcctccccactccgcatctccagaaaattccgttattttactcccagtatttagcctcgacgattgctcgggactctctttacaggtcctatttcgcggtttcctcatcctcctaatcctaacctccttccctgttttattcttcctcgtcgagcctgattcccctgccgccaccgcggccagcgccgccctcgccgccggtcgccaccgccgccgccaccgtccactcctcgccctcacctaatctcactcggagggagaaaaaaaaaacctcgccctcgccgccgggttgagttgaatctgtggtcgctgggttgaattgaatcgatttagatccgtttatccctagttcgggtgcccgtgttctggaaggtggaagctttggttgggttttctcttccagagcattaatgtttctgagggcctaagatgctctatttgaagcagcccacgaggagctgagtctttgtgttttttttatcgttctctctcgtcgtctgttgatctgatcggatggaggctatgacgggtggcaaattccttcaaaagtttcgactctacgaaaccagatcgaaattttatcttattggaagagacaagagcaggattcactggagggtgctaaaaattgatcggttggagtccactgagctgggtgtcgatgaggatccaactatttacacggaaagtgaatgtcaagaactgctttggcggatccatgaggggaacatgttgactggtggactgaaatttgtcacaaaatgttacggaatagttggttttgtaaagtttcttggtccttattacatggttataataaccagtagaaggaaaatcggcacaatatgcggccatgaaatttattccgtcggcaagagtgaaatgattgcaatttcaagtgttacagtctggcccaacgtggcttattctagggacgagaacagatataagcgccttctttgctcagttgacctttcgaaggatttcttcttcagctactcttacaacatcatgcgcagccttcagaagaacataacccagaagaatactgggcaggctgtttatgaaccaatgtgtgtatggaatgaatttctgacacgagcaattcggaatcatctcaagaatacatgttggactgttgccttagtccatggattttttaaacagtatcatctattcatcattgaagaccacaagtagggctgctgctaactcaatgacacccccactaacttaagtgttttactccgcgtctcatgacctgatatatagtgaaagcttgaaacaagttctaatctatcttttgaagggcagg

SEQ ID NO: 220399 - DNA, 1854 bp, Zea Mays
gcacacggcgcgacgaacgacatagcattcatgctggctgggactgctaccgatgctgctgctggtcatgagaagctagctattggccttgtagtaccggagtaaatgattggcgctactagttttttcccctatccccaaatttttcatcttgcagtggtacccttcgccttgggagctgaaagcatggggagatgctgccggccggccggccagtacactgcaacactgagaggtcatggacgaggacgactcatggtggtgggtggggtcgatcaagttcttgttgttgggtcgaaaatggagcacggagacgagccatatttagcaaggaaggtttaagtccatacccaagattgggcaaggtggcctatcatgaaaatgatgatgatggccgcaaaggtcaataagtactatgaaaggagaaaagcataatacgaaggcacgatgcaaaggctagtacagacaagcaagatgtgtagaataagccgcagctgaccagcgcatgcagtcaagaggtgggcgggcatgcttccatcatcgctgaaatcaccctgcagacttcgcattttgctatgtaaagaacagactacccagacaaggatgtgtatagttgtagtgcaaaagcaacaggatgcaccatagacagagacaagacatttttgctattttgagcacgtgtgcagatccacctcaaagtttcgaaacgatttcgggtggtggctgtgatgtcgtttgaggcaggcagctgcgtcgttcaggcacctggaacaacaaaaaaaggcaacatgttattaccttggcgccagatgtcttcgggaggaaccccttgtcttgaagggacttcactgcttcgtacaggtacccatgcactggcgtgaacttgacgccaaggtccttcagaggttggttcgtaaacttgtagcccttcttcagtgggttcacctgatccttgcacctgcaaaaacaaaacaaaaaaatagcatgctatcagtgtagtgctgcaacagcaaagagcaaatgcatttgtctcgaagcagtttgggactccagacaggcagacaccatgtatatatgttgttgttgctatatcttcaaaacaaggtgatgttttttttttcttttttgccttgaggtacccctagggtcgtccatccatgtgctgccttcaaaggaaagaataggcattgctttgcttttaaggaatcgtccaaggcaccggtcagtcggtcacacctacctcttcagtttatcagcataacatttgcaattgcaagccaagcgcagttactaaattaaaattcattcggttttttctgaccggctcgtcctattcattttttttggaaaaattgaaaaattcaatgccacatttaaagtaaaacaatatcaccgcgaaaaataacaataattataaattttttaaataagataagtcagtcaaacttagagtaaaaaatcaagcgaattataaattagaacggagagagtaagaaaagactgggccgcatgatcattcacatgactaaaatgcactccgggtttcagttttctattacgtggagtatcttggcttatctaagcatggatacccatcatctgactcgtagctaacaaagtactgtgcagcatcatcagatggacttttctatccatggagagctattcttgaccttgtccaaaggacattaactagtcgttactgagcagaccaactaggctactcgtcataaaccctcctggccatggatttcttcaaatatcatcgtgcacaagttgaatttttggagcagtccaccactatttcctttgatagcacattgttcgaaacgacgaaaccattattaaaatgcc

SEQ ID NO: 220400 - DNA, 5111 bp, Zea Mays
ttttcactcatattttgagaattacgaaggaaatttaagctcgtaacaggagaaagaggaggaggaaagtgggaatagaatagaggagaggagagggagaggactggactggtactcgcagtcgcactagtgctaggcgcatccggcatccccatcccttgcctccgaatcggatcgccgcccccgctgccgctgccgctgccgccgagcggaagcagccatcaccccaaaccctagccagccatccaactatggagccgcccgccgccgccgccgccgactcctcgcccgatccgacgccgcaggaccagtttcctgccccgtccccttctccctccgcctccccggccaagcgctccgcctggaagcacccctcccccaacggccccgccgtcatggatgccaaccactggcccgcgctctccgacgccgccaagggcatcaagctcccagactcctcgtcttcctcgcctgcgcccgtcgccgccccatcggccgttgccaattcctccagttcgcaaaagcacggcgcccatcacgtccgccacaagtccgccaggcgtggcggcggcggggagcactctccacgagaccatcctgaccggaccacagccacgggttgggaccacgccggcggcggtgggggtaggggtgcccagaggaaccataataacggaggcggcaggagaggcaacgccgccgctgcctctgccgccggaccttctcaccatggtgccggtggcagcggcggaggtggaggctttggtgccaggcgaagaggggcctacgagccgcccttctatcgtggccctccaccaccagtgggcatgggccactacatgcgaggtgccccaccaccaccacctcctccgccgcccatgaccgtcgctccaccgttcatgggcccgccaccgccgccagtctcacccatgcgccccttcgctggaccaatggtgttccatgacatgtcatctcctgtatcccccatatacttttatgggccaccaccaccagaggctcttaggggactggctattgcgcctcctatggttggtccacctgcttatccttacttccaagcgcagcctgagccacagcctgagcctcagcctgatgctgagcctgacgtagaagaggaacgtgtcaagctgctcaagcagatagagttctacttcagcaaggagaacctgtgctcagatgtttacttgaggcagcagatggatgatcaaggctgggttgatatatctcttatagctggcttcaaaaaggtccaagggctaaagaaggacctgcaatatataaaagagacggtgcagtcctcatctattctggaaatgaaggataacaagatcaggaagcatgatgactgggtgaaatgggtgatccctcgtgagagcaatcctgatgtcccgtcaagctcagcatctgtaccaaggcctgatgtcaataatctgacggcacatcttggaggcatggatctgcaggattctgctagctctgctggcgctgtggagccgaagcataatgatgtggtccagaacggatcgccttctggtaatgaagaggctgcagtagctgaggacagctctgatcagcagtagttacaacaaggcagtggtttggattcacaccatgactgcaggggttttgtcggtgcgcgaatgacagggcacaagtggggtagcgatgaagatttggggcagttggtggaatggagatgaagcagaatagtgggaaaacgaaggtggtgatatctggaggcgcctaggaccgaggacaaagattatgtgtgataagttagtagcccccctgtggttgtttactggggggggttgcgtttgcacacgggcgcttggatgctatcatgctgttgttacgatgaactagttggttttcgtctgcgttaggatgggggatgttgtaggacctccgattttttttatggaggagctgaacttggagagccagggagttttttttttttttggacttgttgttttgtggcatgatggtgttaaattgaagtaagaagatgctcattctgctgtatggtattgatgtgttgtggggttgaaggtgggtaaaaaatgggagggggattgctgtatggtcaggtcttgaatggctagcatactaggtaggagcagcgaccgcattgcattctctttgtcacctgtccaacaagcttctgttttggacggcatcctacaatagggcaccaacagcagacttggtacgtagtagtaaagccagtaactgttttgtgcatccatgtcggtgcgttgccatcatagacgtacctttgcctctgctgtttgtacgtcaaaggaatcagtcagggcgttcgttgctttgattgctggctggatcggattatatatcgtctcggcagctagggcggccagcaccagccatgactccttcgcttctcctctccctcctgctggtggcggcgaggtgctgccatggctggtcgtcgttccagaagccggcggtgactgcggtgatcgctttcggagactccattgtggacccggggaacaacaacgggctgcatacggtgatcaaggccaaccatccgccctacggcaaggacttgttcaaccacgaggccaccggacgctactccaacggcctcattccaaccgacctaattgcccaggagttgggtgtgaagctgctgcttcctgcctacttgggcgtggatctgagcccggaggacctgctcaccggcgtcagcttcgcgtccggcgccaccgggttcgacccgctgactcccctcgtagtgagcgtcatctcgctggagcagcagctcgcctacttcgacgagtaccgcggcaagctggtggatatcgccggcgaggatgagacggcgaggatcatcgacggcgcgctgttcgtagtgtgcgcgggcaccgacgacgtggccaacacctacttcacgacgccgttccgcagcgcggagtacgacatcccgagctacgtggagctgctggtgggcggcgccgaggagttcctccgcaacgtcagctccaggggcgccaggaagatcggcttcgtggggatgccgcccgtggggtgcgtgccgtcgcagcggacgctgggcggtggcctcgccagggcgtgcgagcccaagcggaacgaggcggcgcagctgtacaacgccaggatccaggagatggtcgccgacgccgaccgagacttggcgacgaccacggtggtgttcctggacatctaccgcgtcctggacgacctgatggagcgcggggacaagtacggcttctctgagaccaccaggggatgctgcggcaccggcaccatcgaggtcacgggactctgcgactcccgcttcgtctccgtctgcgacaacgtctcgcagcacgtgttcttcgacagctaccaccccaccgagagagcctacaggatcatcgtcaaggacatctttgacaactacggacaagtgctcatcggatgatatatatatctaccttgcttgagcgatcgagcatgcatgttcatcttcttcatctttatgtacgttcggctagctggcccaaagcctcaaggaggcccatttatcttcttcttactcctcctcgccccaagaataattaattgtaagcatgatctgcggaatcagacggggatggtctggtggaagtctacatatgggccgctggcacgatacaaacccaccaattgatttggtttggtttggcccatatggccacttcctatccatccatccatccattccttcttcttcctcctcctcctcctcctttattctctctccagggaaggcaagctcggccagacctccctcttcaataagaacaagttgaagaaagatgtccacgtacctggtgtcctgctgcctccggccaccgtcagcgggggcggagatgcccaaggcggcttccgccgcctcctcctcttcattggccccgccgcccgacaccaagagagtcggccgaagagactttgtgctcaggagcagtgagattgccacgctcgccgccatcttccacttcagtggcagcaaaccaagctaccttggcgttcagaagagtcctccgtcccttgctctctgccctgcaaccaataactgtgtttccacatcagaggaaataagcgactcaaatcactatgctcccccatggaactacaatcccaaggatgggcggagcggtaaacccataaccaaagaggaggccatgaaagaactaattgaagtcgtcacgaagacaaagccggacaacttcactcctcgcatagtagagaaaaaagatgattatatccgagttgaatatgagagtcctatatttgggtttgtagatgatgtggagttctggttccctcctggcaacaagaccatggttcagtatcggtcggcgtctcgatcaggatttatcgatttcaatgccaacaagaagagagtaaaggagctgagattggctttggaaaagaagggctgggcttcagaaagcaacttctgaattgaagtgagaagggtggaagaggtgcaggtgcatgctactcagacgagccagcacaactgggaactgggattgggtactgcccacgcaaaggcaaaaaagtctctttgtgatggtccctcgttctcattcaggtcagcgattacctagtttgtgtactaggcagcgtaagctagctgctggtgggtggtggtggccatcatgaggattcaggatgcatgatgatcttccatgggtggtgccgggggcgcactaagggaaaaaaaaaaggatattacatggacagcaaccaccctggctagctaataccaagaaatcattcatatactcctagtctcctaccaagaaaaaagatatatttattatgcatcttcttgccatccgtgcatcctactacatgcatcggatctgtccttgcgataatgagatatgcatattcgttcgatatgattgatagatagtcgacccagagatgatttaggtctctctctctctctctctctctctctctctctctctctctctctctctctctctctctctctctctctctctctggcattagttggatgcatggttgacttgtttcatgcatggattctattatagtgc

SEQ ID NO: 220401 - DNA, 2785 bp, Zea Mays
ggagagggagaggactggactggtactcgcagtcgcactagtgctaggcgcatccggcatccccatcccttgcctccgaatcggatcgccgcccccgctgccgctgccgctgccgccgagcggaagcagccatcaccccaaaccctagccagccatccaactatggagccgcccgccgccgccgccgccgactcctcgcccgatccgacgccgcaggaccagtttcctgccccgtccccttctccctccgcctccccggccaagcgctccgcctggaagcacccctcccccaacggccccgccgtcatggatgccaaccactggcccgcgctctccgacgccgccaagggcatcaagctcccagactcctcgtcttcctcgcctgcgcccgtcgccgccccatcggccgttgccaattcctccagttcgcaaaagcacggcgcccatcacgtccgccacaagtccgccaggcgtggcggcggcggggagcactctccacgagaccatcctgaccggaccacagccacgggttgggaccacgccggcggcggtgggggtaggggtgcccagaggaaccataataacggaggcggcaggagaggcaacgccgccgctgcctctgccgccggaccttctcaccatggtgccggtggcagcggcggaggtggaggctttggtgccaggcgaagaggggcctacgagccgcccttctatcgtggccctccaccaccagtgggcatgggccactacatgcgaggtgccccaccaccaccacctcctccgccgcccatgaccgtcgctccaccgttcatgggcccgccaccgccgccagtctcacccatgcgccccttcgctggaccaatggtgttccatgacatgtcatctcctgtatcccccatatacttttatgggccaccaccaccagaggctcttaggggactggctattgcgcctcctatggttggtccacctgcttatccttacttccaagcgcagcctgagccacagcctgagcctcagcctgatgctgagcctgacgtagaagaggaacgtgtcaagctgctcaagcagatagagttctacttcagcaaggagaacctgtgctcagatgtttacttgaggcagcagatggatgatcaaggctgggttgatatatctcttatagctggcttcaaaaaggtccaagggctaaagaaggacctgcaatatataaaagagacggtgcagtcctcatctattctggaaatgaaggataacaagatcaggaagcatgatgactgggtgaaatgggtgatccctcgtgagagcaatcctgatgtcccgtcaagctcagcatctgtaccaaggcctgatgtcaataatctgacggcacatcttggaggcatggatctgcaggattctgctagctctgctggcgctgtggagccgaagcataatgatgtggtccagaacggatcgccttctgggcacaagtggtaacttttttttggcaacttttggaggggaggcgagaggcgtattagactgacaagcgaacgtgtttactggcgttcagagactttgtgctcaggagcagtgagattgccacgctcgccgccatcttccacttcagtggcagcaaaccaagctaccttggcgttcagaagagtcctccgtcccttgctctctgccctgcaaccaataactgtgtttccacatcagaggaaataagcgactcaaatcactatgctcccccatggaactacaatcccaaggatgggcggagcggtaaacccataaccaaagaggaggccatgaaagaactaattgaagtcgtcacgaagacaaagccggacaacttcactcctcgcatagtagagaaaaaagatgattatatccgagttgaatatgagagtcctatatttggggtaggcggcggcgggtagcaccttgttttcctttttgtgggcgttactagatgtgcgtaaatgtggtggccatttgatatcatttgtcgatgctgaagtttgtagatgatgtggagttctggttccctcctggcaacaagaccatggttcagtatcggtcggcgtctcgatcaggatttatcgatttcaatgccaacaagaagagagtaaaggagctgagattggctttggaaaagaagggctgggcttcagaaagcaacttctgaattgaagtgagaagggtggaagaggtgcaggtgcatgctactcagacgagccagcacaactgggaactgggattgggtactgcccacgcaaaggcaaaaaagtctctttgtgatggtccctcgttctcattcaggtcagcgattacctagtttgtgtactaggcagcgtaagctagctgctggtgggtggtggtggccatcatgaggattcaggatgcatgatgatcttccatgggtggtgccgggggcgcactaagggaaaaaaaaaaggatattacatggacagcaaccaccctggctagctaataccaagaaatcattcatatactcctagtctcctaccaagaaaaaagatatatttattatgcatcttcttgccatccgtgcatcctactacatgcatcggatctgtccttgcgataatgagatatgcatattcgttcgatatgattgatagatagtcgacccagagatgatttaggtctctctctctctctctctctctctctctctctctctctctctctctctctctctctctctctctctctctctctggcattagttggatgcatggttgacttgtttcatgcatggattctattatagtgc

SEQ ID NO: 220402 - DNA, 2519 bp, Zea Mays
acgggtttgcagctgacgctctccatcctcgttcttctcgctccgttcctctttccctcctcccctccgtcttggttcttcacacctggttcttctgtctcccgttgtctctatcgtctgctccggtgaacccgcatcgttcctattccttgtgctgcttccgtcgtcggctccagtaaatcactttgttcgccagctcgagatcgtggacggcttgctaaaatcaggtttgttttcattgggtttccatttctggaagtgattaaggcgaagtaaatcttctttcctcgaaacgtatacactttggtgcatctgtggaaatctgatttgttgggtttctgatctatttggctctttgcattttttaaatcccctcctacaaatcctgctacctccccgtctttttttgtttgtttggaaaatttgtttcgtatcttccctcctcgtttttttgcttcagttcgaaatcgatttggtgggtttctgatggcaaccctcgccaccgcctcatgggtacgtgccgagccgccttatctgttcgctcaccactttacattggttcttgcgcctgcgatttcggtgtcgtaggatcatgcttgtgcggatgtgatggtcgctgtggcttcgcgtcggtgggcggtgggatttgggctgggattctcgcgccttgtctctagggtttgggtttggtgcttcctcagtgcggaattggggattataattcctttaggtttgattttatctcgggtaactgcgggataatagcctagtagggaaatcgtggggattcttaaggattattaagtttctgatttatctctgccttatttagctcgtctgttgtggtggcttttccttcttgctgatgctgattatgcttccggttatgagccacaaaacaatattgatcggcaacctgtagttttgcctcagttcatcgcttgctgtctctgttaaatgaccaagaataaagtttagtacttcacacattaggcatccagtaaaacggtatcataattccaaaggtcagtaacgcaaacaaacaccttctaaatcttttccgtttgctgcagcagccatgagattctccttgatctgtttgcgacatttattcctctcttgaacaatatcttgactattccctccagtgaacagcgagacatatttctcattcttagggaagaactacaaatgagttgagatatagaagctttagctcaggattcaagcaggtacagataaaaaatggttgattagaacctccaatctaatgcaaagagaatgatacatcacagaaaacaaagttgtaatgatacttatatgtcatatcatcatgggcagggcagtaatgtaggaagcttactctaacatattcaagatcttctcgcaattttgacagattattgttgacaccatcaccatttgaacgttgttgcttctcgagtcgccttatcatcctctcaatcttccgtctctctttgtattttgaataccaacatcaagaagatggtaagtacattccatacatgcatagaaaagaaacttaaaatgaaaaggaaagtataacagaccaaagaactttatctttctatctctaaattgtaatgtccgctggacaacaagttgattctgaagctcttgttgcctcttcagttcttccagtttcttctcttgagcaaccctaatctcatccggaaggtcctgaaaattaaacatggagcagtaactaaacaacatggctagatgaaaagggggctatactccattgatgtaatcagaaaataaaatggaagcatatgtgctattcttttatacatgtaggttgctcacataaagtggccttgattttaaataacacaaccatgttaccataaacatgagagcattctcagtgacaaatagagcattttctattctctctatattaacaaaccatggaagacaatcctcagtaccatcttccctacttacctaccccgaacaacatcttatcacaagatgacgtacttggccttacaaccacgcaccagcgacatcattttccaaattatccacttctagcagccaaacaaacatggcccgacgattgctagcatatcccggtgtgccacagaatacagaggcggatgaacactacacagatcaacttaacaagaaggagctatcctcaccatcgaaaatgcatgtgtgttgatgcaacctctgggaaacaaatgctatcagctgctgacatatgctacttcaatactgcttgatatgtattgcactctcagttccgtctactgttggtccaaactgcatctgtgtatatacagacgagttgtattaaactttctaaatctgtgtatactaatgcaacctcttgaaaacagttgttagcccttgacacgtatgctattttaatgctacttaatatgtattgcaatttggttttcctgtacagaactgctacaattcacgttccaatattaatcggaagctactgcagcctagcaaaatttccttaagtctgctttgtg

SEQ ID NO: 220403 - DNA, 967 bp, Zea Mays
acgggtttgcagctgacgctctccatcctcgttcttctcgctccgttcctctttccctcctcccctccgtcttggttcttcacacctggttcttctgtctcccgttgtctctatcgtctgctccggtgaacccgcatcgttcctattccttgtgctgcttccgtcgtcggctccagtaaatcactttgttcgccagctcgagatcgtggacggcttgctaaaatcagttaccataaacatgagagcattctcagtgacaaatagagcattttctattctctctatattaacaaaccatggaagacaatcctcagtaccatcttccctacttacctaccccgaacaacatcttatcacaagatgacgtacttggccttacaaccacgcaccagcgacatcattttccaaattatccacttctagcagccaaacaaacatggcccgacgattgctagcatatcccggtgtgccacagaatacagaggcggatgaacactacacagatcaacttaacaagaaggagctatcctcaccatcgaaaatgatgaagcacacccaagttgacaaagtcctagattctataattccagaaaaatgaagcttgttacatcctcatgacatgcatgaaggcatgtgtgttgatgcaacctctgggaaacaaatgctatcagctgctgacatatgctacttcaatactgcttgatatgtattgcactctcagttccgtctactgttggtccaaactgcatctgtgtatatacagacgagttgtattaaactttctaaatctgtgtatactaatgcaacctcttgaaaacagttgttagcccttgacacgtatgctattttaatgctacttaatatgtattgcaatttggttttcctgtacagaactgctacaattcacgttccaatattaatcggaagctactgcagcctagcaaaatttccttaagtctgctttgtg

SEQ ID NO: 220404 - DNA, 2342 bp, Zea Mays
acgggtttgcagctgacgctctccatcctcgttcttctcgctccgttcctctttccctcctcccctccgtcttggttcttcacacctggttcttctgtctcccgttgtctctatcgtctgctccggtgaacccgcatcgttcctattccttgtgctgcttccgtcgtcggctccagtaaatcactttgttcgccagctcgagatcgtggacggcttgctaaaatcaggtttgttttcattgggtttccatttctggaagtgattaaggcgaagtaaatcttctttcctcgaaacgtatacactttggtgcatctgtggaaatctgatttgttgggtttctgatctatttggctctttgcattttttaaatcccctcctacaaatcctgctacctccccgtctttttttgtttgtttggaaaatttgtttcgtatcttccctcctcgtttttttgcttcagttcgaaatcgatttggtgggtttctgatggcaaccctcgccaccgcctcatgggtacgtgccgagccgccttatctgttcgctcaccactttacattggttcttgcgcctgcgatttcggtgtcgtaggatcatgcttgtgcggatgtgatggtcgctgtggcttcgcgtcggtgggcggtgggatttgggctgggattctcgcgccttgtctctagggtttgggtttggtgcttcctcagtgcggaattggggattataattcctttaggtttgattttatctcgggtaactgcgggataatagcctagtagggaaatcgtggggattcttaaggattattaagtttctgatttatctctgccttatttagctcgtctgttgtggtggcttttccttcttgctgatgctgattatgcttccggttatgagccacaaaacaatattgatcggcaacctgtagttttgcctcagttcatcgcttgctgtctctgttaaatgaccaagaataaagtttagtacttcacacattaggcatccagtaaaacggtatcataattccaaaggtcagtaacgcaaacaaacaccttctaaatcttttccgtttgctgcagcagccatgagattctccttgatctgtttgcgacatttattcctctcttgaacaatatcttgactattccctccagtgaacagcgagacatatttctcattcttagggaagaactacaaatgagttgagatatagaagctttagctcaggattcaagcaggtacagataaaaaatggttgattagaacctccaatctaatgcaaagagaatgatacatcacagaaaacaaagttgtaatgatacttatatgtcatatcatcatgggcagggcagtaatgtaggaagcttactctaacatattcaagatcttctcgcaattttgacagattattgttgacaccatcaccatttgaacgttgttgcttctcgagtcgccttatcatcctctcaatcttccgtctctctttgtattttgaataccaacatcaagaagatgttaccataaacatgagagcattctcagtgacaaatagagcattttctattctctctatattaacaaaccatggaagacaatcctcagtaccatcttccctacttacctaccccgaacaacatcttatcacaagatgacgtacttggccttacaaccacgcaccagcgacatcattttccaaattatccacttctagcagccaaacaaacatggcccgacgattgctagcatatcccggtgtgccacagaatacagaggcggatgaacactacacagatcaacttaacaagaaggagctatcctcaccatcgaaaatgatgaagcacacccaagttgacaaagtcctagattctataattccagaaaaatgaagcttgttacatcctcatgacatgcatgaaggaatttgcttttgcgtatctgtggagggcttcgtcacttttgaatgaaaaaacatctatgtacatataaatcacttggtgaagcctttctcaggcatgtgtgttgatgcaacctctgggaaacaaatgctatcagctgctgacatatgctacttcaatactgcttgatatgtattgcactctcagttccgtctactgttggtccaaactgcatctgtgtatatacagacgagttgtattaaactttctaaatctgtgtatactaatgcaacctcttgaaaacagttgttagcccttgacacgtatgctattttaatgctacttaatatgtattgcaatttggttttcctgtacagaactgctacaattcacgttccaatattaatcggaagctactgcagcctagcaaaatttccttaagtctgctttgtg

SEQ ID NO: 220405 - DNA, 1657 bp, Zea Mays
acgggtttgcagctgacgctctccatcctcgttcttctcgctccgttcctctttccctcctcccctccgtcttggttcttcacacctggttcttctgtctcccgttgtctctatcgtctgctccggtgaacccgcatcgttcctattccttgtgctgcttccgtcgtcggctccagtaaatcactttgttcgccagctcgagatcgtggacggcttgctaaaatcaggtttgttttcattgggtttccatttctggaagtgattaaggcgaagtaaatcttctttcctcgaaacgtatacactttggtgcatctgtggaaatctgatttgttgggtttctgatctatttggctctttgcattttttaaatcccctcctacaaatcctgctacctccccgtctttttttgtttgtttggaaaatttgtttcgtatcttccctcctcgtttttttgcttcagttcgaaatcgatttggtgggtttctgatggcaaccctcgccaccgcctcatggttaccataaacatgagagcattctcagtgacaaatagagcattttctattctctctatattaacaaaccatggaagacaatcctcagtaccatcttccctacttacctaccccgaacaacatcttatcacaagatgacgtacttggccttacaaccacgcaccagcgacatcattttccaaattatccacttctagcagccaaacaaacatggtatggaacttcttctttactattatttgcaactttttaaaaacatgttatatgactacaacctaatgaagttcatttgctaggcccgacgattgctagcatatcccggtgtgccacagaatacagaggcggatgaacactacacagatcaacttaacaagaaggagctatcctcaccatcgaaaatgtaagtattcgagtattataaaaaaagtaggataaacaacagatacattttaattttaccactaaaacttatgtccaggatgaagcacacccaagttgacaaagtcctagattctataattccagaaaaatgaagcttgttacatcctcatgacatgcatgaaggtataatactatatatactcctttgtgatacaaaacatattaccccccccccacattatctttcactcgccttagtacccattaaacagcaacaaataattaggcaaacattgttagcacaactaatcctatcttcctctttatgtaaaggaatttgcttttgcgtatctgtggagggcttcgtcacttttgaatgaaaaaacatctatgtacatataaatcacttggtgaagcctttctcaggcatgtgtgttgatgcaacctctgggaaacaaatgctatcagctgctgacatatgctacttcaatactgcttgatatgtattgcactctcagttccgtctactgttggtccaaactgcatctgtgtatatacagacgagttgtattaaactttctaaatctgtgtatactaatgcaacctcttgaaaacagttgttagcccttgacacgtatgctattttaatgctacttaatatgtattgcaatttggttttcctgtacagaactgctacaattcacgttccaatattaatcggaagctactgcagcctagcaaaatttccttaagtctgctttgtg

SEQ ID NO: 220406 - DNA, 927 bp, Zea Mays
acgggtttgcagctgacgctctccatcctcgttcttctcgctccgttcctctttccctcctcccctccgtcttggttcttcacacctggttcttctgtctcccgttgtctctatcgtctgctccggtgaacccgcatcgttcctattccttgtgctgcttccgtcgtcggctccagtaaatcactttgttcgccagctcgagatcgtggacggcttgctaaaatcagatgacgtacttggccttacaaccacgcaccagcgacatcattttccaaattatccacttctagcagccaaacaaacatggcccgacgattgctagcatatcccggtgtgccacagaatacagaggcggatgaacactacacagatcaacttaacaagaaggagctatcctcaccatcgaaaatgatgaagcacacccaagttgacaaagtcctagattctataattccagaaaaatgaagcttgttacatcctcatgacatgcatgaaggaatttgcttttgcgtatctgtggagggcttcgtcacttttgaatgaaaaaacatctatgtacatataaatcacttggtgaagcctttctcaggcatgtgtgttgatgcaacctctgggaaacaaatgctatcagctgctgacatatgctacttcaatactgcttgatatgtattgcactctcagttccgtctactgttggtccaaactgcatctgtgtatatacagacgagttgtattaaactttctaaatctgtgtatactaatgcaacctcttgaaaacagttgttagcccttgacacgtatgctattttaatgctacttaatatgtattgcaatttggttttcctgtacagaactgctacaattcacgttccaatattaatcggaagctactgcagcctagcaaaatttccttaagtctgctttgtg

SEQ ID NO: 220407 - DNA, 705 bp, Zea Mays
acgggtttgcagctgacgctctccatcctcgttcttctcgctccgttcctctttccctcctcccctccgtcttggttcttcacacctggttcttctgtctcccgttgtctctatcgtctgctccggtgaacccgcatcgttcctattccttgtgctgcttccgtcgtcggctccagtaaatcactttgttcgccagctcgagatcgtggacggcttgctaaaatcagttaccataaacatgagagcattctcagtgacaaatagagcattttctattctctctatattaacaaaccatggaagacaatcctcagtaccatcttccctacttacctaccccgaacaacatcttatcacaagatgacgtacttggccttacaaccacgcaccagcgacatcattttccaaattatccacttctagcagccaaacaaacatggcccgacgattgctagcatatcccggtgtgccacagaatacagaggcggatgaacactacacagatcaacttaacaagaaggagctatcctcaccatcgaaaatgatgaagcacacccaagttgacaaagtcctagattctataattccagaaaaatgaagcttgttacatcctcatgacatgcatgaagaactgctacaattcacgttccaatattaatcggaagctactgcagcctagcaaaatttccttaagtctgctttgtg

SEQ ID NO: 220408 - DNA, 1351 bp, Zea Mays
acgggtttgcagctgacgctctccatcctcgttcttctcgctccgttcctctttccctcctcccctccgtcttggttcttcacacctggttcttctgtctcccgttgtctctatcgtctgctccggtgaacccgcatcgttcctattccttgtgctgcttccgtcgtcggctccagtaaatcactttgttcgccagctcgagatcgtggacggcttgctaaaatcagttcttccagtttcttctcttgagcaaccctaatctcatccggaaggtcctgaaaattaaacatggagcagtaactaaacaacatggctagatgaaaagggggctatactccattgatgtaatcagaaaataaaatggaagcatatgtgctattcttttatacatgtaggttgctcacataaagtggccttgattttaaataacacaaccatggtaagcttatacccccctcccgctgtagaattgaattacacaaccagttgccacttatgcataggggtggtaatgggctctagattttacattataaaatttaaggatcgaatcgcgttaggaccatgctctattcctttttttaactaaaatttattaagggccctaactgaaaaataaaattttggatcgtggtccattaccacccttatgcctacttgactctttccaatataagatgaagattctgtcggaaagcaattatatttagttgatgcatagaaagagacatgaacatatccattctacactgttctaaaacaaggtcaattaggcttcctcacttcccctctgacaagaacaaattccctttcaccatttttcgaccaatcagtttgagcagcatagttaaaatttcagtatgttagtatttcaatcaatacttgatacttaatgcagtgcagtaatccagctacaccatgaactttatcccactacatgatgaaatttatctttgcagttaccataaacatgagagcattctcagtgacaaatagagcattttctattctctctatattaacaaaccatggaagacaatcctcagtaccatcttccctacttacctaccccgaacaacatcttatcacaagatgacgtacttggccttacaaccacgcaccagcgacatcattttccaaattatccacttctagcagccaaacaaacatggcccgacgattgctagcatatcccggtgtgccacagaatacagaggcggatgaacactacacagatcaacttaacaagaaggagctatcctcaccatcgaaaataactgctacaattcacgttccaatattaatcggaagctactgcagcctagcaaaatttccttaagtctgctttgtg

SEQ ID NO: 220409 - DNA, 3140 bp, Zea Mays
gttctcttcgtctctacgggtttgcagctgacgctctccatcctcgttcttctcgctccgttcctctttccctcctcccctccgtcttggttcttcacacctggttcttctgtctcccgttgtctctatcgtctgctccggtgaacccgcatcgttcctattccttgtgctgcttccgtcgtcggctccagtaaatcactttgttcgccagctcgagatcgtggacggcttgctaaaatcaggtttgttttcattgggtttccatttctggaagtgattaaggcgaagtaaatcttctttcctcgaaacgtatacactttggtgcatctgtggaaatctgatttgttgggtttctgatctatttggctctttgcattttttaaatcccctcctacaaatcctgctacctccccgtctttttttgtttgtttggaaaatttgtttcgtatcttccctcctcgtttttttgcttcagttcgaaatcgatttggtgggtttctgatggcaaccctcgccaccgcctcatgggtacgtgccgagccgccttatctgttcgctcaccactttacattggttcttgcgcctgcgatttcggtgtcgtaggatcatgcttgtgcggatgtgatggtcgctgtggcttcgcgtcggtgggcggtgggatttgggctgggattctcgcgccttgtctctagggtttgggtttggtgcttcctcagtgcggaattggggattataattcctttaggtttgattttatctcgggtaactgcgggataatagcctagtagggaaatcgtggggattcttaaggattattaagtttctgatttatctctgccttatttagctcgtctgttgtggtggcttttccttcttgctgatgctgattatgcttccggttatgagccacaaaacaatattgatcggcaacctgtagttttgcctcagttcatcgcttgctgtctctgttaaatgaccaagaataaagtttagtacttcacacattaggcatccagtaaaacggtatcataattccaaaggtcagtaacgcaaacaaacaccttctaaatcttttccgtttgctgcagcagccatgagattctccttgatctgtttgcgacatttattcctctcttgaacaatatcttgactattccctccagtgaacagcgagacatatttctcattcttagggaagaactacaaatgagttgagatatagaagctttagctcaggattcaagcaggtacagataaaaaatggttgattagaacctccaatctaatgcaaagagaatgatacatcacagaaaacaaagttgtaatgatacttatatgtcatatcatcatgggcagggcagtaatgtaggaagcttactctaacatattcaagatcttctcgcaattttgacagattattgttgacaccatcaccatttgaacgttgttgcttctcgagtcgccttatcatcctctcaatcttccgtctctctttgtattttgaataccaacatcaagaagatggtaagtacattccatacatgcatagaaaagaaacttaaaatgaaaaggaaagtataacagaccaaagaactttatctttctatctctaaattgtaatgtccgctggacaacaagttgattctgaagctcttgttgcctcttcagttcttccagtttcttctcttgagcaaccctaatctcatccggaaggtcctgaaaattaaacatggagcagtaactaaacaacatggctagatgaaaagggggctatactccattgatgtaatcagaaaataaaatggaagcatatgtgctattcttttatacatgtaggttgctcacataaagtggccttgattttaaataacacaaccatggtaagcttatacccccctcccgctgtagaattgaattacacaaccagttgccacttatgcataggggtggtaatgggctctagattttacattataaaatttaaggatcgaatcgcgttaggaccatgctctattcctttttttaactaaaatttattaagggccctaactgaaaaataaaattttggatcgtggtccattaccacccttatgcctacttgactctttccaatataagatgaagattctgtcggaaagcaattatatttagttgatgcatagaaagagacatgaacatatccattctacactgttctaaaacaaggtcaattaggcttcctcacttcccctctgacaagaacaaattccctttcaccatttttcgaccaatcagtttgagcagcatagttaaaatttcagtatgttagtatttcaatcaatacttgatacttaatgcagtgcagtaatccagctacaccatgaactttatcccactacatgatgaaatttatctttgcagttaccataaacatgagagcattctcagtgacaaatagagcattttctattctctctatattaacaaaccatggaagacaatcctcagtaccatcttccctacttacctaccccgaacaacatcttatcacaagatgacgtacttggccttacaaccacgcaccagcgacatcattttccaaattatccacttctagcagccaaacaaacatggcccgacgattgctagcatatcccggtgtgccacagaatacagaggcggatgaacactacacagatcaacttaacaagaaggagctatcctcaccatcgaaaatgatgaagcacacccaagttgacaaagtcctagattctataattccagaaaaatgaagcttgttacatcctcatgacatgcatgaaggcatgtgtgttgatgcaacctctgggaaacaaatgctatcagctgctgacatatgctacttcaatactgcttgatatgtattgcactctcagttccgtctactgttggtccaaactgcatctgtgtatatacagacgagttgtattaaactttctaaatctgtgtatactaatgcaacctcttgaaaacagttgttagcccttgacacgtatgctattttaatgctacttaatatgtattgcaatttggttttcctgtacagaactgctacaattcacgttccaatattaatcggaagctactgcagcctagcaaaatttccttaagtctgctttgtg

SEQ ID NO: 220410 - DNA, 2530 bp, Zea Mays
ctcgttctcttcgtctctacgggtttgcagctgacgctctccatcctcgttcttctcgctccgttcctctttccctcctcccctccgtcttggttcttcacacctggttcttctgtctcccgttgtctctatcgtctgctccggtgaacccgcatcgttcctattccttgtgctgcttccgtcgtcggctccagtaaatcactttgttcgccagctcgagatcgtggacggcttgctaaaatcagttcatcgcttgctgtctctgttaaatgaccaagaataaagtttagtacttcacacattaggcatccagtaaaacggtatcataattccaaaggtcagtaacgcaaacaaacaccttctaaatcttttccgtttgctgcagcagccatgagattctccttgatctgtttgcgacatttattcctctcttgaacaatatcttgactattccctccagtgaacagcgagacatatttctcattcttagggaagaactacaaatgagttgagatatagaagctttagctcaggattcaagcaggtacagataaaaaatggttgattagaacctccaatctaatgcaaagagaatgatacatcacagaaaacaaagttgtaatgatacttatatgtcatatcatcatgggcagggcagtaatgtaggaagcttactctaacatattcaagatcttctcgcaattttgacagattattgttgacaccatcaccatttgaacgttgttgcttctcgagtcgccttatcatcctctcaatcttccgtctctctttgtattttgaataccaacatcaagaagatggtaagtacattccatacatgcatagaaaagaaacttaaaatgaaaaggaaagtataacagaccaaagaactttatctttctatctctaaattgtaatgtccgctggacaacaagttgattctgaagctcttgttgcctcttcagttcttccagtttcttctcttgagcaaccctaatctcatccggaaggtcctgaaaattaaacatggagcagtaactaaacaacatggctagatgaaaagggggctatactccattgatgtaatcagaaaataaaatggaagcatatgtgctattcttttatacatgtaggttgctcacataaagtggccttgattttaaataacacaaccatggtaagcttatacccccctcccgctgtagaattgaattacacaaccagttgccacttatgcataggggtggtaatgggctctagattttacattataaaatttaaggatcgaatcgcgttaggaccatgctctattcctttttttaactaaaatttattaagggccctaactgaaaaataaaattttggatcgtggtccattaccacccttatgcctacttgactctttccaatataagatgaagattctgtcggaaagcaattatatttagttgatgcatagaaagagacatgaacatatccattctacactgttctaaaacaaggtcaattaggcttcctcacttcccctctgacaagaacaaattccctttcaccatttttcgaccaatcagtttgagcagcatagttaaaatttcagtatgttagtatttcaatcaatacttgatacttaatgcagtgcagtaatccagctacaccatgaactttatcccactacatgatgaaatttatctttgcagttaccataaacatgagagcattctcagtgacaaatagagcattttctattctctctatattaacaaaccatggaagacaatcctcagtaccatcttccctacttacctaccccgaacaacatcttatcacaagatgacgtacttggccttacaaccacgcaccagcgacatcattttccaaattatccacttctagcagccaaacaaacatggcccgacgattgctagcatatcccggtgtgccacagaatacagaggcggatgaacactacacagatcaacttaacaagaaggagctatcctcaccatcgaaaatgatgaagcacacccaagttgacaaagtcctagattctataattccagaaaaatgaagcttgttacatcctcatgacatgcatgaaggaatttgcttttgcgtatctgtggagggcttcgtcacttttgaatgaaaaaacatctatgtacatataaatcacttggtgaagcctttctcaggcatgtgtgttgatgcaacctctgggaaacaaatgctatcagctgctgacatatgctacttcaatactgcttgatatgtattgcactctcagttccgtctactgttggtccaaactgcatctgtgtatatacagacgagttgtattaaactttctaaatctgtgtatactaatgcaacctcttgaaaacagttgttagcccttgacacgtatgctattttaatgctacttaatatgtattgcaatttggttttcctgtacagaactgctacaattcacgttccaatattaatcggaagctactgcagcctagcaaaatttccttaagtctgctttgtg

SEQ ID NO: 220411 - DNA, 3150 bp, Zea Mays
ctcgttctcttcgtctctacgggtttgcagctgacgctctccatcctcgttcttctcgctccgttcctctttccctcctcccctccgtcttggttcttcacacctggttcttctgtctcccgttgtctctatcgtctgctccggtgaacccgcatcgttcctattccttgtgctgcttccgtcgtcggctccagtaaatcactttgttcgccagctcgagatcgtggacggcttgctaaaatcaggtttgttttcattgggtttccatttctggaagtgattaaggcgaagtaaatcttctttcctcgaaacgtatacactttggtgcatctgtggaaatctgatttgttgggtttctgatctatttggctctttgcattttttaaatcccctcctacaaatcctgctacctccccgtctttttttgtttgtttggaaaatttgtttcgtatcttccctcctcgtttttttgcttcagttcgaaatcgatttggtgggtttctgatggcaaccctcgccaccgcctcatgggtacgtgccgagccgccttatctgttcgctcaccactttacattggttcttgcgcctgcgatttcggtgtcgtaggatcatgcttgtgcggatgtgatggtcgctgtggcttcgcgtcggtgggcggtgggatttgggctgggattctcgcgccttgtctctagggtttgggtttggtgcttcctcagtgcggaattggggattataattcctttaggtttgattttatctcgggtaactgcgggataatagcctagtagggaaatcgtggggattcttaaggattattaagtttctgatttatctctgccttatttagctcgtctgttgtggtggcttttccttcttgctgatgctgattatgcttccggttatgagccacaaaacaatattgatcggcaacctgtagttttgcctcagttcatcgcttgctgtctctgttaaatgaccaagaataaagtttagtacttcacacattaggcatccagtaaaacggtatcataattccaaaggtcagtaacgcaaacaaacaccttctaaatcttttccgtttgctgcagcagccatgagattctccttgatctgtttgcgacatttattcctctcttgaacaatatcttgactattccctccagtgaacagcgagacatatttctcattcttagggaagaactacaaatgagttgagatatagaagctttagctcaggattcaagcaggtacagataaaaaatggttgattagaacctccaatctaatgcaaagagaatgatacatcacagaaaacaaagttgtaatgatacttatatgtcatatcatcatgggcagggcagtaatgtaggaagcttactctaacatattcaagatcttctcgcaattttgacagattattgttgacaccatcaccatttgaacgttgttgcttctcgagtcgccttatcatcctctcaatcttccgtctctctttgtattttgaataccaacatcaagaagatggtaagtacattccatacatgcatagaaaagaaacttaaaatgaaaaggaaagtataacagaccaaagaactttatctttctatctctaaattgtaatgtccgctggacaacaagttgattctgaagctcttgttgcctcttcagttcttccagtttcttctcttgagcaaccctaatctcatccggaaggtcctgaaaattaaacatggagcagtaactaaacaacatggctagatgaaaagggggctatactccattgatgtaatcagaaaataaaatggaagcatatgtgctattcttttatacatgtaggttgctcacataaagtggccttgattttaaataacacaaccatggtaagcttatacccccctcccgctgtagaattgaattacacaaccagttgccacttatgcataggggtggtaatgggctctagattttacattataaaatttaaggatcgaatcgcgttaggaccatgctctattcctttttttaactaaaatttattaagggccctaactgaaaaataaaattttggatcgtggtccattaccacccttatgcctacttgactctttccaatataagatgaagattctgtcggaaagcaattatatttagttgatgcatagaaagagacatgaacatatccattctacactgttctaaaacaaggtcaattaggcttcctcacttcccctctgacaagaacaaattccctttcaccatttttcgaccaatcagtttgagcagcatagttaaaatttcagtatgttagtatttcaatcaatacttgatacttaatgcagtgcagtaatccagctacaccatgaactttatcccactacatgatgaaatttatctttgcagttaccataaacatgagagcattctcagtgacaaatagagcattttctattctctctatattaacaaaccatggaagacaatcctcagtaccatcttccctacttacctaccccgaacaacatcttatcacaagatgacgtacttggccttacaaccacgcaccagcgacatcattttccaaattatccacttctagcagccaaacaaacatggcccgacgattgctagcatatcccggtgtgccacagaatacagaggcggatgaacactacacagatcaacttaacaagaaggagctatcctcaccatcgaaaatgaatttgcttttgcgtatctgtggagggcttcgtcacttttgaatgaaaaaacatctatgtacatataaatcacttggtgaagcctttctcaggcatgtgtgttgatgcaacctctgggaaacaaatgctatcagctgctgacatatgctacttcaatactgcttgatatgtattgcactctcagttccgtctactgttggtccaaactgcatctgtgtatatacagacgagttgtattaaactttctaaatctgtgtatactaatgcaacctcttgaaaacagttgttagcccttgacacgtatgctattttaatgctacttaatatgtattgcaatttggttttcctgtacagaactgctacaattcacgttccaatattaatcggaagctactgcagcctagcaaaatttccttaagtctgctttgtg

SEQ ID NO: 220412 - DNA, 2296 bp, Zea Mays
gactctcgttctcttcgtctctacgggtttgcagctgacgctctccatcctcgttcttctcgctccgttcctctttccctcctcccctccgtcttggttcttcacacctggttcttctgtctcccgttgtctctatcgtctgctccggtgaacccgcatcgttcctattccttgtgctgcttccgtcgtcggctccagtaaatcactttgttcgccagctcgagatcgtggacggcttgctaaaatcagattattgttgacaccatcaccatttgaacgttgttgcttctcgagtcgccttatcatcctctcaatcttccgtctctctttgtattttgaataccaacatcaagaagatggtaagtacattccatacatgcatagaaaagaaacttaaaatgaaaaggaaagtataacagaccaaagaactttatctttctatctctaaattgtaatgtccgctggacaacaagttgattctgaagctcttgttgcctcttcagttcttccagtttcttctcttgagcaaccctaatctcatccggaaggtcctgaaaattaaacatggagcagtaactaaacaacatggctagatgaaaagggggctatactccattgatgtaatcagaaaataaaatggaagcatatgtgctattcttttatacatgtaggttgctcacataaagtggccttgattttaaataacacaaccatggtaagcttatacccccctcccgctgtagaattgaattacacaaccagttgccacttatgcataggggtggtaatgggctctagattttacattataaaatttaaggatcgaatcgcgttaggaccatgctctattcctttttttaactaaaatttattaagggccctaactgaaaaataaaattttggatcgtggtccattaccacccttatgcctacttgactctttccaatataagatgaagattctgtcggaaagcaattatatttagttgatgcatagaaagagacatgaacatatccattctacactgttctaaaacaaggtcaattaggcttcctcacttcccctctgacaagaacaaattccctttcaccatttttcgaccaatcagtttgagcagcatagttaaaatttcagtatgttagtatttcaatcaatacttgatacttaatgcagtgcagtaatccagctacaccatgaactttatcccactacatgatgaaatttatctttgcagttaccataaacatgagagcattctcagtgacaaatagagcattttctattctctctatattaacaaaccatggaagacaatcctcagtaccatcttccctacttacctaccccgaacaacatcttatcacaagatgacgtacttggccttacaaccacgcaccagcgacatcattttccaaattatccacttctagcagccaaacaaacatggcccgacgattgctagcatatcccggtgtgccacagaatacagaggcggatgaacactacacagatcaacttaacaagaaggagctatcctcaccatcgaaaatgtaagtattcgagtattataaaaaaagtaggataaacaacagatacattttaattttaccactaaaacttatgtccaggatgaagcacacccaagttgacaaagtcctagattctataattccagaaaaatgaagcttgttacatcctcatgacatgcatgaaggtataatactatatatactcctttgtgatacaaaacatattaccccccccccacattatctttcactcgccttagtacccattaaacagcaacaaataattaggcaaacattgttagcacaactaatcctatcttcctctttatgtaaaggaatttgcttttgcgtatctgtggagggcttcgtcacttttgaatgaaaaaacatctatgtacatataaatcacttggtgaagcctttctcaggcatgtgtgttgatgcaacctctgggaaacaaatgctatcagctgctgacatatgctacttcaatactgcttgatatgtattgcactctcagttccgtctactgttggtccaaactgcatctgtgtatatacagacgagttgtattaaactttctaaatctgtgtatactaatgcaacctcttgaaaacagttgttagcccttgacacgtatgctattttaatgctacttaatatgtattgcaatttggttttcctgtacagaactgctacaattcacgttccaatattaatcggaagctactgcagcctagcaaaatttccttaagtctgctttgtg

SEQ ID NO: 220413 - DNA, 3172 bp, Zea Mays
gctccacggccatctatttctggattgttctaggtgacgtttgcttcgtgtggacgactctcgttctcttcgtctctacgggtttgcagctgacgctctccatcctcgttcttctcgctccgttcctctttccctcctcccctccgtcttggttcttcacacctggttcttctgtctcccgttgtctctatcgtctgctccggtgaacccgcatcgttcctattccttgtgctgcttccgtcgtcggctccagtaaatcactttgttcgccagctcgagatcgtggacggcttgctaaaatcaggtttgttttcattgggtttccatttctggaagtgattaaggcgaagtaaatcttctttcctcgaaacgtatacactttggtgcatctgtggaaatctgatttgttgggtttctgatctatttggctctttgcattttttaaatcccctcctacaaatcctgctacctccccgtctttttttgtttgtttggaaaatttgtttcgtatcttccctcctcgtttttttgcttcagttcgaaatcgatttggtgggtttctgatggcaaccctcgccaccgcctcatgggtacgtgccgagccgccttatctgttcgctcaccactttacattggttcttgcgcctgcgatttcggtgtcgtaggatcatgcttgtgcggatgtgatggtcgctgtggcttcgcgtcggtgggcggtgggatttgggctgggattctcgcgccttgtctctagggtttgggtttggtgcttcctcagtgcggaattggggattataattcctttaggtttgattttatctcgggtaactgcgggataatagcctagtagggaaatcgtggggattcttaaggattattaagtttctgatttatctctgccttatttagctcgtctgttgtggtggcttttccttcttgctgatgctgattatgcttccggttatgagccacaaaacaatattgatcggcaacctgtagttttgcctcagttcatcgcttgctgtctctgttaaatgaccaagaataaagtttagtacttcacacattaggcatccagtaaaacggtatcataattccaaagtgaacagcgagacatatttctcattcttagggaagaactacaaatgagttgagatatagaagctttagctcaggattcaagcaggtacagataaaaaatggttgattagaacctccaatctaatgcaaagagaatgatacatcacagaaaacaaagttgtaatgatacttatatgtcatatcatcatgggcagggcagtaatgtaggaagcttactctaacatattcaagatcttctcgcaattttgacagattattgttgacaccatcaccatttgaacgttgttgcttctcgagtcgccttatcatcctctcaatcttccgtctctctttgtattttgaataccaacatcaagaagatggtaagtacattccatacatgcatagaaaagaaacttaaaatgaaaaggaaagtataacagaccaaagaactttatctttctatctctaaattgtaatgtccgctggacaacaagttgattctgaagctcttgttgcctcttcagttcttccagtttcttctcttgagcaaccctaatctcatccggaaggtcctgaaaattaaacatggagcagtaactaaacaacatggctagatgaaaagggggctatactccattgatgtaatcagaaaataaaatggaagcatatgtgctattcttttatacatgtaggttgctcacataaagtggccttgattttaaataacacaaccatggtaagcttatacccccctcccgctgtagaattgaattacacaaccagttgccacttatgcataggggtggtaatgggctctagattttacattataaaatttaaggatcgaatcgcgttaggaccatgctctattcctttttttaactaaaatttattaagggccctaactgaaaaataaaattttggatcgtggtccattaccacccttatgcctacttgactctttccaatataagatgaagattctgtcggaaagcaattatatttagttgatgcatagaaagagacatgaacatatccattctacactgttctaaaacaaggtcaattaggcttcctcacttcccctctgacaagaacaaattccctttcaccatttttcgaccaatcagtttgagcagcatagttaaaatttcagtatgttagtatttcaatcaatacttgatacttaatgcagtgcagtaatccagctacaccatgaactttatcccactacatgatgaaatttatctttgcagttaccataaacatgagagcattctcagtgacaaatagagcattttctattctctctatattaacaaaccatggaagacaatcctcagtaccatcttccctacttacctaccccgaacaacatcttatcacaagatgacgtacttggccttacaaccacgcaccagcgacatcattttccaaattatccacttctagcagccaaacaaacatggcccgacgattgctagcatatcccggtgtgccacagaatacagaggcggatgaacactacacagatcaacttaacaagaaggagctatcctcaccatcgaaaatgatgaagcacacccaagttgacaaagtcctagattctataattccagaaaaatgaagcttgttacatcctcatgacatgcatgaaggaatttgcttttgcgtatctgtggagggcttcgtcacttttgaatgaaaaaacatctatgtacatataaatcacttggtgaagcctttctcaggcatgtgtgttgatgcaacctctgggaaacaaatgctatcagctgctgacatatgctacttcaatactgcttgatatgtattgcactctcagttccgtctactgttggtccaaactgcatctgtgtatatacagacgagttgtattaaactttctaaatctgtgtatactaatgcaacctcttgaaaacagttgttagcccttgacacgtatgctattttaatgctacttaatatgtattgcaatttggttttcctgtacagaactgctacaattcacgttccaatattaatcggaagctactgcagcctagcaaaatttccttaagtctgctttgtg

SEQ ID NO: 220414 - DNA, 3137 bp, Zea Mays
cattcatggacgtcttacattgctccacggccatctatttctggattgttctaggtgacgtttgcttcgtgtggacgactctcgttctcttcgtctctacgggtttgcagctgacgctctccatcctcgttcttctcgctccgttcctctttccctcctcccctccgtcttggttcttcacacctggttcttctgtctcccgttgtctctatcgtctgctccggtgaacccgcatcgttcctattccttgtgctgcttccgtcgtcggctccagtaaatcactttgttcgccagctcgagatcgtggacggcttgctaaaatcaggtttgttttcattgggtttccatttctggaagtgattaaggcgaagtaaatcttctttcctcgaaacgtatacactttggtgcatctgtggaaatctgatttgttgggtttctgatctatttggctctttgcattttttaaatcccctcctacaaatcctgctacctccccgtctttttttgtttgtttggaaaatttgtttcgtatcttccctcctcgtttttttgcttcagttcgaaatcgatttggtgggtttctgatggcaaccctcgccaccgcctcatgggtacgtgccgagccgccttatctgttcgctcaccactttacattggttcttgcgcctgcgatttcggtgtcgtaggatcatgcttgtgcggatgtgatggtcgctgtggcttcgcgtcggtgggcggtgggatttgggctgggattctcgcgccttgtctctagggtttgggtttggtgcttcctcagtgcggaattggggattataattcctttaggtttgattttatctcgggtaactgcgggataatagcctagtagggaaatcgtggggattcttaaggattattaagtttctgatttatctctgccttatttagctcgtctgttgtggtggcttttccttcttgctgatgctgattatgcttccggttatgagccacaaaacaatattgatcggcaacctgtagttttgcctcagttcatcgcttgctgtctctgttaaatgaccaagaataaagtttagtacttcacacattaggcatccagtaaaacggtatcataattccaaaggtcagtaacgcaaacaaacaccttctaaatcttttccgtttgctgcagcagccatgagattctccttgatctgtttgcgacatttattcctctcttgaacaatatcttgactattccctccagtgaacagcgagacatatttctcattcttagggaagaactacaaatgagttgagatatagaagctttagctcaggattcaagcaggtacagataaaaaatggttgattagaacctccaatctaatgcaaagagaatgatacatcacagaaaacaaagttgtaatgatacttatatgtcatatcatcatgggcagggcagtaatgtaggaagcttactctaacatattcaagatcttctcgcaattttgacagattattgttgacaccatcaccatttgaacgttgttgcttctcgagtcgccttatcatcctctcaatcttccgtctctctttgtattttgaataccaacatcaagaagatggtaagtacattccatacatgcatagaaaagaaacttaaaatgaaaaggaaagtataacagaccaaagaactttatctttctatctctaaattgtaatgtccgctggacaacaagttgattctgaagctcttgttgcctcttcagttcttccagtttcttctcttgagcaaccctaatctcatccggaaggtcctgaaaattaaacatggagcagtaactaaacaacatggctagatgaaaagggggctatactccattgatgtaatcagaaaataaaatggaagcatatgtgctattcttttatacatgtaggttgctcacataaagtggccttgattttaaataacacaaccatggtaagcttatacccccctcccgctgtagaattgaattacacaaccagttgccacttatgcataggggtggtaatgggctctagattttacattataaaatttaaggatcgaatcgcgttaggaccatgctctattcctttttttaactaaaatttattaagggccctaactgaaaaataaaattttggatcgtggtccattaccacccttatgcctacttgactctttccaatataagatgaagattctgtcggaaagcaattatatttagttgatgcatagaaagagacatgaacatatccattctacactgttctaaaacaaggtcaattaggcttcctcacttcccctctgacaagaacaaattccctttcaccatttttcgaccaatcagtttgagcagcatagttaaaatttcagtatgttagtatttcaatcaatacttgatacttaatgcagtgcagtaatccagctacaccatgaactttatcccactacatgatgaaatttatctttgcagttaccataaacatgagagcattctcagtgacaaatagagcattttctattctctctatattaacaaaccatggaagacaatcctcagtaccatcttccctacttacctaccccgaacaacatcttatcacaagatgacgtacttggccttacaaccacgcaccagcgacatcattttccaaattatccacttctagcagccaaacaaacatggcccgacgattgctagcatatcccggtgtgccacagaatacagaggcggatgaacactacacagatcaacttaacaagaaggagctatcctcaccatcgaaaatgcatgtgtgttgatgcaacctctgggaaacaaatgctatcagctgctgacatatgctacttcaatactgcttgatatgtattgcactctcagttccgtctactgttggtccaaactgcatctgtgtatatacagacgagttgtattaaactttctaaatctgtgtatactaatgcaacctcttgaaaacagttgttagcccttgacacgtatgctattttaatgctacttaatatgtattgcaatttggttttcctgtacagaactgctacaattcacgttccaatattaatcggaagctactgcagcctagcaaaatttccttaagtctgctttgtg

SEQ ID NO: 220415 - DNA, 816 bp, Zea Mays
ggcagcacgagcagcccgctccactcctcccctgccgaagcaccacacaggcacacagcagaagcgaaaactgcaggaaggccaatcgggcctggcaggcatgcttgcccgctgccgcagccggagccggagccggagcacgaggtagcgccacagaatccggagccggagccggagaccgcggttgggaagcgcgaggaggaaggtgtcagtgcgggtgcgcgcggccgacatgcccctaccgctgcagcgccgcgcggtccggctcgcctacgaagccatcgtcgccatgccgcgcctcgacagcaagcgcctcgccctcgcgctcaagaaggaatttgatacggcatatggtccagcttggcattgcattgttggaacaagctttggttcctatgtcactcactctctgggcggtttcttgtacttctccgtcgacaaggcctatattctcctcttcagaaccgctgtcgagccattagcccatccgcgatgaggggccatgaaacagtctactagctagcgcattctgtattcgacatttaactgtagaagggtaaggagagtagaacgatcatcgcccccaccccccaatgcaaatatgtagaactaatctgctgtagctaagtttgttccatgtactgtgcactaatcggccatgtggaccttaacattagctttcagagttgtagcttgactcagctcagttcttccgcgcgaggggaattttctttcgcatcttgtaatgccttgtagccttgttcgcaatcgcaatggaatcagtagatgcatcctgttaaatatagctgttctgat

SEQ ID NO: 220416 - DNA, 2081 bp, Zea Mays
cctgatcggccagacagataccgaaccgagaccgagagtgcaaaccttccttccaccttccaattccagtagtcccacgcacaaactttccccagctgcctgcgcccgcccaactaccccgcgcgcggcagccggcagcaggtcgtgccatggacgacgacgccacggtcggatcgcggcagcgccagcagcagccggcctcgccggcggcggctgattccagggccatgatggcggagctggacgcgccgctgcacgccctcgggttcgagatggaggagctctccccgtcgcggctcaccggccgcctccccatcactcccatctgctgccagccgttcaaggtgctgcacggcggcgtgtcggcgctggtggcggaggcgctggcgagcatgggcgcgcacatggcgtcggggtaccgccgcgtcgccggcgtgcagctcagcatcaaccacttccgcagcgccgccctcggcgacaccgtcctcgcgcaggccgtccccgtccacgtcggacgctccacacaggtgcgctgcccttggtttttcccttccacggtctatgattgcatcgtcctcgacctcgtcccctttacgaccatcgccagccatctcctcgaccacgcctccgcacgacgatcggcgaacaagctatctggtcaacgacgaccgctagccggctagccctgagtgggtttggtgcgttgaggccttagcatttattaacccatgatcaatctatatttagctcttttagaccttgcttgattattcccacgacagtatgaattggaagggattcggaataattttgatttgctagaaatttaaactctctcaatcttctctaattcattctaatttatatgtgttgagattgaggccctatttagacgcaatcagtttttaagaatccagtttctatctctagtttctagaaatcggtttataaagaaagaaaaaactggtttaggccttgttcgtttgtatcggattgctcccgaaatcgttccagctaatcaaagtttatataaattagagaagcaatccgggtagtaaacgttccgctccaccaatccggcacaaacgaacaagaccttatagtgtttggaaccggctcagtttttataaactagttttatctaggaggcgctagttttttggtttttaaaaaactaaaaattttcataaaccagtttctgtgttttcaaacaggccttaaaacgacacgtaacatgtaaaacgcggaactaatttatctcccgtccttccagcaacaatgcgaccgcaactgaacgtgcacacggcgagcccatcccatgcactggtgtacaggcagtagcggttagctgatctgtttgtgcgtgacgggacgcagcaccaaccaaccgggggctccgagaagatgcatggtccaccacgccaccccggcactaggccattgcccattggcatttggcaaggtttgggaggtgaagctctggaagatggatccgtccacaggagcgaagggacctcagatcgccgaatccagagtcacgctgctgtctaacctgccgttgccggaggagcacaagagggcaggagacgctctgaagaaatattcatcaaaactgtagagaagaaacttcatgctcatgaaagcccttgcatcttgcaggtttcacggatctgatggatgttgtaattaaaaagcattgcctataataaatatttcttatttaccaccagtttcttctgtacgcctgtaccatgtgtcccgttgagccttcatcacactaaacaaacaaagaaacagaagacctttcctgttgaaaataacgtcaggagcaagagcaagaggcgtgaggctggcactattcaccatccggcaacaaatcggaaggaggcggtcggtcattccatgcggagtgctatgtggctgagagatgggaccagcgatatgaatctgggagcgtcttatgagtgggccagtgttggcttatgtccgtgtgcgtgtctgactgtgccggtatagagaccggttgtaagggtaatttgccggcatgatggaacaaccctgaactcaaactcttctgaaac

SEQ ID NO: 220417 - DNA, 3354 bp, Zea Mays
cagacagataccgaaccgagaccgagagtgcaaaccttccttccaccttccaattccagtagtcccacgcacaaactttccccagctgcctgcgcccgcccaactaccccgcgcgcggcagccggcagcaggtcgtgccatggacgacgacgccacggtcggatcgcggcagcgccagcagcagccggcctcgccggcggcggctgattccagggccatgatggcggagctggacgcgccgctgcacgccctcgggttcgagatggaggagctctccccgtcgcggctcaccggccgcctccccatcactcccatctgctgccagccgttcaaggtgctgcacggcggcgtgtcggcgctggtggcggaggcgctggcgagcatgggcgcgcacatggcgtcggggtaccgccgcgtcgccggcgtgcagctcagcatcaaccacttccgcagcgccgccctcggcgacaccgtcctcgcgcaggccgtccccgtccacgtcggacgctccacacaggtgcgctgcccttggtttttcccttccacggtctatgattgcatcgtcctcgacctcgtcccctttacgaccatcgccagccatctcctcgaccacgcctccgcacgacgatcggcgaacaagctatctggtcaacgacgaccgctagccggctagccctgagtgggtttggtgcgttgaggccttagcatttattaacccatgatcaatctatatttagctcttttagaccttgcttgattattcccacgacagtatgaattggaagggattcggaataattttgatttgctagaaatttaaactctctcaatcttctctaattcattctaatttatatgtgttgagattgaggccctatttagacgcaatcagtttttaagaatccagtttctatctctagtttctagaaatcggtttataaagaaagaaaaaactggtttaggccttgttcgtttgtatcggattgctcccgaaatcgttccagctaatcaaagtttatataaattagagaagcaatccgggtagtaaacgttccgctccaccaatccggcacaaacgaacaagaccttatagtgtttggaaccggctcagtttttataaactagttttatctaggaggcgctagttttttggtttttaaaaaactaaaaattttcataaaccagtttctgtgttttcaaacaggccttaaaacgacacgtaacatgtaaaacgcggaactaatttatctcccgtccttccagcaacaatgcgaccgcaactgaacgtgcacacggcgagcccatcccatgcactggtgtacaggcagtagcggttagctgatctgtttgtgcgtgacgggacgcagcaccaaccaaccgggggctccgagaagatgcatggtccaccacgccaccccggcactaggccattgcccattggcatttggcaaggtctataatgtccgtcactaccagcgacccctcctaggcctagtagcagcaactagcaagctgcttcgtccctccccttgtggcccaggacatggctacgagaacgaactagatggcagccgcggtcccagccattcattcaatccggagtcgagtagcaatgcgccagagcgtcggtgacctggaccatctatttcatttcgggcactatcaggttgattggttgggtggccgagcgtggcctgagcggtgtgagcatggctcactggaaacgtaacaatcatacgtacctgcgcatgcaggctggagagctgattttagcaaacgctgcagctgcgggtgcagccttaacgtcgcatgcgtaggcaagcaaacaggagcggtcccttggtcaatacaactagagagtctggatggatatgtgcagccaaccaatcacaatctatctaaatgcaccaatgcaagaaattcctagcgatcgatccggttatcgtgaaccggctggaaattcggcgtccgtgacaggtaaactgagaggacaaaggagcagtgagctgtctgtctgcggaaccaagccaccaattccgatctgagcatcggtccgtcaggctcaggcccctctggcctccacaccaagtcccagccacccaacccagctacccgtctaccccgcggcgggtgacgctgacgccacggcaacggcacccggctccggcgtgatgctatctccaacaacttgtactcactaacgctgaaacatgttccttccggtcttacggaaagaacatagactccacacgattgcactaagactgtcttcagcttcagcacttcatccatatgatcatccaaaacagtgttttgcactataaattgtattattctttattcatagagtacaatcataagttggctagcataaaaaggatagatagttgaggcttggcatatccgaatcttctcagacagtaacagacaagcttgcccagatggatccttctttctatactctgcaggcctacatagtagtgactcatctctagtttagtgtcctcgaaccgaacaagaaacagtgatgatggctgcggcggctagctaacgaggtggaaccaccgtcccatctttaaaaactagaatgagaccatcctaacttacttagattcccaaaccaaacgttacctaaaagtaaaactatatgatgtgatttttttgcagaccttaaattcatttttatccatgtttttgttgttgttggagttctgctgttcaatttgttgatgctaatatggtcagttaccgcaactcgctccttctctttgaggaccctttctgaaacaaaaaattcgattggaaggtttgggaggtgaagctctggaagatggatccgtccacaggagcgaagggacctcagatcgccgaatccagagtcacgctgctgtctaacctgccgttgccggaggagcacaagagggcaggagacgctctgaagaaatattcatcaaaactgtagagaagaaacttcatgctcatgaaagcccttgcatcttgcagtttcttctgtacgcctgtaccatgtgtcccgttgagccttcatcacactaaacaaacaaagaaacagaagacctttcctgttgaaaataacgtcaggagcaagagcaagaggcgtgaggctggcactattcaccatccggcaacaaatcggaaggaggcggtcggtcattccatgcggagtgctatgtggctgagagatgggaccagcgatatgaatctgggagcgtcttatgagtgggccagtgttggcttatgtccgtgtgcgtgtctgactgtgccggtatagagaccggttgtaagggtaatttgccggcatgatggaacaaccctgaactcaaactcttctgaaac

SEQ ID NO: 220418 - DNA, 1714 bp, Zea Mays
attccagtccaccctcccttccccgcacgaaacccccaccagtattcatccatgtcagccgccgtccgctcccgcgccgcagcggccgccctctcggccgcgcgccgcatccacgctggccacgccgcggggcagaagcagcagggcagcaacagcactggcgcctttcgccgaccttggaccctcttcaggcgccagcagcaggaggagcggagccacgttccccgcgccgccgctcctgtcctggatgctgtcgccgatcacagggccggcggttcggacggtgcggagcccccagagatctggcgacagcccggagaagcccctgtcgctcccgagggtgtgggcgccgtcgggaggatcgacgtggttagggttgcagcccccggtggggaagactttgatggaaaggacgggggcggggaaagcgggggttggggtggctctaacctgggacgacggtttcccacgcccaaggagatttgccgtgggctggacaagtttgtcatcggccagcagcgagccaagaaggtgttgtcagtagcagtttataatcactataaaaggatctattgtgaatcactcatcaacaggtctgctgcggattgcagtcagagtgattcttgcacgagtgacaccgacatggtagagcttgagaaaagcaatattcttgtcatgggaccaacgggctcggggaaaacattgctggcaaaaacactggcaagatttgtgaacgtgcccttcgttatagctgatgcgacaagcctcactcaggctggatatgttggtgaggatgttgaatctattttgtataagctcctagcggctgctgatttcgacgtagctgctgcccagcagggaatcgtctatattgatgaagttgataaaataacaaagaaggctgaaagcatcaatcttagcagagatgtttcaggtgaaggtgtgcaacaagcattgttgaaaatgcttgaaggaacgataggttgttagtgttcctgagaaaggggccagaaggcacccaaggggtgacaatatccagattgataccaaaaacattctcttcatctgcggtggtgcttttgtggacttggagaaaactatttctgaaaggagacatgattcttcaattggtttccgagcgcaggttcgttcaaatatgcgatctggtggtgtcataaatgctgagattacatcatcgctactgaaatcagttgaaagtggcgatctcattgcgtatggactaatcccagagtttgttggtagatttccaattcttgttggtctatcctccctcagcgaagatcagcttgttgaggttctcacagagccaaagaatgcccttggcaggcagtataccaagttgttcgaaatgaatgacgtcaaattgcattttacggaggaggctttacggcttattgccaaaagagcaatatcgaagaatactggggctcgtggtttaaggtccatattagaaagtatattgacagaagctatgtatgagattccagagacacgaactggaaaagataaaatagatgctgtggttgttgacgaggagtctgttggatctgtaaatcagcatggaattggagctaagattctttgcggagaaaaagctttggatgtctatctggccaatcacaacaataaagaatcaacggatgctacatgtttggctgcatacgttggtgtgtccatggtggaggtgattaac

SEQ ID NO: 220419 - DNA, 1246 bp, Zea Mays
ctagctctggattcatggagattttgatacaattactgttccaacttgccacatgccaccgcatctacgaatagtgagaaaagctctgctggtttttcgtggctgctcatgaaaagttcaggttcataaaagcaaatgaggataacaccgttctcaatgccttgtcattcagcacttccaaaattagactgcttcggagcttgacaattgagcaaaaaaactcggttcaggttcttgattttgctgccttctcaagacctgaatacgaccttcctatattttgtgccaatgccttctcatcccctgcacggagtattgttgtcttggacctcaaccctttgtatgataccactgaacacaaggattacagggaaaaatactacagggctttgatgccccttgtacacaagtacagtgagctccatgtctttaatagatgaaatgcagcttctgccctggggtggcaagattacaagtgagtcgctgagattcttctctcccattgttatctggacggtattcgagccaagcgaagccaaccaccaagctctatactcggccttcgtggattactatatggtctggcttgagttcatggacggagcagttcgcgaaagtagcaaagaaaaaatcgaccgcaatagagaagcgcaacataaatatctcacatggagagcagagaaggatcctgggtacccgctgctaaagaagttgatcggtgagagtggtgccaaggacctggtgagggagttcctcttcgaaggagttggctcgctcggaaccaagtcgtttctggagtatttcgccgagtacgcgcaagaggacgggacggtgaacaagaagcggagcatggcggggaagtcctttggaacccgaccttgggacgcccacggactgttcgtcggcgacgctgtggatggatagcggccaagcgggggctgttttgcttctacataagcagtttcatctcaatccccgttgtttattcacggaggacttgcgtagtggtttcagttgttgtttcaagtggttttgcttcggcaaaagtactggacggttttgctggctcaggtttcagatcatcttcaacctttccccatggcattccatgcgaggccggctacaatttctgttgtctctttacttcttttatagcattgttcatcatctttttcgttgtccggtgacttggctttggttgctgccgctgctcggtcggtggttttaaacttttgattcgagtcct

SEQ ID NO: 220420 - DNA, 1179 bp, Zea Mays
ggcgtatctgcttcctgagttcctgtaaagaaatccagccacatggaggtcctttttctcccttcgaacccagaataaaaaaaaaagtttttgtaaagtagcaatatccacaggcccctcgagttatcgacgcacacgtaccactagaatgcagccatgatcgtctcctccttcctcccgctccgctcctccgtcttcgtcctcccctccagcgccgcctcccgctcccgtcccgccaccgccaccctccttccctttccaaggatcaccctcagccggcgccgccgcttggccgccgccgcgactgagagcagcagcagcagcagcgaagaaggagaaggagaagcggcgggcgggagtacgaacgggtccctcccgggcctgccccctgtggaggaggaggaggagctgtgccccgtggactgcgtgacggagttcaagacggacgaggagttccagcgccacctgaaccggtccagggccacgggcgctctggtggtggtggacttctaccggccctcctgcggcagctgcaagtacatcgagaaggccttcacgcgcctctgcaaggggtccggcgacgacggcgctcccgtcgtattcctcaagcacaacgtgatcgacgagtacgacgagcagtcggaggtggcggaccggctgcgcatcaagatcgtgccgctcttccatttctacgtggacggggtgctggtggagtcgttcccaacgagggacaaggagaggatcattgccgtcatccggaagtacacctcggtcgagccagaaccagaacctgaggaagagcagcaggagtgattccatttccactccagtggtggacatcagtttcctcgagggtgcagatagcctgctgaatcagagatatcatgcacaacagcaccacaggattgtttggagattggagtttatacacctatcccagcatttgggatgtgtgagctaccaccagcagtatatcatgaatctggatcaatgtaccactatctgtaatacgagatgatgtatagtttctgaatcaaacatgagcacttatcttgtacgccgtatctcgaacggaactgtgcaggacgcaaattagaacctataaaatttgatatatcgggagagtaaataacaaagtacatcaatacattttttgagaggtttgcatgaaaaaagaaa

SEQ ID NO: 220421 - DNA, 2425 bp, Zea Mays
ccttcaccctcctcgacgtcgcatctccctttccttttctcccactgcactgctgctccgctgccgctaccctttccctctcccttctcgtcctcggtcctccccaacccatggccacggccaccaccacccactgccccttctcccaccacgctatttatcgcggctgcacgactcctgcccatcaggcgccatagagacgcgtgggaccgaagccgccgatcaagcgctgctcggggcggagcagcggccggcggtggtgagtgctggcagacaggccggcaggtcaggcagagtgaccagctggtgagtcgaagcttgagcggggagctggactttggcgggttccggcgggctccggagcggagatggtgctggatctcaatgtagcgtcgccggcggactcgggcacgtcgagctcgtccgtcctcaactccgcggacggcggcttccggttcggcctgctcgggagccccgtcgacgacgacgactgctccggtgagatggcgcctggcgcgtccacggggttcatgacgcggcagctcttcccgtccccgaccccgccggccgagccggagccggagccggtggcggcgccggtgccggtgtggcagccgcagcgcgccgaggatctcggcatggcccagaggccggtggcgccagcgaagaagaccaggcgcgggcctaggtcgcggagctcgcagtacaggggcgtcaccttctacaggaggacgggccgctgggaatcgcacatctgggattgcgggaagcaagtctacctaggtggttttgacactgcgcacgcagccgcgagggcatacgatcgagctgcgatcaagttccgcggcctcgacgctgacatcaacttcagtctgagcgactacgaggatgatttgaagcagatgaggaattggaccaaggaggagttcgtgcacatactccggcgccagagcacggggttcgcgaggggaagctccaagtaccgtggcgtgacgctgcacaagtgcggccgctgggaagctaggatggggcaacttcttggcaagaagtacatctatcttgggctctttgacagcgaagttgaggcggcaagggcttatgacagggctgcccttcgcttcaatgggagggaagctgttactaactttgagcctagctcctacaatgcaggagataataacctgcgtgacaccgaaaccgagggtattacactcggccttgtcatccgttcttttttttaatatatatagtatctgaggtgtatctcatggttctctctacgttgtcagcaattgatgatggtgatgccattgatttggatttgcggatttcacagcctaatgtgcaagaccccaaaagggacaataccttagctggcctccagccaacatgtgattcccctgaatcttcaaatacgatggcttctcaggtaaaaccacccgttcaattttccagtatatagctttttacttatggtgcctaaagaggtatctagaaaaaaaattaaaatcttaagatggaagcaactgtcggttgaattgtctttgtagaatcttggacctctgatactagttcctactagtaactcatagcctacaaagattcataggactatttgattggcatatggttgggggagatcgatattaattcgtggtccaggtcctacaactattattgatctcacagtgtttgctcctttcacctgctgctgctgtagccaatgagctcatcatccccttggcccgggtatcaccaaaacccagcagtgtcatttcaccatcagcgcttgtactcgtcagcttgtcatggcttctttccgaaccaccaggtccaggaaaggccggtggagcgaaggcctgagctgggcgcccagccattcccctcatgggcatggcaagcgcagggctcccctcacgtgccgttgcaccactctgcagcatcatcaggattctctaccgccgccggggccaacggcggcatgcccctgccgtctcacccgccggcgcagttcccgactactacaaacccgttcttcttcccctagaccgcttttgacatgacagcttgctgttccggctcagctctcggcgtctgggatggcagctggtcttgcgtgtggcgtctagcagctctggtgatggaagaaagtgattgtgttttgtgtgtgtgtgtgtgagagagagagagagccataataagaagcgacatggctggtctccctctggtatgtgcctgttaggatatgggatatctccatgcatggattgtttccgagacagtagtagtattttgttgtagtcgaccatgcgtgtacatcagtataactggatctttgaagagctgagattttatgactcaacaagcattgacataatggcatgcactccaggaccactgaagcaaaaggccaatttgacatcat

SEQ ID NO: 220422 - DNA, 1022 bp, Zea Mays
caacaagctggtgctcgctggggtacatctatcttgggctctttgacagcgaagttgaggcggcaagggcttatgacagggctgcccttcgcttcaatgggagggaagctgttactaactttgagcctagctcctacaatgcaggagataataacctgcgtgacaccgaaaccgaggcaattgatgatggtgatgccattgatttggatttgcggatttcacagcctaatgtgcaagaccccaaaagggacaataccttagctggcctccagccaacatgtgattcccctgaatcttcaaatacgatggcttctcagccaatgagctcatcatccccttggcccgggtatcaccaaaacccagcagtgtcatttcaccatcagcgcttgtactcgtcagcttgtcatggcttctttccgaaccaccaggtccaggaaaggccggtggagcgaaggcctgagctgggcgcccagccattcccctcatgggcatggcaagcgcagggctcccctcacgtgccgttgcaccactctgcagcatcatcaggattctctaccgccgccggggccaacggcggcatgcccctgccgtctcacccgccggcgcagttcccgactactacaaacccgttcttcttcccctagaccgcttttgacatgacagcttgctgttccggctcagctctcggcgtctgggatggcagctggtcttgcgtgtggcgtctagcagctctggtgatggaagaaagtgattgtgttttgtgtgtgtgtgtgtgagagagagagagagccataataagaagcgacatggctggtctccctctggtatgtgcctgttaggatatgggatatctccatgcatggattgtttccgagacagtagtagtattttgttgtagtcgaccatgcgtgtacatcagtataactggatctttgaagagctgagattttatgactcaacaagcattgacataatggcatgcactccaggaccactgaagcaaaaggccaatttgacatcat

SEQ ID NO: 220423 - DNA, 837 bp, Zea Mays
ggcaacactttgaaaaccatggtggagtttttaagcttgaactctttttacctgaggaatatcccatggctgccccaaaggttaggtttctgaccaagatttatcatcccaacattgacaagcttggtaggatatgcctcgacattctcaaggacaaatggagcccagcacttcagattcgaacagttcttttgagtatacaggctctactgagtgcaccaaatccagatgaccctctctccgataacattgcaaagcactggaaatccaatgaggtagaagctgttgaaacagccaaggagtggactcgcctgtatgcgagcggtgcatgagagcgcagtgctgttcttggtgtaataaccccatcatacttcagtcctaatccgttgccatttgcttgataaaaatagactggagatatttgccatggaatgaagtctctaaatgactaccactctgaattgtttggttgtacacctgtggtcggttccctttacctttgggcacctttgactaatcagtatatgtggtagaacttgcagttactctaatatatttgtcacttcatgtagaagagcttctcaactgttcataatgttggaactgaggctggttagcttggttgcattttcgctgtaccttcctctgttcgcctgtcgactgtcgcctgagaacgaattttgccgaaactcgagttgcacctggtcatgttttctacgatgtgctttcttattaggtgatcacaggttggttttatcacaacacttcggctgttttgcggggatttgttttatcgcaatacattttggcagtcataatctcgaggaatatgaaaat

SEQ ID NO: 220424 - DNA, 2157 bp, Zea Mays
cttccgtgtaatgccttccaaagaatttgtttcctccaattttctgacgccgtaatcctgccaaccaaagagcactgcagtgccgatttctataggaacaaaattcctattctttccctacaaacttcctacattcagggtcctcctcgtgtgcccatcccatattcaagattacgtccgctgactcctcaggcctcccactgcgtgtggggccgagccagcttgctccatcaagccgagagcagtctcccactcttctttctcacctcgcatcgcactgcctcaatctctcgtctctattgcttctctgccggagctcctacaacctcgcctcgcgcagcactccgctcaccctccctgactccctccctgccgctgggatggccggcaaacgagttacgggccgcgatgggcaagacgagggcggcgccaaggccgggctcccggcgatggacatctccctcgcgttcccgcaggccacgcctgcctccattttcccgccgtccgcttcggattattaccagtctgatgatttgctgaccagtgaagagcgctctatcaggatgaaggtcaggggtattatggaaaaagaaattgctcccattatgtcagcgtactgggaaaaggcagagtttccatttaatgccattcctaaacttgcaagccttggtgttgctggtggtacaataaagggttatgggtgcccaggactttccattactgccagtgctgttactatgtcagaaattgcacgggtagatgcaagctgttccacatttatactggtgcactcctctcttgcgatggtgacaatagaacagctctttgtggatccgaggctcagaagcagaagtacttgccatcccttgctcaacttactactgttggctgttgggctttgacagagccaaactatggaagtgatgcgagctccttgagaactatagcgaccaaggcacctggtgggtggcacatagatggtcaaaaacgctggatcggtaacagtactttcgccgatgtgctcgtcgtgttagccaggaatgcagacacacaacagctaaatgggttcattgtgcggaaaggagctcctggcctgaaagctacaaagatcgagaacaaaattggcctcaggatggttcagaacggtgacatagttttgaacaaggtgttcgtccctgacgaagaccggttgccaggcatcaactcgtttcaggacatcagcaaggtgctcgccatttcacgcattatggtggcatggcaaccggttggcatatcaatgggggtcttcgacatgtgccaccggtatctgaaagaaaggaagcagttcggagtccctctggcggcgtttcagctgaaccaagagaagctcgcccggatgctcggtaacgtccagtcgatggtcctcgtcggctggcgtctctgcaagctctacgagtcggggaaaatgacgccgggccacgctagcctagggaaggcttggaactccaggacggcccgcgaggtggtctcccttggccgagagctgctgggtgggaacgggattttggccgacttccttgtagccaaggcgttctgcgacctggagcccatctactcgtacgagggcacgtacgacatcaacagcctggtgaccggcagggaggtcaccgggatcgcgagcttcaggcccgccgcgccagcgaaagcccggctgtgacgtgataacctgtgtccccgtgttgcagggaactggaggcgaataaatcatgatcaggtcgtcgtcgtcgtcgccatcgaacaaactgagcacgttcctggaacccgcccggtcaacgttggctgctcacatggtgtaccgtagccgagtgcggatgggaacggattcctagatatatgtagtactatacgaagatatctgttgcgggtggattactgtaaaccgggtctaatctctgttgcggtgtttgccgtctttggtcagaaggtaaggggggaacgccaggcagatctggtgggtttggttgttgttgttgtcgtgttgggtgggtagcatgcgagtgtggaggcctcgaccaatgaataaaacatggtgccgtttgggcggtagtacgtacacaggcaggcgggtcgagaagagtccgtcgtctggaagttatggtaagtaacatctcggcggct

SEQ ID NO: 220425 - DNA, 2789 bp, Zea Mays
tgtacgtcaaaggaatcagtcagggcgttcgttgctttgattgctggctggatcggattatatatcgtctcggcagctagggcggccagcaccagccatgactccttcgcttctcctctccctcctgctggtggcggcgaggtgctgccatggctggtcgtcgttccagaagccggcggtgactgcggtgatcgctttcggagactccattgtggacccggggaacaacaacgggctgcatacggtgatcaaggccaaccatccgccctacggcaaggacttgttcaaccacgaggccaccggacgctactccaacggcctcattccaaccgacctaattgcccaggagttgggtgtgaagctgctgcttcctgcctacttgggcgtggatctgagcccggaggacctgctcaccggcgtcagcttcgcgtccggcgccaccgggttcgacccgctgactcccctcgtagtgagcgtcatctcgctggagcagcagctcgcctacttcgacgagtaccgcggcaagctggtggatatcgccggcgaggatgagacggcgaggatcatcgacggcgcgctgttcgtagtgtgcgcgggcaccgacgacgtggccaacacctacttcacgacgccgttccgcagcgcggagtacgacatcccgagctacgtggagctgctggtgggcggcgccgaggagttcctccgcaacgtcagctccaggggcgccaggaagatcggcttcgtggggatgccgcccgtggggtgcgtgccgtcgcagcggacgctgggcggtggcctcgccagggcgtgcgagcccaagcggaacgaggcggcgcagctgtacaacgccaggatccaggagatggtcgccgacgccgaccgagacttggcgacgaccacggtggtgttcctggacatctaccgcgtcctggacgacctgatggagcgcggggacaagtacggcttctctgagaccaccaggggatgctgcggcaccggcaccatcgaggtcacgggactctgcgactcccgcttcgtctccgtctgcgacaacgtctcgcagcacgtgttcttcgacagctaccaccccaccgagagagcctacaggatcatcgtcaaggacatctttgacaactacggacaagtgctcatcggatgatatatatatctaccttgcttgagcgatcgagcatgcatgttcatcttcttcatctttatgtacgttcggctagctggcccaaagcctcaaggaggcccatttatcttcttcttactcctcctcgccccaagaataattaattgtaagcatgatctgcggaatcagacggggatggtctggtggaagtctacatatgggccgctggcacgatacaaacccaccaattgatttggtttggtttggcccatatggccacttcctatccatccatccatccattccttcttcttcctcctcctcctcctcctttattctctctccagggaaggcaagctcggccagacctccctcttcaataagaacaagttgaagaaagatgtccacgtacctggtgtcctgctgcctccggccaccgtcagcgggggcggagatgcccaaggcggcttccgccgcctcctcctcttcattggccccgccgcccgacaccaagagagtcggccgaagagactttgtgctcaggagcagtgagattgccacgctcgccgccatcttccacttcagcaaaccaagctaccttggcgttcagaagagtcctccgtcccttgctctctgccctgcaaccaataactgtgtttccacatcagaggaaataagcgactcaaatcactatgctcccccatggaactacaatcccaaggatgggcggagcggtaaacccataaccaaagaggaggccatgaaagaactaattgaagtcgtcacgaagacaaagccggacaacttcactcctcgcatagtagagaaaaaagatgattatatccgagttgaatatgagagtcctatatttgggtttgtagatgatgtggagttctggttccctcctggcaacaagaccatggttcagtatcggtcggcgtctcgatcaggatttatcgatttcaatgccaacaagaagagagtaaaggagctgagattggctttggaaaagaagggctgggcttcagaaagcaacttctgaattgaagtgagaagggtggaagaggtgcaggtgcatgctactcagacgagccagcacaactgggaactgggattgggtactgcccacgcaaaggcaaaaaagtctctttgtgatggtccctcgttctcattcaggtcagcgattacctagtttgtgtactaggcagcgtaagctagctgctggtgggtggtggtggccatcatgaggattcaggatgcatgatgatcttccatgggtggtgccgggggcgcactaagggaaaaaaaaaaggatattacatggacagcaaccaccctggctagctaataccaagaaatcattcatatactcctagtctcctaccaagaaaaaagatatatttattatgcatcttcttgccatccgtgcatcctactacatgcatcggatctgtccttgcgataatgagatatgcatattcgttcgatatgattgatagatagtcgacccagagatgatttaggtctctctctctctctctctctctctctctctctctctctctctctctctctctctctctctctctctctctctctggcattagttggatgcatggttgacttgtttcatgcatggattctattatagtgc

SEQ ID NO: 220426 - DNA, 2793 bp, Zea Mays
tgtacgtcaaaggaatcagtcagggcgttcgttgctttgattgctggctggatcggattatatatcgtctcggcagctagggcggccagcaccagccatgactccttcgcttctcctctccctcctgctggtggcggcgaggtgctgccatggctggtcgtcgttccagaagccggcggtgactgcggtgatcgctttcggagactccattgtggacccggggaacaacaacgggctgcatacggtgatcaaggccaaccatccgccctacggcaaggacttgttcaaccacgaggccaccggacgctactccaacggcctcattccaaccgacctaattgcccaggagttgggtgtgaagctgctgcttcctgcctacttgggcgtggatctgagcccggaggacctgctcaccggcgtcagcttcgcgtccggcgccaccgggttcgacccgctgactcccctcgtagtgagcgtcatctcgctggagcagcagctcgcctacttcgacgagtaccgcggcaagctggtggatatcgccggcgaggatgagacggcgaggatcatcgacggcgcgctgttcgtagtgtgcgcgggcaccgacgacgtggccaacacctacttcacgacgccgttccgcagcgcggagtacgacatcccgagctacgtggagctgctggtgggcggcgccgaggagttcctccgcaacgtcagctccaggggcgccaggaagatcggcttcgtggggatgccgcccgtggggtgcgtgccgtcgcagcggacgctgggcggtggcctcgccagggcgtgcgagcccaagcggaacgaggcggcgcagctgtacaacgccaggatccaggagatggtcgccgacgccgaccgagacttggcgacgaccacggtggtgttcctggacatctaccgcgtcctggacgacctgatggagcgcggggacaagtacggcttctctgagaccaccaggggatgctgcggcaccggcaccatcgaggtcacgggactctgcgactcccgcttcgtctccgtctgcgacaacgtctcgcagcacgtgttcttcgacagctaccaccccaccgagagagcctacaggatcatcgtcaaggacatctttgacaactacggacaagtgctcatcggatgatatatatatctaccttgcttgagcgatcgagcatgcatgttcatcttcttcatctttatgtacgttcggctagctggcccaaagcctcaaggaggcccatttatcttcttcttactcctcctcgccccaagaataattaattgtaagcatgatctgcggaatcagacggggatggtctggtggaagtctacatatgggccgctggcacgatacaaacccaccaattgatttggtttggtttggcccatatggccacttcctatccatccatccatccattccttcttcttcctcctcctcctcctcctttattctctctccagggaaggcaagctcggccagacctccctcttcaataagaacaagttgaagaaagatgtccacgtacctggtgtcctgctgcctccggccaccgtcagcgggggcggagatgcccaaggcggcttccgccgcctcctcctcttcattggccccgccgcccgacaccaagagagtcggccgaagactttgtgctcaggagcagtgagattgccacgctcgccgccatcttccacttcagtggcagcaaaccaagctaccttggcgttcagaagagtcctccgtcccttgctctctgccctgcaaccaataactgtgtttccacatcagaggaaataagcgactcaaatcactatgctcccccatggaactacaatcccaaggatgggcggagcggtaaacccataaccaaagaggaggccatgaaagaactaattgaagtcgtcacgaagacaaagccggacaacttcactcctcgcatagtagagaaaaaagatgattatatccgagttgaatatgagagtcctatatttgggtttgtagatgatgtggagttctggttccctcctggcaacaagaccatggttcagtatcggtcggcgtctcgatcaggatttatcgatttcaatgccaacaagaagagagtaaaggagctgagattggctttggaaaagaagggctgggcttcagaaagcaacttctgaattgaagtgagaagggtggaagaggtgcaggtgcatgctactcagacgagccagcacaactgggaactgggattgggtactgcccacgcaaaggcaaaaaagtctctttgtgatggtccctcgttctcattcaggtcagcgattacctagtttgtgtactaggcagcgtaagctagctgctggtgggtggtggtggccatcatgaggattcaggatgcatgatgatcttccatgggtggtgccgggggcgcactaagggaaaaaaaaaaggatattacatggacagcaaccaccctggctagctaataccaagaaatcattcatatactcctagtctcctaccaagaaaaaagatatatttattatgcatcttcttgccatccgtgcatcctactacatgcatcggatctgtccttgcgataatgagatatgcatattcgttcgatatgattgatagatagtcgacccagagatgatttaggtctctctctctctctctctctctctctctctctctctctctctctctctctctctctctctctctctctctctctggcattagttggatgcatggttgacttgtttcatgcatggattctattatagtgc

SEQ ID NO: 220427 - DNA, 2809 bp, Zea Mays
tgtacgtcaaaggaatcagtcagggcgttcgttgctttgattgctggctggatcggattatatatcgtctcggcagctagggcggccagcaccagccatgactccttcgcttctcctctccctcctgctggtggcggcgaggtgctgccatggctggtcgtcgttccagaagccggcggtgactgcggtgatcgctttcggagactccattgtggacccggggaacaacaacgggctgcatacggtgatcaaggccaaccatccgccctacggcaaggacttgttcaaccacgaggccaccggacgctactccaacggcctcattccaaccgacctaattgcccaggagttgggtgtgaagctgctgcttcctgcctacttgggcgtggatctgagcccggaggacctgctcaccggcgtcagcttcgcgtccggcgccaccgggttcgacccgctgactcccctcgtagtgagcgtcatctcgctggagcagcagctcgcctacttcgacgagtaccgcggcaagctggtggatatcgccggcgaggatgagacggcgaggatcatcgacggcgcgctgttcgtagtgtgcgcgggcaccgacgacgtggccaacacctacttcacgacgccgttccgcagcgcggagtacgacatcccgagctacgtggagctgctggtgggcggcgccgaggagttcctccgcaacgtcagctccaggggcgccaggaagatcggcttcgtggggatgccgcccgtggggtgcgtgccgtcgcagcggacgctgggcggtggcctcgccagggcgtgcgagcccaagcggaacgaggcggcgcagctgtacaacgccaggatccaggagatggtcgccgacgccgaccgagacttggcgacgaccacggtggtgttcctggacatctaccgcgtcctggacgacctgatggagcgcggggacaagtacggcttctctgagaccaccaggggatgctgcggcaccggcaccatcgaggtcacgggactctgcgactcccgcttcgtctccgtctgcgacaacgtctcgcagcacgtgttcttcgacagctaccaccccaccgagagagcctacaggatcatcgtcaaggacatctttgacaactacggacaagtgctcatcggatgatatatatatctaccttgcttgagcgatcgagcatgcatgttcatcttcttcatctttatgtacgttcggctagctggcccaaagcctcaaggaggcccatttatcttcttcttactcctcctcgccccaagaataattaattgtaagcatgatctgcggaatcagacggggatggtctggtggaagtctacatatgggccgctggcacgatacaaacccaccaattgatttggtttggtttggcccatatggccacttcctatccatccatccatccattccttcttcttcctcctcctcctcctcctttattctctctccagggaaggcaagctcggccagacctccctcttcaataagaacaagttgaagaaagatgtccacgtacctggtgtcctgctgcctccggccaccgtcagcgggggcggagatgcccaaggcggcttccgccgcctcctcctcttcattggccccgccgcccgacaccaagagagtcggccgaagagactttgtgctcaggagcagtgagattgccacgctcgccgccatcttccacttcagtggcagcaaaccaagctaccttggcgttcagaagagtcctccgtcccttgctctctgccctgcaaccaataactgtgtttccacatcagaggaaataagcgactcaaatcactatgctcccccatggaactacaatcccaaggatgggcggagcggtaaacccataaccaaagaggaggccatgaaagaactaattgaagtcgtcacgaagacaaagccggacaacttcactcctcgcatagtagagaaaaaagatgattatatccgagttgaatatgagagtcctatatttggggtaggcggcggcggtttgtagatgatgtggagttctggttccctcctggcaacaagaccatggttcagtatcggtcggcgtctcgatcaggatttatcgatttcaatgccaacaagaagagagtaaaggagctgagattggctttggaaaagaagggctgggcttcagaaagcaacttctgaattgaagtgagaagggtggaagaggtgcaggtgcatgctactcagacgagccagcacaactgggaactgggattgggtactgcccacgcaaaggcaaaaaagtctctttgtgatggtccctcgttctcattcaggtcagcgattacctagtttgtgtactaggcagcgtaagctagctgctggtgggtggtggtggccatcatgaggattcaggatgcatgatgatcttccatgggtggtgccgggggcgcactaagggaaaaaaaaaaggatattacatggacagcaaccaccctggctagctaataccaagaaatcattcatatactcctagtctcctaccaagaaaaaagatatatttattatgcatcttcttgccatccgtgcatcctactacatgcatcggatctgtccttgcgataatgagatatgcatattcgttcgatatgattgatagatagtcgacccagagatgatttaggtctctctctctctctctctctctctctctctctctctctctctctctctctctctctctctctctctctctctctggcattagttggatgcatggttgacttgtttcatgcatggattctattatagtgc

SEQ ID NO: 220428 - DNA, 1685 bp, Zea Mays
aatctttcttgtaccactaagctagtggccacaactcgttggcaacgaggaagcagcaagccgagaagctacgccgcgccgccgccatatatggcacaggctgccggcaccgccgatgccactgatgaggctccactgctgctggcctcgtcggcggcggggtcgacgccgtcgccgccaggttcagcaccgcgccggaacaggttcgccttcgtctgcgccacgctcgcctccgtcaccaccatgctacatggctacaacctgacgctgatgagcggcgcggagctgttcatgcgggaggacgtggggctcaccgacggcgaggtcgaggtgctggcggggtccatgaacgtgttcatgctcgcgtccatcctcgccgccggctgggtggccgaccacctgggccgccgccgcaccctcgtgctcgccaacgccttcctcatggccggcgcgctcgccatgtcgctcggcaccagcttcgccgcgctcatggcggcgcgcttcgtcaccagcgtcggctccgggttcgcgcgcgtcgtcgcccccgtgtacaacgccgagatatcgcaggcggccacgcgtggcgtcctctcatccatgctcgacgtacgtacatattcatcaacgtcggcatcctgctcagctacgtgtccaactacgcgttcgcgggcctcccggtgcacatcgggtggcgtctcatgtacgccatcggcgtcatcccgcccgtgctcatcgccgccggggtgctcgtcatcatgccagagtcaccgcggtggctcgcgatgcagggccgccacgccgacgcgcgcgcggtgctgttgcgcacgtcggacagcccggcagacgccgacttccggctcggggagatcaagcgagccgccgacgcgccgtcgcccgctgctgcggcgcgccacggtggcggcggtgtctggagggagctcttcgtccggccatccaccacaaccacgagcgtgcggcgcgtcctcggctgcgtcctcgggctgcagttcttcgtgcaggcgtccggcgtcgacgccatcctcctctacagcccgctggtcttcaaggcggtcggcgtggcgtccacctccgccgtgctcggcgccaccgtgtccatcggagccgtcaagacgtgcttcgtcctcgtcgccatgctcttcaccgaccgcctcggccggcgcccgctcctcctcgccagcaccgccggcgtcgccgtgaccgcgaccgccctcgccgtgacgctgtgcgtgggcacggcgtcgccggcgacggccgcggcgtgcctggcgtccgtgctggccttcgtggccgcgtactccatcggctacgggtccgtggtgtcgacgtacagcgcggaggtcttgccgctacggctgcgcgcgcagggctccagcctgggcgtggccgtgaacaggctcacgtgcggccgtgcggggtggtcagcatgacgttcatctcgctcgccgacgccatcaccatgcccgggtgcttcttcctctacgctgcggtgacggcggctgcgtttgtgttcgtgtacacgcggctgccggagaccaagggccggagcctagaagacatggaagtgctcttccgcaagtgagggtggccggtggccacgtatagttgccattagcacaaggtcgcgttcggcagagttagtagaaattatccacaattaccagcag

SEQ ID NO: 220429 - DNA, 1120 bp, Zea Mays
ctgaaatattggatggaacaagatcatgtgtcggagcttttctgcaggctgttaatagtagtttatggtatcctctggggctttagtgctccaggtccaggagctgatcctaaggtggattatgcttgcaccccagaagaagtgcaacagcatttccaagcttgtggaactgtcaacagggtgacaatcttgactgacaagtttggacagccaaaaggttttgcttatgttgaatttctggaacaggaaggtgttcaggaagctcttaacttgaatgaatctgaattgcatggtcgccagattaaggtcgccccaaagaggactaatgttcctgggatgaagcagcgtccaccacgtgggtataatccataccatggctacccttatagatcatacggggcaccgtatttccccccatatggttatgggagggctcctagattccgccgccctatgcgctacagaccttacttctgaagtacggggtagggtaatgaagttcaatgcaaaaccagcccatggtcactggtcagtcccgggaataatcaactgtatcgtttgcactgttgcggctcaatgctcctgtatcagctgccttttctgacctttgtttcaagtgccgccataagcgacggacatgttgtattggcttgtaatacaggacgtagtaagtgcacacactttctgtaagcgtgctttcccacttcccagggttactactgtttgcaatttctgtagttctttgggtcggtcggttaggacatgggagtggatcgttctatgcccatttgaggtagattagttatatgaagagaaagcttcgcatgcggggctgtcttgtttgcagattgccactacctcagtacggttccaggttcctcaaggtatccgctgagcatctgttctggtgtcggattccgagttcaggtcttgtaactaataaaaaacggaaattataatgtctctctttaccagactgttttaccgcgggcaaatttgatccgctgttactgcagggccgacataaatgtctgaaatacgctaccattaggcattatccccacgccctttttacagtggttacatggcaaagctcagcacaacgttggttatagggaca

SEQ ID NO: 220430 - DNA, 1783 bp, Zea Mays
aaggctcatgaaactttcgacccattggaggcccacgacctctccgtccgatccctaggcggcggatccttcctccaccaaacccgcacctgccgcaactgaatcgggtcagatcgggccatcggggaggcgagggagctcacgcggcgccatggacgaggaggagcacgaggtttacggccaggaaatcccggaggacggcgacatggacggcgctgacgttgatatggctgcctccggggatgacgcggcgaaggagctcgacgagatgaagcgcaggctgaaggagatggaggaggaagccgccgccctccgcgatatgcaggccaaggtcgccaaggagatgcaaggaggtgaccctagtgcatctacagctgaggcaaaggagcaggtggatgcccgttctgtgtatgttggaaatggctagtgtgcttgagcaagcctttcaaattgactataatggcctaatgggcactgggtgatgttttagagttagcatagagtgaaaaagaaaaaaaaagaaaaaaagatagaaggacctctgaaaaaatataaaaaagtgcatggaaaaagaaaggaaaaagaggaaagaagtaaaaaacggataataaatatcataagttagatgacatccttggcgaagcaaaagaagtcagcacagagctgctgtctacactcgggatgggactttttgactggagctggcatggcggcatctgatgtggttcgtagctgctggtccactgatatcacctgggtggtgcgtaagtatgacatgtggattatgcttgcaccccagaagaagtgcaacagcatttccaagcttgtggaactgtcaacagggtgacaatcttgactgacaagtttggacagccaaaaggttttgcttatgttgaatttctggaacaggaaggtgttcaggaagctcttaacttgaatgaatctgaattgcatggtcgccagattaaggtcgccccaaagaggactaatgttcctgggatgaagcagcgtccaccacgtgggtataatccataccatggctacccttatagatcatacggggcaccgtatttccccccatatggttatgggagggctcctagattccgccgccctatgcgctacagaccttacttctgaagtacggggtagggtaatgaagttcaatgcaaaaccagcccatggtcactggtcagtcccgggaataatcaactgtatcgtttgcactgttgcggctcaatgctcctgtatcagctgccttttctgacctttgtttcaagtgccgccataagcgacggacatgttgtattggcttgtaatacaggacgtagtaagtgcacacactttctgtaagcgtgctttcccacttcccagggttactactgtttgcaatttctgtagttctttgggtcggtcggttaggacatgggagtggatcgttctatgcccatttgaggtagattagttatatgaagagaaagcttcgcatgcggggctgtcttgtttgcagattgccactacctcagtacggttccaggttcctcaaggtatccgctgagcatctgttctggtgtcggattccgagttcaggtcttgtaactaataaaaaacggaaattataatgtctctctttaccagactgttttaccgcgggcaaatttgatccgctgttactgcagggccgacataaatgtctgaaatacgctaccattaggcattatccccacgccctttttacagtggttacatggcaaagctcagcacaacgttggttatagggaca

SEQ ID NO: 220431 - DNA, 1367 bp, Zea Mays
aaggctcatgaaactttcgacccattggaggcccacgacctctccgtccgatccctaggcggcggatccttcctccaccaaacccgcacctgccgcaactgaatcgggtcagatcgggccatcggggaggcgagggagctcacgcggcgccatggacgaggaggagcacgaggtttacggccaggaaatcccggaggacggcgacatggacggcgctgacgttgatatggctgcctccggggatgacgcggcgaagctgcaggagctcgacgagatgaagcgcaggctgaaggagatggaggaggaagccgccgccctccgcgatatgcaggccaaggtcgccaaggagatgcaaggaggtgaccctagtgcatctacagctgaggcaaaggagcaggtggatgcccgttctgtgtatgttggaaatgtggattatgcttgcaccccagaagaagtgcaacagcatttccaagcttgtggaactgtcaacagggaaggtgttcaggaagctcttaacttgaatgaatctgaattgcatggtcgccagattaaggtcgccccaaagaggactaatgttcctgggatgaagcagcgtccaccacgtgggtataatccataccatggctacccttatagatcatacggggcaccgtatttccccccatatggttatgggagggctcctagattccgccgccctatgcgctacagaccttacttctgaagtacggggtagggtaatgaagttcaatgcaaaaccagcccatggtcactggtcagtcccgggaataatcaactgtatcgtttgcactgttgcggctcaatgctcctgtatcagctgccttttctgacctttgtttcaagtgccgccataagcgacggacatgttgtattggcttgtaatacaggacgtagtaagtgcacacactttctgtaagcgtgctttcccacttcccagggttactactgtttgcaatttctgtagttctttgggtcggtcggttaggacatgggagtggatcgttctatgcccatttgaggtagattagttatatgaagagaaagcttcgcatgcggggctgtcttgtttgcagattgccactacctcagtacggttccaggttcctcaaggtatccgctgagcatctgttctggtgtcggattccgagttcaggtcttgtaactaataaaaaacggaaattataatgtctctctttaccagactgttttaccgcgggcaaatttgatccgctgttactgcagggccgacataaatgtctgaaatacgctaccattaggcattatccccacgccctttttacagtggttacatggcaaagctcagcacaacgttggttatagggaca

SEQ ID NO: 220432 - DNA, 2283 bp, Zea Mays
agaacttcctgataggctagaatcagcctaaggctcatgaaactttcgacccattggaggcccacgacctctccgtccgatccctaggcggcggatccttcctccaccaaacccgcacctgccgcaactgaatcgggtcagatcgggccatcggggaggcgagggagctcacgcggcgccatggacgaggaggagcacgaggtttacggccaggaaatcccggaggacggcgacatggacggcgctgacgttgatatggctgcctccggggatgacgcggcgaagctgcaggagctcgacgagatgaagcgcaggctgaaggagatggaggaggaagccgccgccctccgcgatatgcaggccaaggtcgccaaggagatgcaaggaggtgaccctagtgcatctacagctgaggcaaaggagcaggtggatgcccgttctgtgtatgttggaaatgtaagaatttataataatctccctctctttattgtgactctgcatattagcgggaatatgttatgttgctttgaaatttttatttaatatatatttcttgatattttacgtgtatgaagcatggagtttgaaacatccctatatcttttatgtgatacagtggtagacacatacatattgcctagtagctaatagatattttattggcactcgcttagttatgaattgtttatctcaagaagccaactaccttgttacttaccttcagaacttgtatggttggtgcctactgaaaaaatgtctgtgttggatgtctttattggcaggcagaattgtcaaagcttcttcctaatttgatgtttcctccttgctcccatttttcgttgcgttccttagaatgcaccacactgctattatgaaatgctctgtgtgcttatcatcatcctttgctatcaatactcctttgatctgtcttcatgtgttttattttattgttttcgtgcattaattaagaaatggtgatggtcgcagggctagtgtgcttgagcaagcctttcaaattgactataatggcctaatgggcactgggtgatgttttagagttagcatagagtgaaaaagaaaaaaaaagaaaaaaagatagaaggacctctgaaaaaatataaaaaagtgcatggaaaaagaaaggaaaaagaggaaagaagtaaaaaacggataataaatatcataagttagatgacatccttggcgaagcaaaagaagtcagcacagagctgctgtctacactcgggatgggactttttgactggagctggcatggcggcatctgatgtggttcgtagctgctggtccactgatatcacctgggtggtgcgtaagtatgacatgtggattatgcttgcaccccagaagaagtgcaacagcatttccaagcttgtggaactgtcaacagggaaggtgttcaggaagctcttaacttgaatgaatctgaattgcatggtcgccagattaaggtcgccccaaagaggactaatgttcctgggatgaagcagcgtccaccacgtgggtataatccataccatggctacccttatagatcatacggggcaccgtatttccccccatatggttatgggagggctcctagattccgccgccctatgcgctacagaccttacttctgaagtacggggtagggtaatgaagttcaatgcaaaaccagcccatggtcactggtcagtcccgggaataatcaactgtatcgtttgcactgttgcggctcaatgctcctgtatcagctgccttttctgacctttgtttcaagtgccgccataagcgacggacatgttgtattggcttgtaatacaggacgtagtaagtgcacacactttctgtaagcgtgctttcccacttcccagggttactactgtttgcaatttctgtagttctttgggtcggtcggttaggacatgggagtggatcgttctatgcccatttgaggtagattagttatatgaagagaaagcttcgcatgcggggctgtcttgtttgcagattgccactacctcagtacggttccaggttcctcaaggtatccgctgagcatctgttctggtgtcggattccgagttcaggtcttgtaactaataaaaaacggaaattataatgtctctctttaccagactgttttaccgcgggcaaatttgatccgctgttactgcagggccgacataaatgtctgaaatacgctaccattaggcattatccccacgccctttttacagtggttacatggcaaagctcagcacaacgttggttatagggaca

SEQ ID NO: 220433 - DNA, 1755 bp, Zea Mays
attagaacttcctgataggctagaatcagcctaaggctcatgaaactttcgacccattggaggcccacgacctctccgtccgatccctaggcggcggatccttcctccaccaaacccgcacctgccgcaactgaatcgggtcagatcgggccatcggggaggcgagggagctcacgcggcgccatggacgaggaggagcacgaggtttacggccaggaaatcccggaggacggcgacatggacggcgctgacgttgatatggctgcctccggggatgacgcggcgaagctgcaggagctcgacgagatgaagcgcaggctgaaggagatggaggaggaagccgccgccctccgcgatatgcaggccaaggtcgccaaggagatgcaaggaggtgaccctagtgcatctacagctgaggcaaaggagcaggtggatgcccgttctgtgtatgttggaaatggctagtgtgcttgagcaagcctttcaaattgactataatggcctaatgggcactgggtgatgttttagagttagcatagagtgaaaaagaaaaaaaaagaaaaaaagatagaaggacctctgaaaaaatataaaaaagtgcatggaaaaagaaaggaaaaagaggaaagaagtaaaaaacggataataaatatcataagttagatgacatccttggcgaagcaaaagaagtcagcacagagctgctgtctacactcgggatgggactttttgactggagctggcatggcggcatctgatgtggttcgtagctgctggtccactgatatcacctgggtggtgcgtaagtatgacatgtggattatgcttgcaccccagaagaagtgcaacagcatttccaagcttgtggaactgtcaacagggaaggtgttcaggaagctcttaacttgaatgaatctgaattgcatggtcgccagattaaggtcgccccaaagaggactaatgttcctgggatgaagcagcgtccaccacgtgggtataatccataccatggctacccttatagatcatacggggcaccgtatttccccccatatggttatgggagggctcctagattccgccgccctatgcgctacagaccttacttctgaagtacggggtagggtaatgaagttcaatgcaaaaccagcccatggtcactggtcagtcccgggaataatcaactgtatcgtttgcactgttgcggctcaatgctcctgtatcagctgccttttctgacctttgtttcaagtgccgccataagcgacggacatgttgtattggcttgtaatacaggacgtagtaagtgcacacactttctgtaagcgtgctttcccacttcccagggttactactgtttgcaatttctgtagttctttgggtcggtcggttaggacatgggagtggatcgttctatgcccatttgaggtagattagttatatgaagagaaagcttcgcatgcggggctgtcttgtttgcagattgccactacctcagtacggttccaggttcctcaaggtatccgctgagcatctgttctggtgtcggattccgagttcaggtcttgtaactaataaaaaacggaaattataatgtctctctttaccagactgttttaccgcgggcaaatttgatccgctgttactgcagggccgacataaatgtctgaaatacgctaccattaggcattatccccacgccctttttacagtggttacatggcaaagctcagcacaacgttggttatagggaca

SEQ ID NO: 220434 - DNA, 1760 bp, Zea Mays
caaaagttgtctattagaacttcctgataggctagaatcagcctaaggctcatgaaactttcgacccattggaggcccacgacctctccgtccgatccctaggcggcggatccttcctccaccaaacccgcacctgccgcaactgaatcgggtcagatcgggccatcggggaggcgagggagctcacgcggcgccatggacgaggaggagcacgaggtttacggccaggaaatcccggaggacggcgacatggacggcgctgacgttgatatggctgcctccggggatgacgcggcgaagctgcaggagctcgacgagatgaagcgcaggctgaaggagatggaggaggaagccgccgccctccgcgatatgcaggccaaggtcgccaaggagatgcaaggaggtgaccctagtgcatctacagctgaggcaaaggagcaggtggatgcccgttctgtgtatgttggaaatggctagtgtgcttgagcaagcctttcaaattgactataatggcctaatgggcactgggtgatgttttagagttagcatagagtgaaaaagaaaaaaaaagaaaaaaagatagaaggacctctgaaaaaatataaaaaagtgcatggaaaaagaaaggaaaaagaggaaagaagtaaaaaacggataataaatatcataagttagatgacatccttggcgaagcaaaagaagtcagcacagagctgctgtctacactcgggatgggactttttgactggagctggcatggcggcatctgatgtggttcgtagctgctggtccactgatatcacctgggtggtgcgtaagtatgacatgtggattatgcttgcaccccagaagaagtgcaacagcatttccaagcttgtggaactgtcaacagggtgacaatcttgactgacaagtttggacagccaaaaggttttgcttatgttgaatttctggaacaggaaggtgttcaggaagctcttaacttgaatgaatctgaattgcatggtcgccagattaaggtcgccccaaagaggactaatgttcctgggatgaagcagcgtccaccacgagggctcctagattccgccgccctatgcgctacagaccttacttctgaagtacggggtagggtaatgaagttcaatgcaaaaccagcccatggtcactggtcagtcccgggaataatcaactgtatcgtttgcactgttgcggctcaatgctcctgtatcagctgccttttctgacctttgtttcaagtgccgccataagcgacggacatgttgtattggcttgtaatacaggacgtagtaagtgcacacactttctgtaagcgtgctttcccacttcccagggttactactgtttgcaatttctgtagttctttgggtcggtcggttaggacatgggagtggatcgttctatgcccatttgaggtagattagttatatgaagagaaagcttcgcatgcggggctgtcttgtttgcagattgccactacctcagtacggttccaggttcctcaaggtatccgctgagcatctgttctggtgtcggattccgagttcaggtcttgtaactaataaaaaacggaaattataatgtctctctttaccagactgttttaccgcgggcaaatttgatccgctgttactgcagggccgacataaatgtctgaaatacgctaccattaggcattatccccacgccctttttacagtggttacatggcaaagctcagcacaacgttggttatagggaca

SEQ ID NO: 220435 - DNA, 1597 bp, Zea Mays
ccttttcggctttcggtttcgggctcaaaagggctttccaggagaggagccgcaccgcacgtccgcacgccgctcttcttcccctgcttgctctgggttcctccattcctctccagtctccatcacaggagcacgcgacgcgcgccacaggaaggaaggggaaaaacatggcggcggcgaacggggacgcgtgccgcagcgtcggcggggtgccgcgcccgacgaaccccatggtgacgccgctgctcaccgacctgtaccagttcaccatggcctacgcctactggaaggccgtttacacttacctccaggctccagccctcgatttgtggtttgttaggccactgaggagggggtgataatctggtagacatgaccccgcctcgataaggcgtgactggctttgatctctacttccggaaaaatccatttggcggggagttcaccatcttcggtggcctcgaggaatgtataaggttcattgctaacttcaagttcacggaggaggaaatcaaatttcttcgatctgtcatgcctgcatgtgaggatgacttctttgagtacctccgttcgattgactgctcagacgtggaggtttatgccataccagagggttatgctgtgttccctaaagttccactgatgagaattgaaggacctgttgctgttgtccagcttcttgaaactccatttctaagtcttgtcaactatgcttctctggttaccacgaatgcggcacggcaccgacttgtagctgggaagtcaaagaatttacttgaatttggacttcgacgggctcaagggcctgatggaggaatcagtgcatcaagatattgttatatgggaggatttgatgcaacaagcaatgttgcagcaggaagattgtttgggataccaatacgtgggactcattcacatgcatttgtgagctccttcatgggtcttgatgaaattactgacaaaacacttactagttctgatggttcaaacacatgtgaagattttatctctctggtgcagaactggctgatcaggattcaggattctagttcattgcatggcacctttggagaaacgagccaaagtgagttggctgcattcacgtcatatgcactggcatttccaaattccttcctggccttggttgacacatatgatgtataaggcagtcggaattaggttggactctggtgatttagcatacctatccgttgaggcccgcaagttcttccatgcagttgaaaaagaatttgtagttgttggctttgggaaaacaagtatcacagcaagcaatgatcttaatgaagaaactatagatgctctgaacaagcagggccatgaggtagatgcatttggtattggcacctacctagttacatgctatgcacaagctgcacttggttgtgtattcaaattagttgagattaacaaacagcctcgtattaaactttctgaagatgtcatgaaggtatcgataccatgtaagaaaaaatgctacagattgtatggcaaagaagggtatccgttggttgatataatgaccggagaagatgagccaggtccaaagatggtgggttttatgatttaccattcgttt

SEQ ID NO: 220436 - DNA, 1648 bp, Zea Mays
ccttttcggctttcggtttcgggctcaaaagggctttccaggagaggagccgcaccgcacgtccgcacgccgctcttcttcccctgcttgctctgggttcctccattcctctccagtctccatcacaggagcacgcgacgcgcgccacaggaaggaaggggaaaaacatggcggcggcgaacggggacgcgtgccgcagcgtcggcggggtgccgcgcccgacgaaccccatggtgacgccgctgctcaccgacctgtaccagttcaccatggcctacgcctactggaaggccgtttacacttacctccaggctccagccctcgatttgtggtttgttaggccactgaggagggggtgataatctggtagacatgaccccgcctcgataaggcgtgactggctttgatctctacttccggaaaaatccatttggcggggagttcaccatcttcggtggcctcgaggaatgtataaggttcattgctaacttcaagttcacggaggaggaaatcaaatttcttcgatctgtcatgcctgcatgtgaggatgacttctttgagtacctccgttcgattgactgctcagacgtggaggtttatgccataccagagggttatgctgtgttccctaaagttccactgatgagaattgaaggacctgttgctgttgtccagcttcttgaaactccatttctaagtcttgtcaactatgcttctctggttaccacgaatgcggcacggcaccgacttgtagctgggaagtcaaagaatttacttgaatttggacttcgacgggctcaagggcctgatggaggaatcagtgcatcaagatattgttatatgggaggatttgatgcaacaagcaatgttgcagcaggaagattgtttgggataccaatacgtgggactcattcacatgcatttgtgagctccttcatgggtcttgatgaaattactgacaaaacacttactagttctgatggttcaaacacatgtgaagattttatctctctggtgcagaactggctgatcaggattcagttcattgcatggcacctttggagaaacgagccaaagtgagttggctgcattcacgtcatatgcactggcatttccaaattccttcctggccttggttgacacatatgatgtcatgagaagcggagtgccaaacttctgtgctgttgctttggccctcaatgatatggggtataaggcagtcggaattaggttggactctggtgatttagcatacctatccgttgaggcccgcaagttcttccatgcagttgaaaaagaatttgtagttgttggctttgggaaaacaagtatcacagcaagcaatgatcttaatgaagaaactatagatgctctgaacaagcagggccatgaggtagatgcatttggtattggcacctacctagttacatgctatgcacaagctgcacttggttgtgtattcaaattagttgagattaacaaacagcctcgtattaaactttctgaagatgtcatgaaggtatcgataccatgtaagaaaaaatgctacagattgtatggcaaagaagggtatccgttggttgatataatgaccggagaagatgagccaggtccaaagatggtgggttttatgatttaccattcgttt

SEQ ID NO: 220437 - DNA, 1759 bp, Zea Mays
ctggggatagcctaaatactcttcagtggagataacaccaaataaaggcagtatactttccaagattatttctgttactgtgaggaccattcagaaagatgctgaggaaaagaaagcttcatttaatccccgaccatacttccgattgtttataaattggctctatgaccttactactactgatggccatcatgatggttctaattttcaggttttgactgcatttgccaatgcattccacttgctacaacccttgagagttcctgcctggagctttgcttggcttgagctggtgagtcataggagcttcatgccaaaattgctgatgtccaattcacagaaaggttggccgttttttcagcggttgcttgttgctcttttcaaattcatggaaccatatctgagaaatgctgaactcccagaggcggtggaccttttatacaaaggaactatgagagttttgcttgtattactgcatgactttcctgaatttatttgtgattaccacttcagtttctgtgatgtgattccttcaagttgcattcaaatgcgcaatgtcattcttagtgcttttccacgtaacatgagactgccagacccttctactcctaatctaaagattgatttgttggctgaaatttcaatagcaccacgaatcatgtcagatgttgatggtaccctcaaatcaaagcagttgaagactgagtttgatgaatatctcaagaggccggaaggctcttcctttctaagtgtcctgaagcaaaatttgctgctgcctcagaatgaagcagctgttgctgggacacgctacaatgtgcctctgatcaattcacttgttctttatgttggcatccaagctgtgcaacaactgcaacagaacaaggctaatgcatctgcatcagtgcagcagattaaacatacgcctacgatggacagtttccagattgaaacagctaccgagatgttcacaaatctcataacaagttttgatacagagggccgctaccttctgttgaatgcaattgcaaaccaactgcgctatccaaatagccatacacactactactccttcatcattctgcatctatttgctgaggctacccaggagattatccaggagcaaataacaagggttcttctggagcgtctaatagtgaaccgcccccatccttgggggttacttattacttccattgaattgataaagaatccgcgttacaacttttggaaccggtcttttacacatagtgcacctgagattgagaaactgtttgagtcagtggctaggtcctgcggcgcaaaagctgtagatgaaggaatcagtgtgcaggatggcagtcactaataaagtaatttgctttgttagtgctgtttttgtgctatttcgcactgtaaattgtgtgctaccctatctgggcttgtacagaccacggaaatacatagtgcgtcacgtcagctatttgggtgcctgtgctttgcctggtagctaggaattactattgatcgccagatgctccaggtgcaaatttttccgtggactggttcacttatttgattcaactatgtcagaatggtagatggtgcgaacttcagcttagatagtgagttgagttgcaggcatgtttgtaaattatatttttgatgccattctgttttctcagagaacggaacatttcaagatcagtctatactcctatgccgttttaaaattgcacaccaaatgggattgcaagtagaatggatgggtttttggtgtttg

SEQ ID NO: 220438 - DNA, 3347 bp, Zea Mays
atggacgaaggcctctcggcaagtgaaggcaagatcctagtagaggcgtcttcgacggtcaccacaaggatgtaccaggatggaagaagagccgagtctgctcgctgcccacgctgggagttagggccggaggcctggccgatcggcgggggcggagggagggtaatgagggctccgcaggagcgtagcatgagggatctctacgatcgcacgcggcacaaagatatggcagctccagaggaatcagtggaagggtgcggtggaggatgcgcggagggatgggagcaacgggcactggcctctaagatggaggacaagactgtggtaaggaaaagattgatatcaagcaacaacactcgtgtcaaggcagagtctggcacctgtaatgtctgttatgctccctgctcctcttgtttacacccacgtagtcgatttgaggattcaaatgttgaatgtgcatcctctcagacatgctccacaaggtcggaagtaaagaacaatttacttgttcatagggagaaagggctctgtagtaaaggagataacgatgatgagtttagtgcaacctcagatcatgctttgtactctgtaactggtagaaacaaacttgttgcaacatcatccattgccgatgatttgtcagaggttgacatgccatcaaaacgcaggaggctgttgaatcaagacacaagactatctagagcagaataccttgatgacaacaactcatgtgttactggtatatcagcagaaggcaaacttcttgtggataagaaaaaactgtcaatttctgcatccagtcgagatttgaccgctaaagccaacagcatggctaaccacaacaaactaagaaatcaatgtgttgatgaatcaaagaaaggatctgatggttgtgaaatgcatcctagctcatctggtagattttcccctgtagattctcttgttatgacaaaaaagttgctgcgaacccagtcttctgtcagtgcattgagcagattatctcctaacaggcaggttcatgaatttgggaaagcagtggataatttatctcatcaaccttgtgagaaggcttctcttttgaagaataatgaagaaccacgagctgggcaattgaacccttgtatagctggtgaaaacaaccatggcacgctggcaggttacagtaatagacatgcggacaaaaatgatttctcattgaatgatctagacaatggcaccttgtgctcaaaagatgaaatccaagaacatggggacatcacatctaatgataatgataagaagaatgtgtgtgtcaaacaagattcggatcaagattgttcaatggatatatccaatgacagaaagttgaatacacaacatgatgtgatgacagactgtggcaattcagaaggtttgatagatgttaatgtttgtgatatatgtggagatgtcggtagggagtatcttctagctacatgcaccagatgccttgagggagcagagcatacgggtagctttgaggtatcaggacatggaaactcccctgaaatgttcaatgggtttcaagcttacttgtctacttgtgcctcgtccaaagttcgtgaagtaggtgaacaattacctgacaaaattcagctagcagaagtcccacggcattcctcatggccgctgcaatttaatgaagtaaatccaactgaagataatattgctctttttttctttgctaaagatgttgaaagttacgaaagggcatatgggaaactcttggataacatgcttcttggtgatttgtccctcaaagcaaatattgataacatggaacttcttatttttccatctgataagttgcctgagaggattcaacgttggaatggtttacttttcttttggggcattttttatgcccggaaagcaagtagtccactagagcttcctacaaataattgtccattagaacaaaccaatggacctgttatccagcatgatatgggttcatctaaggcacttcagcctttgggtatagatttgaatgagtgccctaatgatgatatatctgatccagctctttcacttggatcagagagtgagaaatttggtgcatctgtagattataatgttttatcagagtccaaacacgaggatagaaatctgaatgcaagtgaagtacatcatgaagaaactgctggcacaagacaaattatatgggggcaaccttctgtagctcccactgtaactaatcttcccactatctcaacaggagttcatgacatcgttccggattattcggctgctgcaaaagatagcacaggaacagcaggtggaaacaaaatggagaaagcagatcagaatgaagctctcttttgtttttcacagcaaccaggtgcaattggatcgatctcacatgagataaaacttaagaaacatggtcttctgccttcacattgtcattttagtggatcaaagatatgtgatgatcaaaccaaatcgactccaagttcagatatgggttctttggattctcacctcaccaacaaaaggcagaagacttatgggaaacactctacttgcatttttggagatgaaatgccacctattaaatgcttgtcgaagatacatcccttaccggctggacaggataatccagtcgatgttttacattgtcacaggtgtccttcagatcctgtctctcttaaaaaaacagtacctgatcatatcatcaacgtgctttcatctgacgatgaagattccccagaacctagtactagcttaaataaggcatcactgaaggcagatgagggctcctccgctttattgttactttccctatccatggtggcaacgaagcataatctttctggttcagatattgtagatgatgaaccactgtctctatctcttggattccccagtgttgtcgacgggagtgaagatcaggagatgaagcaatttctgccggagaagccaggcataaacacttaatgccccctttagatttgcgagtgtacagttttgtgctatgtttagctgtaaggagtttagacagggtagaagtatatggtataaccgttaaattatgaataattttcctttcttttctctcactgttatatgcatctgctgctgttgttagtgatactggtctgatgatgttattgcctgctgtatttatgtgatatatggtgttagtttctttaagacattattggtatgacataaaaggatagatcaaaacgtgaatgtttataaattcaatttgccatggcttaacttaccccaggttattaggtgcatcccaaatttgcacgtgtcgtctgtcgtgatgagtgtagttatgttcaagttgcctttgccaattattataatatgac

SEQ ID NO: 220439 - DNA, 5048 bp, Zea Mays
atggacgaaggcctctcggcaagtgaaggcaagatcctagtagaggcgtcttcgacggtcaccacaaggatgtaccaggatggaagaagagccgagtctgctcgctgcccacgctgggagttagggccggaggcctggccgatcggcgggggcggagggagggtaatgagggctccgcaggagcgtagcatgagggatctctacgatcgcacgcggcacaaagatatggcagctccagaggaatcagtggaagggtgcggtggaggatgcgcggagggatgggagcaacgggcactggcctctaagatggaggacaagactgtggtaaggaaaagattgatatcaagcaacaacactcgtgtcaaggcagagtctggcacctgtaatacatgctccacaaggtcggaagtaaagaacaatttacttgttcatagggagaaagggctctgtagtaaaggagataacgatgatgagtttagtgcaacctcagatcatgctttgtactctgtaactggtagaaacaaacttgttgcaacatcatccattgccgatgatttgtcagaggttgacatgccatcaaaacgcaggaggctgttgaatcaagacacaagactatctagagcagaataccttgatgacaacaactcatgtgttactggtatatcagcagaaggcaaacttcttgtggataagaaaaaactgtcaatttctgcatccagtcgagatttgaccgctaaagccaacagcatggctaaccacaacaaactaagaaatcaatgtgttgatgaatcaaagaaaggatctgatggttgtgaaatgcatcctagctcatctggtagattttcccctgtagattctcttgttatgacaaaaaagttgctgcgaacccagtcttctgtcagtgcattgagcagattatctcctaacaggcaggttcatgaatttgggaaagcagtggataatttatctcatcaaccttgtgagaaggcttctcttttgaagaataatgaagaaccacgagctgggcaattgaacccttgtatagctggtgaaaacaaccatggcacgctggcaggttacagtaatagacatgcggacaaaaatgatttctcattgaatgatctagacaatggcaccttgtgctcaaaagatgaaatccaagaacatggggacatcacatctaatgataatgataagaagaatgtgtgtgtcaaacaagattcggatcaagattgttcaatggatatatccaatgacagaaagttgaatacacaacatgatgtgatgacagactgtggcaattcagaaggtttgatagatgttaatgtttgtgatatatgtggagatgtcggtagggagtatcttctagctacatgcaccagatgccttgagggagcagagcatacttactgcatgcgagtgaagatggaaaaagttccagttggtgaatggttttgtgaagaatgccagcttaaggaagatcagaacaatacaagaagtaactatggtaacacagcggttaatgtgacagaaggaaagaatcaaaggacagaaagtcaaagcaagcttaaagcattgcaaattgttgtgcctgatttggatgctccgcaagtcacacacagcgcactgacagctgatcagtgtgatggtagtaaaagtttgcatttaacttcagctgatacacaaacacggctaaaggataccacaacagctgctgaaagattggatatgaagaacaaaaaaacattaagtgttgcaagatgtaacaaactgcaagttcttacatctgatttggacacacgaccacacagttatggaaaaccaacatctggagtctataacaagaagagtcgaagttcagattttttgttgaaccacaaaaagttgcaagtttctactgacatggagtcgccactgtcaagtgaaggcctacaaagtccacccatatcatccaagagacatgtagagagcatgtcgtcccctaagcctaggctcttcaagacgggtagccttggaaagcatgatgtcatctctcgtgataactcatttaaaaaatctaacaagggaggtttaacttcagttgataatgttccggtgagaactacccaggcggctaaaagttctgagaccttgtcacgatcatattccatggggaacatggtgaatgctaaagctcccattccttcagcaagaggccttttatccaagcagctatccttcaatagcaccaacaacggaccaaaagtcaagcagttggctgataaaatgtctagcaagttaagacctgcagaacattccccaagagatcctagagataaggaaccaataaaaaagattgtacaatcaggatctttcaaacgcgagggttcagattccgtagatgttggatcatcaaaacaaaagcaaacatttcatttgtctcgagatgaaaaaccaggagtactgaagccaataaaggaaaagaatttaacagaaagaagggcttcttttagtttgaaaaaaccaaacattccttcatctccaaggtctgacagctgtatgaagtcaggggaaagaaaaaatgatcagcatatttctggaacaaacatacttaaaagtagcaaaagacctggatatgctgaaaagaatctgaggtacgatttgtccagaactgacaatggcaatcaagatgttaccgtgcatccaaaaccaatggaagtttctggtaaagatgcttacggagtaaagacatctaatccactatttcgatcccaatgtgccaaaaagtatagatcaaatgatgttgaagatgatgatttacccatttcagtgaataatgttaacattgcgccaaatgagcatgctgaggtggttcccacaatgtctactgccatgactcgtgaatcaaatttacaagatgttccaagagaaagcacctctgatgatttagctccgaaagtggtttgttgccaacaaaagcttttggaaaacacaggagatgattcctgtaaaactttagaggtggttcaagattcaggcgatatattgtctgcgactccacgtggtcttcagatggcacacaatctatacccctatgacaacaaattggataaaccagatttgaagaaggaagcttttgctgatcaatcttcagctcttgggaatcctttaaaagattttgttattccagagcaatcttacatctggcagggtagctttgaggtatcaggacatggaaactcccctgaaatgttcaatgggtttcaagcttacttgtctacttgtgcctcgtccaaagttcgtgaagtaggtgaacaattacctgacaaaattcagctagcagaagtcccacggcattcctcatggccgctgcaatttaatgaagtaaatccaactgaagataatattgctctttttttctttgctaaagatgttgaaagttacgaaagggcatatgggaaactcttggataacatgcttcttggtgatttgtccctcaaagcaaatattgataacatggaacttcttatttttccatctgataagttgcctgagaggattcaacgttggaatggtttacttttcttttggggcattttttatgcccggaaagcaagtagtccactagagcttcctacaaataattgtccattagaacaaaccaatggacctgttatccagcatgatatgggttcatctaaggcacttcagcctttgggtatagatttgaatgagtgccctaatgatgatatatctgatccagctctttcacttggatcagagagtgagaaatttggtgcatctgtagattataatgttttatcagagtccaaacacgaggatagaaatctgaatgcaagtgaagtacatcatgaagaaactgctggcacaagacaaattatatgggggcaaccttctgtagctcccactgtaactaatcttcccactatctcaacaggagttcatgacatcgttccggattattcggctgctgcaaaagatagcacaggaacagcaggtggaaacaaaatggagaaagcagatcagaatgaagctctcttttgtttttcacagcaaccaggtgcaattggatcgatctcacatgagataaaacttaagaaacatggtcttctgccttcacattgtcattttagtggatcaaagatatgtgatgatcaaaccaaatcgactccaagttcagatatgggttctttggattctcacctcaccaacaaaaggcagaagacttatgggaaacactctacttgcatttttggagatgaaatgccacctattaaatgcttgtcgaagatacatcccttaccggctggacaggataatccagtcgatgttttacattgtcacaggtgtccttcagatcctgtctctcttaaaaaaacagtacctgatcatatcatcaacgtgctttcatctgacgatgaagattccccagaacctagtactagcttaaataaggcatcactgaaggcagatgagggctcctccgctttattgttactttccctatccatggtggcaacgaagcataatctttctggttcagatattgtagatgatgaaccactgtctctatctcttggattccccagtgttgtcgacgggagtgaagatcaggagatgaagcaatttctgccggagaagccaggcataaacacttaatgccccctttagatttgcgagtgtacagttttgtgctatgtttagctgtaaggagtttagacagggtagaagtatatggtataaccgttaaattatgaataattttcctttcttttctctcactgttatatgcatctgctgctgttgttagtgatactggtctgatgatgttattgcctgctgtatttatgtgatatatggtgttagtttctttaagacattattggtatgacataaaaggatagatcaaaacgtgaatgtttataaattcaatttgccatggcttaacttaccccaggttattaggtgcatcccaaatttgcacgtgtcgtctgtcgtgatgagtgtagttatgttcaagttgcctttgccaattattataatatgac

SEQ ID NO: 220440 - DNA, 1504 bp, Zea Mays
ctaaacaaaagtttgcacgtcgatcgcttgcttccacgcgtgcatcctcccctgtcctgatggcgactggcagggcaggccgccactgggcatccgcatatccctcacgcggtcacagttactccgggacccacatgtcatcacgtcaaccttcgccatgcccaaagcttagcctcgaagcgtctgtactgtgtgcgtcctctcctcgacctcaacccccaccccgccctacctacaaccctattaaattccgccttccgacccgtagacctgattgatccccgcatcgaatccggcggatcgggagcgggagagaccactcccaaatcgcgtcgcgtcgagagcgagagcggaagaggtgcgcgcgggggaaccgaccgaaccgactgatggagtcgacggcggcgcccgccgcctgcgagatcgcgcgcctgccggatgacctcctgtcggcggcgctcggccggacggggccgctggacgcctgccgcgccgccgcggtctcgccggcctttcgcgccgcggccgacgccgacgccgtctggtccagcttcctgccgcccgacctgcccccgctcgccgatggggagctccccgccgacgcgacggccaccaagaagcagctcttcatgcgcctctccgaccccgccagacccgtcctcctcgccgacggcctcacggttctcagaatgcgcagaactccagcacgtttgctggctggaaatccgcggcaagataccctgcgacatgctgtcccggaacaccacttacgccgcctacatggtgttcaagatgtccgacgaatcctatgggctggactatccgctccaggaggctgaagttagcatcggggcaaccaggtccactcgtcaggtctgcctagggtacgtcgacgacgacgaggacggggaagaggtgcctcagaactaccggtcgttcggggcggtgggaactgtatttagaccaaggatcgggaggcggaaccgtcgccagcctcctggagtgcacgtcctgcaccctcagacaagagccggcggctggatggagatggagatgggtgagttcaggaacgaggaaggtgaagatggcgaggtgtccgtcagcctcatggagaccaggggcggcaactggaagagaggtcttactgtgcagggcattgagatcagggtgaagaagtaaggatgtgaaggttgtggggatcgggctttgcgcatcaaaacaaataaaaggatcttagttagatttgtagtgcgtgttctactgcactgcagcacttgcgtatgtgtgtgtcttgcctatgcccagcaaaaaaaaaaaacaaaaagttcttcttgaggcaaaagaactgcagttttgtacacaatattgttgtgtcccagatcactcggtgctcgatgactggccatgtttgcttttgaaagtgtaaactaggtgtgcttgttacgatcacacaaatcaccaatggagaacaccaattctcgctacgccaaccgctccagttcag

SEQ ID NO: 220441 - DNA, 1639 bp, Zea Mays
cgccactgggcatccgcatatccctcacgcggtcacagttactccgggacccacatgtcatcacgtcaaccttcgccatgcccaaagcttagcctcgaagcgtctgtactgtgtgcgtcctctcctcgacctcaacccccaccccgccctacctacaaccctattaaattccgccttccgacccgtagacctgattgatccccgcatcgaatccggcggatcgggagcgggagagaccactcccaaatcgcgtcgcgtcgagagcgagagcggaagaggtgcgcgcgggggaaccgaccgaaccgactgatggagtcgacggcggcgcccgccgcctgcgagatcgcgcgcctgccggatgacctcctgtcggcggcgctcggccggacggggccgctggacgcctgccgcgccgccgcggtctcgccggcctttcgcgccgcggccgacgccgacgccgtctggtccagcttcctgccgcccgacctgcccccgctcgccgatggggagctccccgccgacgcgacggccaccaagaagcagctcttcatgcgcctctccgaccccgccagacccgtcctcctcgccgacggcctcacgcatgtggctggacagggccaccgtggccaagtgttacatgctgtccgccaggaagctgaccatcatttggggcgatacgccgcagtactggcgctggatccccctcaccgactccagtttgacggtatctctagtctagtctggatacacggccgggccaatagttgcgcgtctgtgcagatgtccagtggagattattgtttcgaagcagtctggttctcagaatgcgcagaactccagcacgtttgctggctggaaatccgcggcaagataccctgcgacatgctgtcccggaacaccacttacgccgcctacatggtgttcaagatgtccgacgaatcctatgggctggactatccgctccaggaggctgaagttagcatcggggcaaccaggtccactcgtcaggtctgcctagggtacgtcgacgacgacgaggacggggaagaggtgcctcagaactaccggtcgttcggggcggtgggaactgtatttagaccaaggatcgggaggcggaaccgtcgccagcctcctggagtgcacgtcctgcaccctcagacaagagccggcggctggatggagatggagatgggtgagttcaggaacgaggaaggtgaagatggcgaggtgtccgtcagcctcatggagaccaggggcggcaactggaagagaggtcttactgtgcagggcattgagatcagggtgaagaagtaaggatgtgaaggttgtggggatcgggctttgcgcatcaaaacaaataaaaggatcttagttagatttgtagtgcgtgttctactgcactgcagcacttgcgtatgtgtgtgtcttgcctatgcccagcaaaaaaaaaaaacaaaaagttcttcttgaggcaaaagaactgcagttttgtacacaatattgttgtgtcccagatcactcggtgctcgatgactggccatgtttgcttttgaaagtgtaaactaggtgtgcttgttacgatcacacaaatcaccaatggagaacaccaattctcgctacgccaaccgctccagttcag

SEQ ID NO: 220442 - DNA, 1463 bp, Zea Mays
aacaaatttgtttcatacacgagtgcccatctaatctgtctcttcctgctgtcgcagtcgcaggacgcacctgcacgcgtccaccaagcccccgactccccgaggccccgacctgcgcacccacgggatccctacctatccggccgtcacccctccccctgcccctcccgagttggattgttcgcggaattggcggaggggcagccggatatgtcgtcgtcggttgggggcggcagcgcgggcggcggcggagtggacatggtcagcctgctggagaaggccaaggatttggaccagctaaagaaggaacaggacgaaatcgttgccgatatcaacaagattcacaagaagctcctcgcatccccagagatggttgataaaccagttgacaccattttgctcaagcttcgtggtttatatgcacgtgcaaaggagctctctgagaatgaaatcagtgcctcaaatgctttgattggattattagatggtttgttgcaatctggagcttcaactgcacaaaagaaaaagatagaagttggtgagcagaaaaagaagaggatcaagtctgatacagattctgcacgattttctgctgcatctatgaggaatcaacttgaccaagctgcaagccttaaaggagagcaggttgctgctagggtaaaatcagatgacgaaaaagatgagtggtttgtcgtgaaggtcatacatttcgataaggaaacaaaagagtatgtgtctactttatatttttctctctgcagggcagacatttatttttgatatgaaagtttactcgaggggaaaattacctttctgaatggaggtatgaagtacttgatgaagaaccaggtgatgacgaagagagcactcaaaagaagtacaagttgcctatgtcttacattattccatttccgaagaaaggggatccttcgagtgccccggattttgggcagggtcgacaagttttagctgtttatcctggcacaacagcattatacagagctaccgtagcttctcatcgtaagttatattctggagttcgatgacgatgaggaggacggtgctctgccgcagagagccgtgccgttctacagggtggttgccctgccggagggccacaggcagtagtgacatttgacgcagttctgcattcctagtgtaacatatagcgcaaggtagggtgtcttcagtgtgacaatgtggtggtcatatctacgcgaaacgagagagaaaacaaggacgtgcatgtagcacttacatgtggggtccttgtataaaagacgatgacgtttttttttcaatctgctagagcacgtctatgtaattgcaatccagttttaatctcttatattatactttagagagaaagggcatactgtaagggtctatttggcaacaatatttctcaaaattatagttttataatactaaaaatatcgtagtttttgtcagctccaaaaata

SEQ ID NO: 220443 - DNA, 404 bp, Zea Mays
tcagtaagtgagaacaaagaaacttcctaaatgtattaatatggtatgatgaatagtgtctcacacattgtgttgttgagctctggtctccatttccgtgctactagaatgtgatgtgaagtattcaccttttgacatggataaacatcttctctctgttgcatttgcaggcggaagaaggtctgttgaagcagcctaaactattttcgttgtgatttccaacgctacatttccaatatgcatttgtttcatacattttccttttttcaaataaggctcatgtgttgcttctaaaatcagttctaagaaggcaaccagggacaacaaaactgataagggaagaaacatgttctggataaatattggcctttgtttcaagactccaagtgtgatggtcaattcca

SEQ ID NO: 220444 - DNA, 1519 bp, Zea Mays
tgggaactctacaactactatggatcctcttatacattgtaaaaaaaacaacattgatgcttttgaaggggcaaggctgaggggaatgccaagagcaatgtgaagaaaagcatcaggggtgcagcagtatcgttgtccgaactaggtgagtatgagaaggcatcaacattccttgagaagctaattaaggtaatccctgataaagcagaagcataccgtttgcttggtgaagtaaagtttgaactcaaggattatgaagggagttcatcatcatacagaagtgctttatcttcatcagataatattgattttgaagttctccgtggactgacaaattcattacttgctgctaagaagccagatgaggcagttgatataattctgttatgccgtcgaaagttgaatgaaaagagtcaaacaggactagcagatttggaggctacaaatgacaatggtcgccaaaagcctcaagatattgacccgatccaagttgacctgcttttagggaaggcttattccgattggggtcatatcagtgatgctatttctgtctacgataagctaataactgatcatcctgaagacttccgtggttatttagcaaagggaatcatattaaaggaaaatggtaaagcaggtgatgcagaaagaatgtttattcaggcaaaattcttcgccccggaggcagcgaaggcactagttgatcgctatgcgcaaagatagtcgataagagattgaatggtgttgttttaaaccaatgagatcattcggattccagaaaaacgatcaacatgtttggaacgtcttgtatgatagcaacattatgggatctgggacattttgaattgtattgttttagaacaggcctgacgcagtatcgaaaaaagccttcccactgagacaagagattctgggttcgacagtctctgaaaaaatgcagggcaagccctgcccttggttattccttctttctgaaaaaaatgcagggtaagccttgcccttggttattccttctctctgaaaaaatgctgggtaagccttgccctgggttattccttgctcagacctcgctcacgcggaagccgccagcagcccttttattgctttagaacagcagaaatgaaacatgtatgctttgcctgggaacaatgctcagttaaacattttgatatacgtgtttagtccattatataaaaaattatttcgatgtgttggaacaaattgtgttgtcacggcacgagcctcagtgttctccatatccataatcacgtgaaatatgatcgtggttgaggtaatatatgtcatcttgccatgaatagttagggtcatatccctttgttgctctggttaaaagtcagtggtattccctgtgcatgcaacatgtgtggacattgtatttgtgattcaatagttctatagataatgtggttataaaaaaactcaaccgggaatgaccgtcctcttggtattatattaatatgatatcgaaacatggttccgaccaaaaaaattctcaaac

SEQ ID NO: 220445 - DNA, 2205 bp, Zea Mays
gttcgttcattgtgtactactggattctcacaccgcagcatccgttcacgtgtcttcaccccgagtgctgtctctctccttcctctctgctacggctgggtgaggcggggggctactgccgccgcctaacgccaggttccgaggccttcgtcggtctatttgccggcgatgaacatccaccagggatggttgcaacaatttgggcatagcgttggtatcagtggttcgaagatggttctccatatgacccacaatgtattcagttttcgatgctttgctgccaatgggcgtggcttcagtgcggattctaccaataagagaaaaattaaaagcaagaagaggcgaaaggatgttgcactggaatcaagtgaggtaatatctggaaatccaaggaacagggaccaatgggtgccagaattaagaactgaaagtgaaaacaaatctggtaaaaaagtcatggataagaaatttttggaaaaagtggaagcggttcgaaggtctgctcttgagaaaaagaaagctgaagagaacaaagattatcaagctattgattatgatgctccaattgagtcagataaaagtactattggctttggtactagggttggaattggtgttgcagttgttatatttggactagtcttcgcttttggggatttcctgccttatggaagtgttagccctagcaaagaaagtgcagtagttaaacaaaagctttctcaagaggaagaagaaaaatttaagaatgcactgcaaggctttcaagcaacgctgagtaagtcgcctaatgatcctactgctcttgagggtgcagcagtatcgttgtccgaactaggtgagtatgagaaggcatcaacattccttgagaagctaattaaggtaatccctgataaagcagaagcataccgtttgcttggtgaagtaaagtttgaactcaaggattatgaagggagttcatcatcatacagaagtgctttatcttcatcagataatattgattttgaagttctccgtggactgacaaattcattacttgctgctaagaagccagatgagttgatataattctgttatgccgtcgaaagttgaatgaaaagagtcaaacaggactagcagatttggaggctacaaatgacaatggtcgccaaaagcctcaagatattgacccgatccaagttgacctgcttttagggaaggcttattccgattggggtcatatcagtgatgctatttctgtctacgataagctaataactgatcatcctgaagacttccgtggttatttagcaaagggaatcatattaaaggaaaatggtaaagcaggtgatgcagaaagaatgtttattcaggcaaaattcttcgccccggaggcagcgaaggcactagttgatcgctatgcgcaaagatagtcgataagagattgaatggtgttgttttaaaccaatgagatcattcggattccagaaaaacgatcaacatgtttggaacgtcttgtatgatagcaacattatgggatctgggacattttgaattgtattgttttagaacaggcctgacgcagtatcgaaaaaagccttcccactgagacaagagattctgggttcgacagtctctgaaaaaatgcagggcaagccctgcccttggttattccttctttctgaaaaaaatgcagggtaagccttgcccttggttattccttctctctgaaaaaatgctgggtaagccttgccctgggttattccttgctcagacctcgctcacgcggaagccgccagcagcccttttattgctttagaacagcagaaatgaaacatgtatgctttgcctgggaacaatgctcagttaaacattttgatatacgtgtttagtccattatataaaaaattatttcgatgtgttggaacaaattgtgttgtcacggcacgagcctcagtgttctccatatccataatcacgtgaaatatgatcgtggttgaggtaatatatgtcatcttgccatgaatagttagggtcatatccctttgttgctctggttaaaagtcagtggtattccctgtgcatgcaacatgtgtggacattgtatttgtgattcaatagttctatagataatgtggttataaaaaaactcaaccgggaatgaccgtcctcttggtattatattaatatgatatcgaaacatggttccgaccaaaaaaattctcaaac

SEQ ID NO: 220446 - DNA, 2189 bp, Zea Mays
gtgtactactggattctcacaccgcagcatccgttcacgtgtcttcaccccgagtgctgtctctctccttcctctctgctacggctgggtgaggcggggggctactgccgccgcctaacgccaggttccgaggccttcgtcggtctatttgccggcgatgaacatccaccagggatggttgcaacaatttgggcatagcgttggtatcagtggttcgaagatggttctccatatgacccacaatgtattcagttttcgatgctttgctgccaatgggcgtggcttcagtgcggattctaccaataagagaaaaattaaaagcaagaagaggcgaaaggatgttgcactggaatcaagtgaggtaatatctggaaatccaaggaacagggaccaataattaagaactgaaagtgaaaacaaatctggtaaaaaagtcatggataagaaatttttggaaaaagtggaagcggttcgaaggtctgctcttgagaaaaagaaagctgaagagaacaaagattatcaagctattgattatgatgctccaattgagtcagataaaagtactattggctttggtactagggttggaattggtgttgcagttgttatatttggactagtcttcgcttttggggatttcctgccttatggaagtgttagccctagcaaagaaagtgcagtagttaaacaaaagctttctcaagaggaagaagaaaaatttaagaatgcactgcaaggctttcaagcaacgctgagtaagtcgcctaatgatcctactgctcttgagggtgcagcagtatcgttgtccgaactaggtgagtatgagaaggcatcaacattccttgagaagctaattaaggtaatccctgataaagcagaagcataccgtttgcttggtgaagtaaagtttgaactcaaggattatgaagggagttcatcatcatacagaagtgctttatcttcatcagataatattgattttgaagttctccgtggactgacaaattcattacttgctgctaagaagccagatgaggcagttgatataattctgttatgccgtcgaaagttgaatgaaaagagtcaaacaggactagcagatttggaggctacaaatgacaatggtcgccaaaagcctcaagatattgacccgatccaagttgacctgcttttagggaaggcttattccgattggggtcatatcagtgatgctatttctgtctacgataagctaataactgatcatcctgaagacttccgtggttatttagcaaagggaatcatattaaaggaaaatggtaaagcaggtgatgcagaaagaatgtttattcaggcaaaattcttcgccccggaggcagcgaaggcactagttgatcgctatgcgcaaagatagtcgataagagattgaatggtgttgttttaaaccaatgagatcattcggattccagaaaaacgatcaacatgtttggaacgtcttgtatgatagcaacattatgggatctgggacattttgaattgtattgttttagaacaggcctgacgcagtatcgaaaaaagccttcccactgagacaagagattctgggttcgacagtctctgaaaaaatgcagggcaagccctgcccttggttattccttctttctgaaaaaaatgcagggtaagccttgcccttggttattccttctctctgaaaaaatgctgggtaagccttgccctgggttattccttgctcagacctcgctcacgcggaagccgccagcagcccttttattgctttagaacagcagaaatgaaacatgtatgctttgcctgggaacaatgctcagttaaacattttgatatacgtgtttagtccattatataaaaaattatttcgatgtgttggaacaaattgtgttgtcacggcacgagcctcagtgttctccatatccataatcacgtgaaatatgatcgtggttgaggtaatatatgtcatcttgccatgaatagttagggtcatatccctttgttgctctggttaaaagtcagtggtattccctgtgcatgcaacatgtgtggacattgtatttgtgattcaatagttctatagataatgtggttataaaaaaactcaaccgggaatgaccgtcctcttggtattatattaatatgatatcgaaacatggttccgaccaaaaaaattctcaaac

SEQ ID NO: 220447 - DNA, 2210 bp, Zea Mays
gtgtactactggattctcacaccgcagcatccgttcacgtgtcttcaccccgagtgctgtctctctccttcctctctgctacggctgggtgaggcggggggctactgccgccgcctaacgccaggttccgaggccttcgtcggtctatttgccggcgatgaacatccaccagggatggttgcaacaatttgggcatagcgttggtatcagtggttcgaagatggttctccatatgacccacaatgtattcagttttcgatgctttgctgccaatgggcgtggcttcagtgcggattctaccaataagagaaaaattaaaagcaagaagaggcgaaaggatgttgcactggaatcaagtgaggtaatatctggaaatccaaggaacagggaccaatgggtgccagaattaagaactgaaagtgaaaacaaatctggtaaaaaagtcatggataagaaatttttggaaaaagtggaagcggttcgaaggtctgctcttgagaaaaagaaagctgaagagaacaaagattatcaagctattgattatgatgctccaattgagtcagataaaagtactattggctttggtactagggttggaattggtgttgcagttgttatatttggactagtcttcgcttttggggatttcctgccttatggaagtgttagccctagcaaagaaagtgcagtagttaaacaaaagctttctcaagaggaagaagaaaaatttaagaatgcactgcaaggctttcaagcaacgctgagtaagtcgcctaatgatcctactgctcttgagggtgcagcagtatcgttgtccgaactaggtgagtatgagaaggcatcaacattccttgagaagctaattaaggtaatccctgataaagcagaagcataccgtttgcttggtgaagtaaagtttgaactcaaggattatgaagggagttcatcatcatacagaagtgctttatctgtgagtaaatcttcatcagataatattgattttgaagttctccgtggactgacaaattcattacttgctgctaagaagccagatgaggcagttgatataattctgttatgccgtcgaaagttgaatgaaaagagtcaaacaggactagcagatttggaggctacaaatgacaatggtcgccaaaagcctcaagatattgacccgatccaagttgacctgcttttagggaaggcttattccgattggggtcatatcagtgatgctatttctgtctacgataagctaataactgatcatcctgaagacttccgtggttatttagcaaagggaatcatattaaaggaaaatggtaaagcaggtgatgcagaaagaatgtttattcaggcaaaattcttcgccccggaggcagcgaaggcactagttgatcgctatgcgcaaagatagtcgataagagattgaatggtgttgttttaaaccaatgagatcattcggattccagaaaaacgatcaacatgtttggaacgtcttgtatgatagcaacattatgggatctgggacattttgaattgtattgttttagaacaggcctgacgcagtatcgaaaaaagccttcccactgagacaagagattctgggttcgacagtctctgaaaaaatgcagggcaagccctgcccttggttattccttctttctgaaaaaaatgcagggtaagccttgcccttggttattccttctctctgaaaaaatgctgggtaagccttgccctgggttattccttgctcagacctcgctcacgcggaagccgccagcagcccttttattgctttagaacagcagaaatgaaacatgtatgctttgcctgggaacaatgctcagttaaacattttgatatacgtgtttagtccattatataaaaaattatttcgatgtgttggaacaaattgtgttgtcacggcacgagcctcagtgttctccatatccataatcacgtgaaatatgatcgtggttgaggtaatatatgtcatcttgccatgaatagttagggtcatatccctttgttgctctggttaaaagtcagtggtattccctgtgcatgcaacatgtgtggacattgtatttgtgattcaatagttctatagataatgtggttataaaaaaactcaaccgggaatgaccgtcctcttggtattatattaatatgatatcgaaacatggttccgaccaaaaaaattctcaaac

SEQ ID NO: 220448 - DNA, 2215 bp, Zea Mays
gtgtactactggattctcacaccgcagcatccgttcacgtgtcttcaccccgagtgctgtctctctccttcctctctgctacggctgggtgaggcggggggctactgccgccgcctaacgccaggttccgaggccttcgtcggtctatttgccggcgatgaacatccaccagggatggttgcaacaatttgggcatagcgttggtatcagtggttcgaagatggttctccatatgacccacaatgtattcagttttcgatgctttgctgccaatgggcgtggcttcagtgcggattctaccaataagagaaaaattaaaagcaagaagaggcgaaaggatgttgcactggaatcaagtgaggtaatatctggaaatccaaggaacagggaccaatgggtgccagaattaagaactgaaagtgaaaacaaatctggtaaaaaagtcatggataagaaatttttggaaaaagtggaagcggttcgaaggtctgctcttgagaaaaagaaagctgaagagaacaaagattatcaagctattgattatgatgctccaattgagtcagataaaagtactattggctttggtactagggttggaattggtgttgcagttgttatatttggactagtcttcgcttttggggatttcctgccttatggaagtgttagccctagcaaagaaagtgcagtagttaaacaaaagctttctcaagaggaagaagaaaaatttaagaatgcactgcaaggctttcaagcaacgctgagtaagtcgcctaatgatcctactgctcttgagggtgcagcagtatcgttgtccgaactaggtgagtatgagaaggcatcaacattccttgagaagctaattaaggtaatccctgataaagcagaagcataccgtttgcttggtgaagtaaagtttgaactcaaggattatgaagggagttcatcatcatacagaagtgctttatctactaacaattgaaacagtcatcagataatattgattttgaagttctccgtggactgacaaattcattacttgctgctaagaagccagatgaggcagttgatataattctgttatgccgtcgaaagttgaatgaaaagagtcaaacaggactagcagatttggaggctacaaatgacaatggtcgccaaaagcctcaagatattgacccgatccaagttgacctgcttttagggaaggcttattccgattggggtcatatcagtgatgctatttctgtctacgataagctaataactgatcatcctgaagacttccgtggttatttagcaaagggaatcatattaaaggaaaatggtaaagcaggtgatgcagaaagaatgtttattcaggcaaaattcttcgccccggaggcagcgaaggcactagttgatcgctatgcgcaaagatagtcgataagagattgaatggtgttgttttaaaccaatgagatcattcggattccagaaaaacgatcaacatgtttggaacgtcttgtatgatagcaacattatgggatctgggacattttgaattgtattgttttagaacaggcctgacgcagtatcgaaaaaagccttcccactgagacaagagattctgggttcgacagtctctgaaaaaatgcagggcaagccctgcccttggttattccttctttctgaaaaaaatgcagggtaagccttgcccttggttattccttctctctgaaaaaatgctgggtaagccttgccctgggttattccttgctcagacctcgctcacgcggaagccgccagcagcccttttattgctttagaacagcagaaatgaaacatgtatgctttgcctgggaacaatgctcagttaaacattttgatatacgtgtttagtccattatataaaaaattatttcgatgtgttggaacaaattgtgttgtcacggcacgagcctcagtgttctccatatccataatcacgtgaaatatgatcgtggttgaggtaatatatgtcatcttgccatgaatagttagggtcatatccctttgttgctctggttaaaagtcagtggtattccctgtgcatgcaacatgtgtggacattgtatttgtgattcaatagttctatagataatgtggttataaaaaaactcaaccgggaatgaccgtcctcttggtattatattaatatgatatcgaaacatggttccgaccaaaaaaattctcaaac

SEQ ID NO: 220449 - DNA, 1831 bp, Zea Mays
gtcatcttctaacgggcatattcctaattatgaagttattaaaagcaagaagaggcgaaaggatgttgcactggaatcaagtgaggtaatatctggaaatccaaggaacagggaccaatgtctgctcttgagaaaaagaaagctgaagagaacaaagattatcaagctattgattatgatgctccaattgagtcagataaaagtactattggctttggtactagggttggaattggtgttgcagttgttatatttggactagtcttcgcttttggggatttcctgccttatggaagtgttagccctagcaaagaaagtgcagtagttaaacaaaagctttctcaagaggaagaagaaaaatttaagaatgcactgcaaggctttcaagcaacgctgagtaagtcgcctaatgatcctactgctcttgagggtgcagcagtatcgttgtccgaactaggtgagtatgagaaggcatcaacattccttgagaagctaattaaggtaatccctgataaagcagaagcataccgtttgcttggtgaagtaaagtttgaactcaaggattatgaagggagttcatcatcatacagaagtgctttatcttcatcagataatattgattttgaagttctccgtggactgacaaattcattacttgctgctaagaagccagatgaggcagttgatataattctgttatgccgtcgaaagttgaatgaaaagagtcaaacaggactagcagatttggaggctacaaatgacaatggtcgccaaaagcctcaagatattgacccgatccaagttgacctgcttttagggaaggcttattccgattggggtcatatcagtgatgctatttctgtctacgataagctaataactgatcatcctgaagacttccgtggttatttagcaaagggaatcatattaaaggaaaatggtaaagcaggtgatgcagaaagaatgtttattcaggcaaaattcttcgccccggaggcagcgaaggcactagttgatcgctatgcgcaaagatagtcgataagagattgaatggtgttgttttaaaccaatgagatcattcggattccagaaaaacgatcaacatgtttggaacgtcttgtatgatagcaacattatgggatctgggacattttgaattgtattgttttagaacaggcctgacgcagtatcgaaaaaagccttcccactgagacaagagattctgggttcgacagtctctgaaaaaatgcagggcaagccctgcccttggttattccttctttctgaaaaaaatgcagggtaagccttgcccttggttattccttctctctgaaaaaatgctgggtaagccttgccctgggttattccttgctcagacctcgctcacgcggaagccgccagcagcccttttattgctttagaacagcagaaatgaaacatgtatgctttgcctgggaacaatgctcagttaaacattttgatatacgtgtttagtccattatataaaaaattatttcgatgtgttggaacaaattgtgttgtcacggcacgagcctcagtgttctccatatccataatcacgtgaaatatgatcgtggttgaggtaatatatgtcatcttgccatgaatagttagggtcatatccctttgttgctctggttaaaagtcagtggtattccctgtgcatgcaacatgtgtggacattgtatttgtgattcaatagttctatagataatgtggttataaaaaaactcaaccgggaatgaccgtcctcttggtattatattaatatgatatcgaaacatggttccgaccaaaaaaattctcaaac

SEQ ID NO: 220450 - DNA, 1456 bp, Zea Mays
ggggaatgccaagagcaatgtgaagaaaagcatcaggggtgcagcagtatcgttgtccgaactaggtgagtatgagaaggcatcaacattccttgagaagctaattaaggtaatccctgataaagcagaagcataccgtttgcttggtgaagtaaagtttgaactcaaggattatgaagggagttcatcatcatacagaagtgctttatctactaacaattgaaacagtcatcagataatattgattttgaagttctccgtggactgacaaattcattacttgctgctaagaagccagatgaggcagttgatataattctgttatgccgtcgaaagttgaatgaaaagagtcaaacaggactagcagatttggaggctacaaatgacaatggtcgccaaaagcctcaagatattgacccgatccaagttgacctgcttttagggaaggcttattccgattggggtcatatcagtgatgctatttctgtctacgataagctaataactgatcatcctgaagacttccgtggttatttagcaaagggaatcatattaaaggaaaatggtaaagcaggtgatgcagaaagaatgtttattcaggcaaaattcttcgccccggaggcagcgaaggcactagttgatcgctatgcgcaaagatagtcgataagagattgaatggtgttgttttaaaccaatgagatcattcggattccagaaaaacgatcaacatgtttggaacgtcttgtatgatagcaacattatgggatctgggacattttgaattgtattgttttagaacaggcctgacgcagtatcgaaaaaagccttcccactgagacaagagattctgggttcgacagtctctgaaaaaatgcagggcaagccctgcccttggttattccttctttctgaaaaaaatgcagggtaagccttgcccttggttattccttctctctgaaaaaatgctgggtaagccttgccctgggttattccttgctcagacctcgctcacgcggaagccgccagcagcccttttattgctttagaacagcagaaatgaaacatgtatgctttgcctgggaacaatgctcagttaaacattttgatatacgtgtttagtccattatataaaaaattatttcgatgtgttggaacaaattgtgttgtcacggcacgagcctcagtgttctccatatccataatcacgtgaaatatgatcgtggttgaggtaatatatgtcatcttgccatgaatagttagggtcatatccctttgttgctctggttaaaagtcagtggtattccctgtgcatgcaacatgtgtggacattgtatttgtgattcaatagttctatagataatgtggttataaaaaaactcaaccgggaatgaccgtcctcttggtattatattaatatgatatcgaaacatggttccgaccaaaaaaattctcaaac

SEQ ID NO: 220451 - DNA, 1423 bp, Zea Mays
caagagcaatgtgaagaaaagcatcaggggtgcagcagtatcgttgtccgaactaggtgagtatgagaaggcatcaacattccttgagaagctaattaaggtaatccctgataaagcagaagcataccgtttgcttggtgaagtaaagtttgaactcaaggattatgaagggagttcatcatcatacagaagtgctttatctataatattgattttgaagttctccgtggactgacaaattcattacttgctgctaagaagccagatgaggcagttgatataattctgttatgccgtcgaaagttgaatgaaaagagtcaaacaggactagcagatttggaggctacaaatgacaatggtcgccaaaagcctcaagatattgacccgatccaagttgacctgcttttagggaaggcttattccgattggggtcatatcagtgatgctatttctgtctacgataagctaataactgatcatcctgaagacttccgtggttatttagcaaagggaatcatattaaaggaaaatggtaaagcaggtgatgcagaaagaatgtttattcaggcaaaattcttcgccccggaggcagcgaaggcactagttgatcgctatgcgcaaagatagtcgataagagattgaatggtgttgttttaaaccaatgagatcattcggattccagaaaaacgatcaacatgtttggaacgtcttgtatgatagcaacattatgggatctgggacattttgaattgtattgttttagaacaggcctgacgcagtatcgaaaaaagccttcccactgagacaagagattctgggttcgacagtctctgaaaaaatgcagggcaagccctgcccttggttattccttctttctgaaaaaaatgcagggtaagccttgcccttggttattccttctctctgaaaaaatgctgggtaagccttgccctgggttattccttgctcagacctcgctcacgcggaagccgccagcagcccttttattgctttagaacagcagaaatgaaacatgtatgctttgcctgggaacaatgctcagttaaacattttgatatacgtgtttagtccattatataaaaaattatttcgatgtgttggaacaaattgtgttgtcacggcacgagcctcagtgttctccatatccataatcacgtgaaatatgatcgtggttgaggtaatatatgtcatcttgccatgaatagttagggtcatatccctttgttgctctggttaaaagtcagtggtattccctgtgcatgcaacatgtgtggacattgtatttgtgattcaatagttctatagataatgtggttataaaaaaactcaaccgggaatgaccgtcctcttggtattatattaatatgatatcgaaacatggttccgaccaaaaaaattctcaaac

SEQ ID NO: 220452 - DNA, 1352 bp, Zea Mays
gagcaatgtgaagaaaagcatcaggggtgcagcagtatcgttgtccgaactaggtgagtatgagaaggcatcaacattccttgagaagctaattaaggtaatccctgataaagcagaagcataccgtttgcttggtgaagtaaagtttgaactcaaggattatgaagggagttcatcatcatacagaagtgctttatctgcagttgatataattctgttatgccgtcgaaagttgaatgaaaagagtcaaacaggactagcagatttggaggctacaaatgacaatggtcgccaaaagcctcaagatattgacccgatccaagttgacctgcttttagggaaggcttattccgattggggtcatatcagtgatgctatttctgtctacgataagctaataactgatcatcctgaagacttccgtggttatttagcaaagggaatcatattaaaggaaaatggtaaagcaggtgatgcagaaagaatgtttattcaggcaaaattcttcgccccggaggcagcgaaggcactagttgatcgctatgcgcaaagatagtcgataagagattgaatggtgttgttttaaaccaatgagatcattcggattccagaaaaacgatcaacatgtttggaacgtcttgtatgatagcaacattatgggatctgggacattttgaattgtattgttttagaacaggcctgacgcagtatcgaaaaaagccttcccactgagacaagagattctgggttcgacagtctctgaaaaaatgcagggcaagccctgcccttggttattccttctttctgaaaaaaatgcagggtaagccttgcccttggttattccttctctctgaaaaaatgctgggtaagccttgccctgggttattccttgctcagacctcgctcacgcggaagccgccagcagcccttttattgctttagaacagcagaaatgaaacatgtatgctttgcctgggaacaatgctcagttaaacattttgatatacgtgtttagtccattatataaaaaattatttcgatgtgttggaacaaattgtgttgtcacggcacgagcctcagtgttctccatatccataatcacgtgaaatatgatcgtggttgaggtaatatatgtcatcttgccatgaatagttagggtcatatccctttgttgctctggttaaaagtcagtggtattccctgtgcatgcaacatgtgtggacattgtatttgtgattcaatagttctatagataatgtggttataaaaaaactcaaccgggaatgaccgtcctcttggtattatattaatatgatatcgaaacatggttccgaccaaaaaaattctcaaac

SEQ ID NO: 220453 - DNA, 1321 bp, Zea Mays
attgactcaagatatgaatagagtgagaaatctcaggacgggtgatcccaaggtagaaaatgctcccaacaagccgacgttagtgagtgggatcaacaagtgctgcatggttagaggacttgttcctaggctctcgggcagagggcttgtctgctggctctgctagaggcagttgatataattctgttatgccgtcgaaagttgaatgaaaagagtcaaacaggactagcagatttggaggctacaaatgacaatggtcgccaaaagcctcaagatattgacccgatccaagttgacctgcttttagggaaggcttattccgattggggtcatatcagtgatgctatttctgtctacgataagctaataactgatcatcctgaagacttccgtggttatttagcaaagggaatcatattaaaggaaaatggtaaagcaggtgatgcagaaagaatgtttattcaggcaaaattcttcgccccggaggcagcgaaggcactagttgatcgctatgcgcaaagatagtcgataagagattgaatggtgttgttttaaaccaatgagatcattcggattccagaaaaacgatcaacatgtttggaacgtcttgtatgatagcaacattatgggatctgggacattttgaattgtattgttttagaacaggcctgacgcagtatcgaaaaaagccttcccactgagacaagagattctgggttcgacagtctctgaaaaaatgcagggcaagccctgcccttggttattccttctttctgaaaaaaatgcagggtaagccttgcccttggttattccttctctctgaaaaaatgctgggtaagccttgccctgggttattccttgctcagacctcgctcacgcggaagccgccagcagcccttttattgctttagaacagcagaaatgaaacatgtatgctttgcctgggaacaatgctcagttaaacattttgatatacgtgtttagtccattatataaaaaattatttcgatgtgttggaacaaattgtgttgtcacggcacgagcctcagtgttctccatatccataatcacgtgaaatatgatcgtggttgaggtaatatatgtcatcttgccatgaatagttagggtcatatccctttgttgctctggttaaaagtcagtggtattccctgtgcatgcaacatgtgtggacattgtatttgtgattcaatagttctatagataatgtggttataaaaaaactcaaccgggaatgaccgtcctcttggtattatattaatatgatatcgaaacatggttccgaccaaaaaaattctcaaac

SEQ ID NO: 220454 - DNA, 1877 bp, Zea Mays
ggcattccgaagagaagcggggggaggcgaaggcaacaggttcgccgttccgagtcgtccgtcgcctgcccgctgcccgttccgggcgcctccgccccgtttcgtcgaccacctctccggcgccgccgtcctgagccgtcgcacgcgccacgggggcgcctcccgcgcgcgctccctacgccggctccgccccgccccgccgccatgggctccagagtccttcacttagacgttcctgcaaattctgaggcctatcttatgagaaatgtaccagggagtgtaagtagccctcccatgaatggtgaaaagggtctctttcgaaatcagaatgcggggttcactgcacttgcaagtcctgtgaggagagaaatcggaaacagatcgtcgacaaggtccttctgtgttgatgacaatgacttggaagatggtaaggcctcaaaagaaagggagagttctgcacagtcactcaggctcccaaagattcagaatcaggctctcttatctggtctggcttactgcatatcatcatgcagcatgatcttagtcaacaaatttgttctatctagctatggtttcagtgctccagtatttttgatgctttaccagaacattgtatcagtgaccatagtttctacactatccctgtccggtgctgttccaactgaaccattgacatggaatttaatcaaagtttggttgcctgtaaatatcatctttgttggaatgctgatcacaagcatgtttagtttgaagtacattaatgttgccatgctgactatattgaagaatgtcgccaatgtcctgactgcttctggggaaacttattttttcaagaagcagcatggtactcaagtttgggttgctcttatgttgatgataatctctgcagttgcgggaggaataacggatctgtcattccatgctgttggatatatctggcagaccttaaactgtgttctgacggcggcatattcgatcactcttaaggatgcccgagttttggctggtcatcactgccagtggagttttggggcttggaatcagctttacatcgatgtggtttctccatcagacgagtgcaacaacatatagccttgtgggctccttgaacaagatccctctttccatcgctgggatcgtcctcttcaacgttcgtacaagcgtgcagaactctttgagcattctgtttggtctattagcaggagtattcttcgccagggccaaattgcgagataactcaccgaccttgtgatcaccgtgcaggctttatagtttgtagatcatcaatcagctcagaaacactctctggatttgtgcagatgcaatggttgtttcccacctgactatgcagagagacaacacatgcacccggattgggctgggactctccagttctccttctcttccccacaagctgacttgacccacagtggttagtcttctggtggtatacgtcttcgttcttgctgtaaaatagtacccaaaaagaaaattgatggacgcaactgattctcaggcagtttgtgatggaaaggcgggttgattgtagtttgtaaagacacggttgctggatggaaggggatgtaatggtaataggttccgtgcatgggaaatattaatacgaagtatctagatcaggattcaggcgacggaaaaagtaaaaaaatgaattggtttgtttatttcaaacaagatgggcctgaagaagcagagaagtgcaagctaagattcaaatggcaacgggcaatgccggtaggtacacagctatttgtataaaaaagacaatgaaatcgaagttttaaacgggtaaagtataaaaaattcaaagaagacaaaggtatttatgtcgttttgacgaagcctgtgttatttgcttg

SEQ ID NO: 220455 - DNA, 1867 bp, Zea Mays
ggcattccgaagagaagcggggggaggcgaaggcaacaggttcgccgttccgagtcgtccgtcgcctgcccgctgcccgttccgggcgcctccgccccgtttcgtcgaccacctctccggcgccgccgtcctgagccgtcgcacgcgccacgggggcgcctcccgcgcgcgctccctacgccggctccgccccgccccgccgccatgggctccagatcgtcgacaaggtccttctgtgttgatgacaatgacttggaagatggtaaggcctcaaaagaaagggagagttctgcacagtcactcaggctcccaaagattcagaatcaggctctcttatctggtctggcttactgcatatcatcatgcagcatgatcttagtcaacaaatttgttctatctagctatggtttcagtgctccagtatttttgatgctttaccagaacattgtatcagtgaccatagtttctacactatccctgtccggtgctgttccaactgaaccattgacatggaatttaatcaaagtttggttgcctgtaaatatcatctttgttggaatgctgatcacaagcatgtttagtttgaagtacattaatgttgccatgctgactatattgaagaatgtcgccaatgtcctgactgcttctggggaaacttattttttcaagaagcagcatggtactcaagtttgggttgctcttatgttgatgataatctctgcagttgcgggaggaataacggatctgtcattccatgctgttggatatatctggcagaccttaaactgtgttctgacggcggcatattcgcttacattgcgacatgtaatggacagtgctaagcaagtcaccaagtctgggaatttgaatgagctttcgatggtgttgctgaataatgttctttcactgccattgggaattatcctcgttcttggtttgaatgaaatggagtaccttttgcagacatcactcttaaggatgcccgagttttggctggtcatcactgccagtggagttttggggcttggaatcagctttacatcgatgtggtttctccatcagacgagtgcaacaacatatagccttgtgggctccttgaacaagatccctctttccatcgctgggatcgtcctcttcaacgttcgtacaagcgtgcagaactctttgagcattctgtttggtctattagcaggagtattcttcgccagggccaaattgcgagataactcaccgaccttgtgatcaccgtgcaggctttatagtttgtagatcatcaatcagctcagaaacactctctggatttgtgcagatgcaatggttgtttcccacctgactatgcagagagacaacacatgcacccggattgggctgggactctccagttctccttctcttccccacaagctgacttgacccacagtggttagtcttctggtggtatacgtcttcgttcttgctgtaaaatagtacccaaaaagaaaattgatggacgcaactgattctcaggcagtttgtgatggaaaggcgggttgattgtagtttgtaaagacacggttgctggatggaaggggatgtaatggtaataggttccgtgcatgggaaatattaatacgaagtatctagatcaggattcaggcgacggaaaaagtaaaaaaatgaattggtttgtttatttcaaacaagatgggcctgaagaagcagagaagtgcaagctaagattcaaatggcaacgggcaatgccggtaggtacacagctatttgtataaaaaagacaatgaaatcgaagttttaaacgggtaaagtataaaaaattcaaagaagacaaaggtatttatgtcgttttgacgaagcctgtgttatttgcttg

SEQ ID NO: 220456 - DNA, 1077 bp, Zea Mays
tcctcctcccctctctcgcctcaaaacaaggaagggagcagatggagccgcatcattaaaaaaaggacacggaaacttaatccgatccaccaaacaaaaatccctgtctctcgcgcagggcaccgccacgcgcgcctcatccggtaccgccatgacgagcgcctccgagctcttcatcgcgcgccgcgccgcccgtggggcccgcctctccgaccccgaccccgacccggacccgcaccccgtcgcgctccgggaccagcatggactcggcggccggcgccagcgccgcgggtgccggccgcgacgccagctcgacgccgccggggacgtgcgccagcacctgcacaccggggccccgccaccgcgtcgccgcggatcgtacaccatcttatcctacatagacaataacaactttggggattctgcatctcggaggaacagactcgataggctgatgttcaggacaaatgagcggcttcctggtgctgtactgcaagcacaagcacgtgtcctggagagactcagagaaacagggaaacgtggcatgaggcaaaccggccccactcatcgtcgttccacctaggcagtgaatcagatgaagaaagaccaaacgtcagctccgttaactccaaccggtcaactggacttagcaaggcggctttcctgcgtctgcagattgagatttttgaggctagcaaagatgataacagagaggcttcaccagaatgctctatttgccttgatggattttacgacggagatgagctgataaggttgcactgtggccacaggttccactcgacatgcttggagccatgggtgaggaaatgttcagactgcccatactgtcggacaaatatacggtcacaatcctgatggcaaacccttagttctgaacaagattataaccaccgcgaagttcaactgctgtaaattcgctgttgcgggcaccgcgttccagttagtctggtgctccaatggttgcgtgtcatttctaatatactgaatgttttgtgttgttgtgtggctcaaagaggcatatggtgttgtgtgctagtggaggctgatagcagtata

SEQ ID NO: 220457 - DNA, 343 bp, Zea Mays
acaaacaccctctgcctgcctgcagcctgctcatatcatctcatctgacatctccatgtttatcccctctctccagttctccagctcacaagtttcctggcctcgcttgtatctttgagcgcctcaactctgcagcacatatatcctgtaataagctctgtcttgcatacactagctctagagtctttcaagatgagcaaacagatctgagctccagggacttgtggtacaggatctctctacagcctcttcggtgctcgaagcggtgcatatacatcaatgttccagcttcaggcactcctggatggagtgcaatgcaaccttttcatcaagataaaatttg

SEQ ID NO: 220458 - DNA, 1663 bp, Zea Mays
aagagcttgaagcctggaagcggtggaacttctggcacaagggacactttacagaaagatgactggtgtcgaagctgccgccatatctgctgtagcatctggaatattaaagattgtgggcaacaagttggcaccactggttataagaaagtatagctcaatcgtgggtgtggaaaaagatctccagaagctccaggtcctagttgaggatataaactcttggctagaaagcgcgggatatcaagcttttggtgatgatgcatcacttagttggttcaaacttcaaacagttgaaagatgttgcttatgctgttgacgatgttgtcgatgagtaccagctgaaggccgagagaaatgatgcttctggtgatggtgattttgtatccagatatatgcgtagaaaaccagaatcgttcatatttcagtgtaaggcagctaagaagatcaaggcaatcaagaagagatttgctgcaatcgtgaagcaaagagccgacatcaatataatagctactagtttaactggtagtggtcattctatttcccatatgaaaaagacagctgtggggctgccatcagtgcctaccatggatgcaacattaatactcggaagagaaatggagaagcaccagctaatatctaaattaactgaaaccaatgaccaacaaaaaaccatgatagtttccatcgttggacttggtggatctggcaaaactaccttggctaaacttgtttttaacgatggtaccactatagcaaagcattttaaagttagactatgggttcatgtgtcacaagagtttggttttgaaagtattgttgggaagctgtttgaagctattgcccatggcaagtctgaaagccataacttgcagcacatggtcagaagaatatcagacgagttgactgaaaaggtgttcttgcttgtactggatgatgtctggactaaggaccgaatggagttggaacaatttatggtacttgtgaggagcggtgcatctggaagcaggattttactaactactcgcaatagcgatgttgctgaagcggtggaatcttcatatctgatcaacctgccactcttgtctttgtctgacagctggcaactatttattcaaagctttggtacgacggtggaaggtttggacagagaattcctagatgttgggaatgccattgtaaacaaatgtggtggggtgccactagcaattaaagtaattgcaggtgtcctccatgacaagaaacggatacaagagtggcaggccattagagacagtaatctattcgatgctgagggcaaagagcgtagagtatctgcatgtttgaggttgagctatctgaacttgccctctcatctgaagcagtgcttcacgatttgttcactgtttcctaaaggtcacaagattgacaaggaacgtttgattgaccaatggattgctcacgacatgttcgctagtgcggatgctgttgattacttggagtacactggatatgagtgttttagttctcttgtgcaaatgtcttttttgtaggatgtggaagaaaattattatgggagagtgacatgcaagatgcacgatttggttcatgatctagcccactccatacttaaagatgaaatcttagtgacaaggttcccggaacgttgggaacgaggaacgggaac

SEQ ID NO: 220459 - DNA, 1794 bp, Zea Mays
gttttgagagagatagaggaaccattaaccaatggttgagtagcagttttgacaaccggagatatgggtccatggatgagctgaaggaacttgtgaagattttccatgaagctggtatcaaggttcttggcgacgctgttctaaatcataggtgtgctcagtttcagaacaacaatggtgtctggaatatatttggtggtcgtatgaactgggatgatcgagcagttgttgctgatgatccacatttccagggaagaggaaacaagagcagtggagataatttccatgcagcaccaaacattgatcactcccaagagtttgtgaggaatgatcttaaagaatggctttgctggatgagaaaggaagtcggctacgatggatggagacttgactttgttcgtggtttctggggtggatatgtcaaggactatttggaagcaagtgaaccatactttgcagtaggagagtactgggactccctcagttatacttatggtgaaatggactacaatcaggatgcccacaggcagagaattgttgattggataaatgctacaaatggaactgctggcgcatttgatgttaccactaaaggaatacttcatgcggcgcttgaaagatcagagtattggcgcctgtccgatgaaaaagggaaaccccctggagtattgggttggtggccttcaagagcagtcacatttatagagaatcatgatactggttctactcagggccattggaggttcccctatggtatggaactgcaaggatacgcctacatcctgacacaccctggcactcccgcagtcttctatgaccacatattttcacacttacaaccagagatcgctaaatttatttccattcgacaccgtcaaaagattcattgccgcagcaagatcaagatactaaaggcagagaggagtttatatgcggctgaaattgatgagaaggtaacaatgaaaatcggatcagaacattttgagccaagcggtccccagaactggattgttgctgctgagggtcaagattacaaaatctgggaagcgtcttcatagacttggcgggctgcgagtgccatataactgctcaaagactaaaaagctacaagaaagcataatgctaggagatggcgcctcagaatggtcagctggcgggagctgctgccgctgccgccatggagcagcaaaattcaacaacataagctatggaagcacttgccacggcgataggattatctaataggactactgttgaacattcgatatatccagaaccacccatcatttgcaggcacattggccattaaaatttagcttcgtcctctattttggagctatgtaaaagcatgcacaactctatttatgtgtgaaataaaatttgaatcttcatcatgggtcaagagatgtattttgccacccacaacatgacttcggtgattctacattcatagcatgcaaccgtaggcagaaatgatatattggacgaaccaaacttgaaaacatcgaaaagataacagtgaaggtgaagattccgagctttagacaatgtgtcaacggagtaatgtacttgatcacattgtcgtttgcagattcagttctcaacatctaaaaccagctagggagaccgcgaactttcaggatgacaccaagttcagagagagctgaggttcagaattatttcactcgacctcaagtattgatacggagacttgactgtgctaggactaggggggatcggcatcatcatcagggcttgaggaccagtgatagcccaaacttgggggtctgcaag

SEQ ID NO: 220460 - DNA, 3033 bp, Zea Mays
gtcgtggcccgagccggggccgcggagacgccggtggctggcactgacgaggacgctggagcggcgttctccgagacgttccccctgcgccgatgccaagctgtggaagggaaggcgtgggtgagggtggacgcagagccggactccgaaggcaagtgcaaggtcgttgttgggtgtaatgtggcggggaagtgggtactgcactggggtgtctcgtacgatgatgaacatggaagagaatgggatcagcctccttcagaaatgagaccacctggttcagttgcaatcaaggactatgcaattgaaacaccattggagattttgcccaattcagaaggacagcccctttatgaaatgcaaatcaaatttgataaagacattccaatcgccgctgtcaactttgttctaaaggaagaggaaacaggtgcatggtttcagcataagggcagggatttcagaatacccttaaatggatccttcaatgatggcggaaaacaagatattgatatctggccaggagatttggggcatgtattgaagaaatctgaaggctctagttctcagccacaaaacacttcacctgaggatacaggtttgagtggcaaacatatatcagggttctatgaggaataccccatccttaaatcagagtatgttcagaatcttgttactgtcactgtgaggagagacattgaagcgcataaaagacttgtggaatttgacactgatattcctggagaagttatcattcattggggagtttgcagagacaatactatgacatgggagatcccaccagaaccacatccaccaaaaacgaaaatattccgacacaaagctcttcaaactttgctgcagcaaaaagctgatggagcaggaaactcaatttcattctcacttgatgcagagtattcttgtctgttttttgtgctcaaacttgacgagtatacttggttgagaaatcttgagaatggatctgatttctatgtgccacttacaagagtggggcagtatggcagcactcaggatcctgacaaggctgaggcacagaaaatagaggataagtcttcacaggctgatggcttaatcagtgatataagaaatctggtggttggcctatcgtctagaagaggtcagaaagctaagaataaagttcttcaagaggacatcctacaagaaatcgaaagacttgcagcagaagcttatagcattttcaggagccccactattgattccgtagatgaatctgtacagctcgatgacacattaagcgcaaagccagcatgttctggcactggatctggttttgagatattgtgccaaggatttaactgggaatctcataaatcagggaaatggtatgttgagcttggcacaaaggccaaggagttgtcgtccttgggtttcaccattgtctggtcaccaccaccaactgattctgtgtcacctgaaggatacatgccaagggatctatataatctaaactcacgggaagaggaaacaagagcagtggagataatttccatgcagcaccaaacattgatcactcccaagagtttgtgaggaatgatcttaaagaatggctttgctggatgagaaaggaagtcggctacgatggatggagacttgactttgttcgtggtttctggggtggatatgtcaaggactatttggaagcaagtgaaccatactttgcagtaggagagtactgggactccctcagttatacttatggtgaaatggactacaatcaggatgcccacaggcagagaattgttgattggataaatgctacaaatggaactgctggcgcatttgatgttaccactaaaggaatacttcatgcggcgcttgaaagatcagagtattggcgcctgtccgatgaaaaagggaaaccccctggagtattgggttggtggccttcaagagcagtcacatttatagagaatcatgatactggttctactcagggccattggaggttcccctatggtatggaactgcaaggatacgcctacatcctgacacaccctggcactcccgcagtcttctatgaccacatattttcacacttacaaccagagatcgctaaatttatttccattcgacaccgtcaaaagattcattgccgcagcaagatcaagatactaaaggcagagaggagtttatatgcggctgaaattgatgagaaggtaacaatgaaaatcggatcagaacattttgagccaagcggtccccagaactggattgttgctgctgagggtcaagattacaaaatctgggaagcgtcttcatagacttggcgggctgcgagtgccatataactgctcaaagactaaaaagctacaagaaagcataatgctaggagatggcgcctcagaatggtcagctggcgggagctgctgccgctgccgccatggagcagcaaaattcaacaacataagctatggaagcacttgccacggcgataggattatctaataggactactgttgaacattcgatatatccagaaccacccatcatttgcaggcacattggccattaaaatttagcttcgtcctctattttggagctatgtaaaagcatgcacaactctatttatgtgtgaaataaaatttgaatcttcatcatgggtcaagagatgtattttgccacccacaacatgacttcggtgattctacattcatagcatgcaaccgtaggcagaaatgatatattggacgaaccaaacttgaaaacatcgaaaagataacagtgaaggtgaagattccgagctttagacaatgtgtcaacggagtaatgtacttgatcacattgtcgtttgcagattcagttctcaacatctaaaaccagctagggagaccgcgaactttcaggatgacaccaagttcagagagagctgaggttcagaattatttcactcgacctcaagtattgatacggagacttgactgtgctaggactaggggggatcggcatcatcatcagggcttgaggaccagtgatagcccaaacttgggggtctgcaag

SEQ ID NO: 220461 - DNA, 3223 bp, Zea Mays
gtcgtggcccgagccggggccgcggagacgccggtggctggcactgacgaggacgctggagcggcgttctccgagacgttccccctgcgccgatgccaagctgtggaagggaaggcgtgggtgagggtggacgcagagccggactccgaaggcaagtgcaaggtcgttgttgggtgtaatgtggcggggaagtgggtactgcactggggtgtctcgtacgatgatgaacatggaagagaatgggatcagcctccttcagaaatgagaccacctggttcagttgcaatcaaggactatgcaattgaaacaccattggagattttgcccaattcagaaggacagcccctttatgaaatgcaaatcaaatttgataaagacattccaatcgccgctgtcaactttgttctaaaggaagaggaaacaggtgcatggtttcagcataagggcagggatttcagaatacccttaaatggatccttcaatgatggcggaaaacaagatattgatatctggccaggagatttggggcatgtattgaagaaatctgaaggctctagttctcagccacaaaacacttcacctgaggatacaggtttgagtggcaaacatatatcagggttctatgaggaataccccatccttaaatcagagtatgttcagaatcttgttactgtcactgtgaggagagacattgaagcgcataaaagacttgtggaatttgacactgatattcctggagaagttatcattcattggggagtttgcagagacaatactatgacatgggagatcccaccagaaccacatccaccaaaaacgaaaatattccgacacaaagctcttcaaactttgctgcagcaaaaagctgatggagcaggaaactcaatttcattctcacttgatgcagagtattcttgtctgttttttgtgctcaaacttgacgagtatacttggttgagaaatcttgagaatggatctgatttctatgtgccacttacaagagtggggcagtatggcagcactcaggatcctgacaaggctgaggcacagaaaatagaggataagtcttcacaggctgatggcttaatcagtgatataagaaatctggtggttggcctatcgtctagaagaggtcagaaagctaagaataaagttcttcaagaggacatcctacaagaaatcgaaagacttgcagcagaagcttatagcattttcaggagccccactattgattccgtagatgaatctgtacagctcgatgacacattaagcgcaaagccagcatgttctggcactggatctggttttgagatattgtgccaaggatttaactgggaatctcataaatcagggaaatggtatgttgagcttggcacaaaggccaaggagttgtcgtccttgggtttcaccattgtctggtcaccaccaccaactgattctgtgtcacctgaaggatacatgccaagggatctatataatctaaactcacgatatgggtccatggatgagctgaaggaacttgtgaagattttccatgaagctggtatcaaggttcttggcgacgctgttctaaatcataggtgtgctcagtttcagaacaacaatggtgtctggaatatatttggtggtcgtatgaactgggatgatcgagcagttgttgctgatgatccacatttccagggaagaggaaacaagagcagtggagataatttccatgcagcaccaaacattgatcactcccaagagtttgtgaggaatgatcttaaagaatggctttgctggatgaggaagtcggctacgatggatggagacttgactttgttcgtggtttctggggtggatatgtcaaggactatttggaagcaagtgaaccatactttgcagtaggagagtactgggactccctcagttatacttatggtgaaatggactacaatcaggatgcccacaggcagagaattgttgattggataaatgctacaaatggaactgctggcgcatttgatgttaccactaaaggaatacttcatgcggcgcttgaaagatcagagtattggcgcctgtccgatgaaaaagggaaaccccctggagtattgggttggtggccttcaagagcagtcacatttatagagaatcatgatactggttctactcagggccattggaggttcccctatggtatggaactgcaaggatacgcctacatcctgacacaccctggcactcccgcagtcttctatgaccacatattttcacacttacaaccagagatcgctaaatttatttccattcgacaccgtcaaaagattcattgccgcagcaagatcaagatactaaaggcagagaggagtttatatgcggctgaaattgatgagaaggtaacaatgaaaatcggatcagaacattttgagccaagcggtccccagaactggattgttgctgctgagggtcaagattacaaaatctgggaagcgtcttcatagacttggcgggctgcgagtgccatataactgctcaaagactaaaaaggaagctacaagaaagcataatgctaggagatggcgcctcagaatggtcagctggcgggagctgctgccgctgccgccatggagcagcaaaattcaacaacataagctatggaagcacttgccacggcgataggattatctaataggactactgttgaacattcgatatatccagaaccacccatcatttgcaggcacattggccattaaaatttagcttcgtcctctattttggagctatgtaaaagcatgcacaactctatttatgtgtgaaataaaatttgaatcttcatcatgggtcaagagatgtattttgccacccacaacatgacttcggtgattctacattcatagcatgcaaccgtaggcagaaatgatatattggacgaaccaaacttgaaaacatcgaaaagataacagtgaaggtgaagattccgagctttagacaatgtgtcaacggagtaatgtacttgatcacattgtcgtttgcagattcagttctcaacatctaaaaccagctagggagaccgcgaactttcaggatgacaccaagttcagagagagctgaggttcagaattatttcactcgacctcaagtattgatacggagacttgactgtgctaggactaggggggatcggcatcatcatcagggcttgaggaccagtgatagcccaaacttgggggtctgcaag

SEQ ID NO: 220462 - DNA, 3231 bp, Zea Mays
caggtgtccgccgcgcggacgcggacgcggacgcgggccgggcggtgccgtgccgcgcagcacgggctcgtgaggctcggcggccgcgtcgtggcccgagccggggccgcggagacgccggtggctggcactgacgaggacgctggagcggcgttctccgagacgttccccctgcgccgatgccaagctgtggaagggaaggcgtgggtgagggtggacgcagagccggactccgaaggcaagtgcaaggtcgttgttgggtgtaatgtggcggggaagtgggtactgcactggggtgtctcgtacgatgatgaacatggaagagaatgggatcagcctccttcagaaatgagaccacctggttcagttgcaatcaaggactatgcaattgaaacaccattggagattttgcccaattcagaaggacagcccctttatgaaatgcaaatcaaatttgataaagacattccaatcgccgctgtcaactttgttctaaaggaagaggaaacaggtgcatggtttcagcataagggcagggatttcagaatacccttaaatggatccttcaatgatggcggaaaacaagatattgatatctggccaggagatttggggcatgtattgaagaaatctgaaggctctagttctcagccacaaaacacttcacctgaggatacaggtttgagtggcaaacatatatcagggttctatgaggaataccccatccttaaatcagagtatgttcagaatcttgttactgtcactgtgaggagagacattgaagcgcataaaagacttgtggaatttgacactgatattcctggagaagttatcattcattggggagtttgcagagacaatactatgacatgggagatcccaccagaaccacatccaccaaaaacgaaaatattccgacacaaagctcttcaaactttgctgcagcaaaaagctgatggagcaggaaactcaatttcattctcacttgatgcagagtattcttgtctgttttttgtgctcaaacttgacgagtatacttggttgagaaatcttgagaatggatctgatttctatgtgccacttacaagagtggggcagtatggcagcactcaggatcctgacaaggctgaggcacagaaaatagaggataagtcttcacaggctgatggcttaatcagtgatataagaaatctggtggttggcctatcgtctagaagaggtcagaaagctaagaataaagttcttcaagaggacatcctacaagaaatcgaaagacttgcagcagaagcttatagcattttcaggagccccactattgattccgtagatgaatctgtacagctcgatgacacattaagcgcaaagccagcatgttctggcactggatctggttttgagatattgtgccaaggatttaactgggaatctcataaatcagggaaatggtatgttgagcttggcacaaaggccaaggagttgtcgtccttgggtttcaccattgtctggtcaccaccaccaactgattctgtgtcacctgaaggatacatgccaagggatctatataatctaaactcacgatatgggtccatggatgagctgaaggaacttgtgaagattttccatgaagctggtatcaaggttcttggcgacgctgttctaaatcataggtgtgctcagtttcagaacaacaatggtgtctggaatatatttggtggtcgtatgaactgggatgatcgagcagttgttgctgatgatccacatttccagggaagaggaaacaagagcagtggagataatttccatgcagcaccaaacattgatcactcccaagagtttgtgaggaatgatcttaaagaatggctttgctggatgagaaaggaagtcggctacgatggatggagacttgactttgttcgtggtttctggggtggatatgtcaaggactatttggaagcaagtgaaccatactttgcagtaggagagtactgggactccctcagttatacttatggtgaaatggactacaatcaggatgcccacaggcagagaattgttgattggataaatgctacaaatggaactgctggcgcatttgatgttaccactaaaggaatacttcatgcggcgcttgaaagatcagagtattggcgcctgtccgatgaaaaagggaaaccccctggagtattgggttggtggccttcaagagcagtcacatttatagagaatcatgatactggttctactcagggccattggaggttcccctatggtatggaactgcaaggatacgcctacatcctgacacaccctggcactcccgcagtcttctatgaccacatattttcacacttacaaccagagatcgctaaatttatttccattcgacaccgtcaaaagattcattgccgcagcaagatcaagatactaaaggcagagaggagtttatatgcggctgaaattgatgagaaggttgagatccagatcccttcacatttgattaaatctgaaattccttgagcaaactgccttttccaaaggaagctacaagaaagcataatgctaggagatggcgcctcagaatggtcagctggcgggagctgctgccgctgccgccatggagcagcaaaattcaacaacataagctatggaagcacttgccacggcgataggattatctaataggactactgttgaacattcgatatatccagaaccacccatcatttgcaggcacattggccattaaaatttagcttcgtcctctattttggagctatgtaaaagcatgcacaactctatttatgtgtgaaataaaatttgaatcttcatcatgggtcaagagatgtattttgccacccacaacatgacttcggtgattctacattcatagcatgcaaccgtaggcagaaatgatatattggacgaaccaaacttgaaaacatcgaaaagataacagtgaaggtgaagattccgagctttagacaatgtgtcaacggagtaatgtacttgatcacattgtcgtttgcagattcagttctcaacatctaaaaccagctagggagaccgcgaactttcaggatgacaccaagttcagagagagctgaggttcagaattatttcactcgacctcaagtattgatacggagacttgactgtgctaggactaggggggatcggcatcatcatcagggcttgaggaccagtgatagcccaaacttgggggtctgcaag

SEQ ID NO: 220463 - DNA, 3117 bp, Zea Mays
atttcttatttccgactcatctcgcctcgcttttcccccttcttctccctcttcctcccgttctagttttctcattcgcttcggctccttcacacaatcacacgcacacaccagaggtggaagggaaggcgtgggtgagggtggacgcagagccggactccgaaggcaagtgcaaggtcgttgttgggtgtaatgtggcggggaagtgggtactgcactggggtgtctcgtacgatgatgaacatggaagagaatgggatcagcctccttcagaaatgagaccacctggttcagttgcaatcaaggaagaggaaacaggtgcatggtttcagcataagggcagggatttcagaatacccttaaatggatccttcaatgatggcggaaaacaagatattgatatctggccaggagatttggggcatgtattgaagaaatctgaaggctctagttctcagccacaaaacacttcacctgaggatacaggtttgagtggcaaacatatatcagggttctatgaggaataccccatccttaaatcagagtatgttcagaatcttgttactgtcactgtgaggagagacattgaagcgcataaaagacttgtggaatttgacactgatattcctggagaagttatcattcattggggagtttgcagagacaatactatgacatgggagatcccaccagaaccacatccaccaaaaacgaaaatattccgacacaaagctcttcaaactttgctgcagcaaaaagctgatggagcaggaaactcaatttcattctcacttgatgcagagtattcttgtctgttttttgtgctcaaacttgacgagtatacttggttgagaaatcttgagaatggatctgatttctatgtgccacttacaagagtggggcagtatggcagcactcaggatcctgacaaggctgaggcacagaaaatagaggataagtcttcacaggctgatggcttaatcagtgatataagaaatctggtggttggcctatcgtctagaagaggtcagaaagctaagaataaagttcttcaagaggacatcctacaagaaatcgaaagacttgcagcagaagcttatagcattttcaggagccccactattgattccgtagatgaatctgtacagctcgatgacacattaagcgcaaagccagcatgttctggcactggatctggttttgagatattgtgccaaggatttaactgggaatctcataaatcagggaaatggtatgttgagcttggcacaaaggccaaggagttgtcgtccttgggtttcaccattgtctggtcaccaccaccaactgattctgtgtcacctgaaggatacatgccaagggatctatataatctaaactcacgatatgggtccatggatgagctgaaggaacttgtgaagattttccatgaagctggtatcaaggttcttggcgacgctgttctaaatcataggtgtgctcagtttcagaacaacaatggtgtctggaatatatttggtggtcgtatgaactgggatgatcgagcagttgttgctgatgatccacatttccagggaagaggaaacaagagcagtggagataatttccatgcagcaccaaacattgatcactcccaagagtttgtgaggaatgatcttaaagaatggctttgctggatgagaaaggaagtcggctacgatggatggagacttgactttgttcgtggtttctggggtggatatgtcaaggactatttggaagcaagtgaaccatactttgcagtaggagagtactgggactccctcagttatacttatggtgaaatggactacaatcaggatgcccacaggcagagaattgttgattggataaatgctacaaatggaactgctggcgcatttgatgttaccactaaaggaatacttcatgcggcgcttgaaagatcagagtattggcgcctgtccgatgaaaaagggaaaccccctggagtattgggttggtggccttcaagagcagtcacatttatagagaatcatgatactggttctactcagggccattggaggttcccctatggtatggaactgcaaggatacgcctacatcctgacacaccctggcactcccgcagtcttctatgaccacatattttcacacttacaaccagagatcgctaaatttatttccattcgacaccgtcaaaagattcattgccgcagcaagatcaagatactaaaggcagagaggagtttatatgcggctgaaattgatgagaaggtaacaatgaaaatcggatcagaacattttgagccaagcggtccccagaactggattgttgctgctgagggtcaagattacaaaatctgggaagcgtcttcatagacttggcgggctgcgagtgccatataactgctcaaagactaaaaagctacaagaaagcataatgctaggagatggcgcctcagaatggtcagctggcgggagctgctgccgctgccgccatggagcagcaaaattcaacaacataagctatggaagcacttgccacggcgataggattatctaataggactactgttgaacattcgatatatccagaaccacccatcatttgcaggcacattggccattaaaatttagcttcgtcctctattttggagctatgtaaaagcatgcacaactctatttatgtgtgaaataaaatttgaatcttcatcatgggtcaagagatgtattttgccacccacaacatgacttcggtgattctacattcatagcatgcaaccgtaggcagaaatgatatattggacgaaccaaacttgaaaacatcgaaaagataacagtgaaggtgaagattccgagctttagacaatgtgtcaacggagtaatgtacttgatcacattgtcgtttgcagattcagttctcaacatctaaaaccagctagggagaccgcgaactttcaggatgacaccaagttcagagagagctgaggttcagaattatttcactcgacctcaagtattgatacggagacttgactgtgctaggactaggggggatcggcatcatcatcagggcttgaggaccagtgatagcccaaacttgggggtctgcaag

SEQ ID NO: 220464 - DNA, 2606 bp, Zea Mays
tggaatgacatgggtgtttctttattacagtgtagtggagtatatatacaagagtttccaaggggtgtgtcccttggaaaataactatcacatagatggattagatcatatgtacaaaatattttgtaacagcaaacatgatccattaggtggacacgggcaactccacctgtcgctgacgatgatattatatatttccagagatgaggactccggcgcgtccctctcccagatcgcgctcgctcctggtacgtggttggcaaataagagcccgaacaaagcagcgcacgcctccgcctccctttcctccctcttctttttgttgagaagataataatccgccgacatctccggacgagcaggagcaggtttatcgtgctcgcaactcgcaaacgcacggtccgcctcgctcgccggccgcgcgcgtcactgccagactgcctcactgcgccgtgttttttgccccgggtcggccctagtaaaataaggagcactagacgtaagaaaacctgctaataaatttttatacgattttaaaacacttttacttattttagagctctactatagagtgggtccgagatgtggctgcacacaagggcacgggcaggcaccgcacagtcccgtgtgccggtggtccgcatatgcgtcgacgttcccgagagttctagatgccgctgaacccgtccgttcctttctcatgccttgccaatgccaccacagggccacaggccgccccgcgagaatctagaggggacgacgagagccacggccccgcgcgagtcgcgacgctacctagggcccggtggagataataaacgagataagcgacggcgaccggccgcggcccacccagaccagctgccatacggggcccgccacgcccgacccacgccgcgcgtctcttttagcggctccccagccgccactgtggcgccacgcggcctgacgctttgccgccgtccacacgtttgcctggaggaggctgtgtgggacccagtcgttccccgccacgtgggcccgtgcgcggccacgacccccgcccgccgcggcccggcaagagacgtttcggtagactctcccttgccgcctccgcctccacctcctacaggctacaggcctacagctgcgacctgcgagcgacggctataaaaccttcgcctccactcccagccgcgaagccctactcaacttctccttttcccccggcgattattccggccactgaccttcgttgcgtgccgctcgagaacccggttcgagaatcgacggcgcgcggctgcatgagaggggcgctagttgttgtcatgcacgggctaaacgagcacagtgggaggtatgaccatttagcgaggcgattgaatggcatcggcatcaaggtgtacgggatggactggactggtcatggtggaagtgatggtctccatggatatgtgcaatctcttgatcatgctgtcagtgatttgaaaatgtacctcaagaaagtgttagctgagaaccctggtcttccatgcttctgcttcggtcactcgactggtggaggtatcattctgaaggctgcacttgatccagaggtagaaactctccttagaggtattgtcttgacatcaccagctgtccgtgttcagcctacacacccaatcatagcggtcatggcaccgatttttgccctcatcgcgccgaggtatcagttcacggcgtcccacaggaacggcccgccggtgtcgcgcgaccccgaggccctgcgggccaaatacacggacccgctcgtgttcacgggcgccatccgcgtgaggacgggctacgagatcctccgcctgacgtcgtacctgcagcagcacctgcaccggatcgcggtgccgctgctggtgctgcacggcgccgacgacctggtgaccgaccccaggggctcgcgggcgctgtacgagcgggcctcgtccgcggacaagtccctcaagctttacgacgggctgctgcacgacctcctgatcgagcccgagaaggacagggtgatggacgacatcgtcgcgtggctgagccccagggtctgacgccgccggcgcgttgcggtgctggccgtaggacgcgagcggcttttcgatcatctgcaggccaaggacgcctcgcctccggatggtgggtgatgacgcggtctggtctggtaggctgcggaccgagggagagcgggtgtgccttctcgcccccttggtgtgctgaactgctgagtgctgatacgatacgaggagcaggacaggagtacggagaactactactacctacggctatgggcgatggctttactcgcgcctcccggtgtgtcccgagattttttttcggggacacgtacgaattatgtaacggagttcgtttcgccgtgccacacgcacgagcggtgtccgatacacctatagaaaatgactttccatattgcgagttgtgtgatgtattcacacaattgtgaatcagagttgcaacttgcaacggattcttatcttctgctcttctcacagtacctcctagcaccgtaggcattggtttatagtgactaattttttagtccctctattttagttcctaatggcaaatacggaaactataagtttgac

SEQ ID NO: 220465 - DNA, 2680 bp, Zea Mays
ctggctcaggcgctgctaccgttcgagacaagtctcgccgcccacaccgccactaggaaaccttcttctctcctcgccgcccgcggccggccccttctccagaaccttctagaacccatcggggctccgggatggagcccagaagacgagagcgcagggtcatcgccatcgccggtgcggcagcgctcgttgccgtgggcctcaatatcgccttctccgccgtcgtcgcccaccgtcggaggaagcgacgagagcttccagggtttactgctcaagtcaacctatcagcagctgcgattaaaagaacgaccgaccgtatcatctctaagtcaagggaaacttatgattcagtggctgcagtgcccctagataaagtcagttttgctaatgtcattgcaccattggcagaattagatgcgctgcaattccctctggttcaagcttgtgttcttcctaggatggtatcaccatctgaggatgttcgcaaggcaagtgctgaagcagagaagctattggattcccactttgtgctttgcaggcagcgtgaagatgtttatcgtgtcataaaagcatttacagtgaaaggcgagagaataggtgaaagagtttgagcgcaatggagtaaaactatctcaaagcaagagaaaagaaatggagaaattgaaatctcatatagatgcattaaacttgaagtatctccaaaatttgaatgatttcaccaaattccttcttttaggtgaagatgaactagctggaatgccctttgagttccttaaggatctggaaaaggctgatgggaagtttaaggttccgttgactagttaccatgttactccagttcttgagcactgcaaggttggctctaccaggaagcagattgctgttgcttatggacaaaaaggtgggaaggataatgtagccatcctagaaaatttggtccagctaagacacaagtttgctaaattgctggggtacaccaactatgctgattttgctattgagcccagaatgccaaagacttcgaggaagatcttagagtttttggaagagatgtctgaacaattaagtgatgtggctaatagagagctcaacatactcaaagacctcaagatcaaggaggaaggaaatgctcagtttggaatggaagatttgttgtactacatcaaaagagctgaagaattcaaggttgatcttgacgttggtgaaattaaacaatacttccctgttggcctggtcatatctggaatgctgaagatatttcaggatctatttgcactacgattcgacgaaattaaggatgttgatgtttggcatgatacagttcgtgtgttttctgtttgggatgcaagttcaagtgatcttttgggttacttttttcttgatatcttttccagggaaggaaagtatgcccacacttgtgttgtgacccttcagaatggatgcttatgttctaatggtacacgtaaggttccggctgctgtgatattatctcagtgtccaaaagagtttgatggtaattcagcattgctgcggttccctgaagttgtgaggctattccatgaatttagccatgtggtccatcacgtatccaacagagccaccttttcaagattttcaggccttcgactggagggtgactttgctgaaattccaagcctgctactcgagaattggtgctatgagagtatttctctgaaaatgatgtccggcttccatcaggacattacgaaatccataagtagtgaagcttgccaatctctgaaaagaaggcgtgatttgtttgctggcctgaaaatgaaacaagagatacttttgtgccttgttgatcagataatacattcaagtgagaatgtggacattgatgacttaatcaaggatcttcaccccaaggtaatgttgggtatacctttattggaagggaccagtccagcttcaagttttcctcgtattgcctttggctatgatgctgtgtgctacagttacatatggagtgaggtgtttgctgctgatctttttgtatcaaaatttaaagatgacttgctcaatcagcatgctggattgcggttcagaaataaggtgttggctccaggaggctcaaaagatcccctggagataataacggactacctaggaagagaaccatcactccaaccttttattcagagcagaacaaggaacagtctgtgagggatcatttatgatgtaaccgttgagttttttctttcttttttcctttttgaatttagctatagaaggcctgctgactgtctcgagttatttttttcgtaacggactgacaagtctgatctttgtgccattctgttttccgacgtcatttgtttgaccatttagttaagctggaatacaaaagatgtcgctagattctgctgtgttttcctaaccttagcatgctttcaagctcccatcaaaacgtctgagcacgtgaatcaagattgcacagaaagttagaaataagaacttcaagtctgttggtgtaagcacgaagcacgtctttttacaggttttgcgtgaagacttcggaaaattaaagttgatttctggatgaaaacttgtcatacaaacaattcactttcactaaacatttctgaagcttgcaaaacaaattaccagagttcagtgcacaccgaccatccaacaaaaagatgcacgctgatgcaag

SEQ ID NO: 220466 - DNA, 2746 bp, Zea Mays
ctggctcaggcgctgctaccgttcgagacaagtctcgccgcccacaccgccactaggaaaccttcttctctcctcgccgcccgcggccggccccttctccagaaccttctagaacccatcggggctccgggatggagcccagaagacgagagcgcagggtcatcgccatcgccggtgcggcagcgctcgttgccgtgggcctcaatatcgccttctccgccgtcgtcgcccaccgtcggaggaagcgacgagagcttccagggtttactgctcaagtcaacctatcagcagctgcgattaaaagaacgaccgaccgtatcatctctaagtcaagggaaacttatgattcagtggctgcagtgcccctagataaagtcagttttgctaatgtcattgcaccattggcagaattagatgcgctgcaattccctctggttcaagcttgtgttcttcctaggatggtatcaccatctgaggatgttcgcaaggcaagtgctgaagcagagaagctattggattcccactttgtgctttgcaggcagcgtgaagatgtttatcgtgtcataaaagcatttacagtgaaaggcgagagaataggtcctgaagcaacaagatttcttcagtttttggtgcagaattctttcgctacatataaatttgatcgtgaaagagtttgagcgcaatggagtaaaactatctcaaagcaagagaaaagaaatggagaaattgaaatctcatatagatgcattaaacttgaagtatctccaaaatttgaatgatttcaccaaattccttcttttaggtgaagatgaactagctggaatgccctttgagttccttaaggatctggaaaaggctgatgggaagtttaaggttccgttgactagttaccatgttactccagttcttgagcactgcaaggttggctctaccaggaagcagattgctgttgcttatggacaaaaaggtgggaaggataatgtagccatcctagaaaatttggtccagctaagacacaagtttgctaaattgctggggtacaccaactatgctgattttgctattgagcccagaatgccaaagacttcgaggaagatcttagagtttttggaagagatgtctgaacaattaagtgatgtggctaatagagagctcaacatactcaaagacctcaagatcaaggaggaaggaaatgctcagtttggaatggaagatttgttgtactacatcaaaagagctgaagaattcaaggttgatcttgacgttggtgaaattaaacaatacttccctgttggcctggtcatatctggaatgctgaagatatttcaggatctatttgcactacgattcgacgaaattaaggatgttgatgtttggcatgatacagttcgtgtgttttctgtttgggatgcaagttcaagtgatcttttgggttacttttttcttgatatcttttccagggaaggaaagtatgcccacacttgtgttgtgacccttcagaatggatgcttatgttctaatggtacacgtaaggttccggctgctgtgatattatctcagtgtccaaaagagtttgatggtaattcagcattgctgcggttccctgaagttgtgaggctattccatgaatttagccatgtggtccatcacgtatccaacagagccaccttttcaagattttcaggccttcgactggagggtgactttgctgaaattccaagcctgctactcgagaattggtgctatgagagtatttctctgaaaatgatgtccggcttccatcaggacattacgaaatccataagtagtgaagcttgccaatctctgaaaagaaggcgtgatttgtttgctggcctgaaaatgaaacaagagatacttttgtgccttgttgatcagataatacattcaagtgagaatgtggacattgatgacttaatcaaggatcttcaccccaaggtaatgttgggtatacctttattggaagggaccagtccagcttcaagttttcctcgtattgcctttggctatgatgctgtgtgctacagttacatatggagtgaggtgtttgctgctgatctttttgtatcaaaatttaaagatgacttgctcaatcagcatgctggattgcggttcagaaataaggtgttggctccaggaggctcaaaagatcccctggagataataacggactacctaggaagagaaccatcactccaaccttttattcagagcagaacaaggaacagtctgtgagggatcatttatgatgtaaccgttgagttttttctttcttttttcctttttgaatttagctatagaaggcctgctgactgtctcgagttatttttttcgtaacggactgacaagtctgatctttgtgccattctgttttccgacgtcatttgtttgaccatttagttaagctggaatacaaaagatgtcgctagattctgctgtgttttcctaaccttagcatgctttcaagctcccatcaaaacgtctgagcacgtgaatcaagattgcacagaaagttagaaataagaacttcaagtctgttggtgtaagcacgaagcacgtctttttacaggttttgcgtgaagacttcggaaaattaaagttgatttctggatgaaaacttgtcatacaaacaattcactttcactaaacatttctgaagcttgcaaaacaaattaccagagttcagtgcacaccgaccatccaacaaaaagatgcacgctgatgcaag

SEQ ID NO: 220467 - DNA, 2952 bp, Zea Mays
ctggctcaggcgctgctaccgttcgagacaagtctcgccgcccacaccgccactaggaaaccttcttctctcctcgccgcccgcggccggccccttctccagaaccttctagaacccatcggggctccgggatggagcccagaagacgagagcgcagggtcatcgccatcgccggtgcggcagcgctcgttgccgtgggcctcaatatcgccttctccgccgtcgtcgcccaccgtcggaggaagcgacgagagcttccagggtttactgctcaagtcaacctatcagcagctgcgattaaaagaacgaccgaccgtatcatctctaagtcaagggaaacttatgattcagtggctgcagtgcccctagataaagtcagttttgctaatgtcattgcaccattggcagaattagatgcgctgcaattccctctggttcaagcttgtgttcttcctaggatggtatcaccatctgaggatgttcgcaaggcaagtgctgaagcagagaagctattggattcccactttgtgctttgcaggcagcgtgaagatgtttatcgtgtcataaaagcatttacagtgaaaggcgagagaataggtcctgaagcaacaagatttcttcagtttttggtgcagaattctttcgctacatataaatttgatcgtaatgttctgattctgaccgacaactgaatgtttatacatgtgatgatttattgtcaatgctttaaccctgaatatcatttttccataactgttgtatacttgtattcttatctatttcaatatgaacatacctaatggctaatgtaggtataatctggctcctgagtggtctcgtaaggttctcatactgcatgttcttttacggtgaaagagtttgagcgcaatggagtaaaactatctcaaagcaagagaaaagaaatggagaaattgaaatctcatatagatgcattaaacttgaagtatctccaaaatttgaatgatttcaccaaattccttcttttaggtgaagatgaactagctggaatgccctttgagttccttaaggatctggaaaaggctgatgggaagtttaaggttccgttgactagttaccatgttactccagttcttgagcactgcaaggttggctctaccaggaagcagattgctgttgcttatggacaaaaaggtgggaaggataatgtagccatcctagaaaatttggtccagctaagacacaagtttgctaaattgctggggtacaccaactatgctgattttgctattgagcccagaatgccaaagacttcgaggaagatcttagagtttttggaagagatgtctgaacaattaagtgatgtggctaatagagagctcaacatactcaaagacctcaagatcaaggaggaaggaaatgctcagtttggaatggaagatttgttgtactacatcaaaagagctgaagaattcaaggttgatcttgacgttggtgaaattaaacaatacttccctgttggcctggtcatatctggaatgctgaagatatttcaggatctatttgcactacgattcgacgaaattaaggatgttgatgtttggcatgatacagttcgtgtgttttctgtttgggatgcaagttcaagtgatcttttgggttacttttttcttgatatcttttccagggaaggaaagtatgcccacacttgtgttgtgacccttcagaatggatgcttatgttctaatggtacacgtaaggttccggctgctgtgatattatctcagtgtccaaaagagtttgatggtaattcagcattgctgcggttccctgaagttgtgaggctattccatgaatttagccatgtggtccatcacgtatccaacagagccaccttttcaagattttcaggccttcgactggagggtgactttgctgaaattccaagcctgctactcgagaattggtgctatgagagtatttctctgaaaatgatgtccggcttccatcaggacattacgaaatccataagtagtgaagcttgccaatctctgaaaagaaggcgtgatttgtttgctggcctgaaaatgaaacaagagatacttttgtgccttgttgatcagataatacattcaagtgagaatgtggacattgatgacttaatcaaggatcttcaccccaaggtaatgttgggtatacctttattggaagggaccagtccagcttcaagttttcctcgtattgcctttggctatgatgctgtgtgctacagttacatatggagtgaggtgtttgctgctgatctttttgtatcaaaatttaaagatgacttgctcaatcagcatgctggattgcggttcagaaataaggtgttggctccaggaggctcaaaagatcccctggagataataacggactacctaggaagagaaccatcactccaaccttttattcagagcagaacaaggaacagtctgtgagggatcatttatgatgtaaccgttgagttttttctttcttttttcctttttgaatttagctatagaaggcctgctgactgtctcgagttatttttttcgtaacggactgacaagtctgatctttgtgccattctgttttccgacgtcatttgtttgaccatttagttaagctggaatacaaaagatgtcgctagattctgctgtgttttcctaaccttagcatgctttcaagctcccatcaaaacgtctgagcacgtgaatcaagattgcacagaaagttagaaataagaacttcaagtctgttggtgtaagcacgaagcacgtctttttacaggttttgcgtgaagacttcggaaaattaaagttgatttctggatgaaaacttgtcatacaaacaattcactttcactaaacatttctgaagcttgcaaaacaaattaccagagttcagtgcacaccgaccatccaacaaaaagatgcacgctgatgcaag

SEQ ID NO: 220468 - DNA, 2805 bp, Zea Mays
ctggctcaggcgctgctaccgttcgagacaagtctcgccgcccacaccgccactaggaaaccttcttctctcctcgccgcccgcggccggccccttctccagaaccttctagaacccatcggggctccgggatggagcccagaagacgagagcgcagggtcatcgccatcgccggtgcggcagcgctcgttgccgtgggcctcaatatcgccttctccgccgtcgtcgcccaccgtcggaggaagcgacgagagcttccagggtttactgctcaagtcaacctatcagcagctgcgattaaaagaacgaccgaccgtatcatctctaagtcaagggaaacttatgattcagtggctgcagtgcccctagataaagtcagttttgctaatgtcattgcaccattggcagaattagatgcgctgcaattccctctggttcaagcttgtgttcttcctaggatggtatcaccatctgaggatgttcgcaaggcaagtgctgaagcagagaagctattggattcccactttgtgctttgcaggcagcgtgaagatgtttatcgtgtcataaaagcatttacagtgaaaggcgagagaataggtcctgaagcaacaagatttcttcagtttttggtgaaagagtttgagcgcaatggagtaaaactatctcaaagcaagagaaaagaaatggagaaattgaaatctcatatagatgcattaaacttgaagtatctccaaaatttgaatgatttcaccaaattccttcttttaggtgaagatgaactagctggaatgccctttgagttccttaaggatctggaaaaggctgatgggaagtttaaggttccgttgactagttaccatgttactccagttcttgagcactgcaaggttggctctaccaggaagcagattgctgttgcttatggacaaaaaggtgggaaggataatgtagccatcctagaaaatttggtccagctaagacacaagtttgctaaattgctggggtacaccaactatgctgattttgctattgagcccagaatgccaaagacttcgaggaagatcttagagtttttggaagagatgtctgaacaattaagtgatgtggctaatagagagctcaacatactcaaagacctcaagatcaaggaggaaggaaatgctcagtttggaatggaagatttgttgtactacatcaaaagagctgaagaattcaaggttgatcttgacgttggtgaaattaaacaatacttccctgttggcctggtcatatctggaatgctgaagatatttcaggatctatttgcactacgattcgacgaaattaaggatgttgatgtttggcatgatacagttcgtgtgttttctgtttgggatgcaagttcaagtgatcttttgggttacttttttcttgatatcttttccagggaaggaaagtatgcccacacttgtgttgtgacccttcagaatggatgcttatgttctaatggtacacgtaaggttccggctgctgtgatattatctcagtgtccaaaagagtttgatggtaattcagcattgctgcggttccctgaagttgtgaggctattccatgaatttagccatgtggtccatcacgtatccaacagagccaccttttcaagattttcaggccttcgactggagggtgactttgctgaaattccaagcctgctactcgagaattggtgctatgagagtatttctctgaaaatgatgtccggcttccatcaggacattacgaaatccataagtagtgaagcttgccaatctctgaaaagaaggcgtgatttgtttgctggcctgaaaatgaaacaagagatacttttgtgtgagtcattttgctacctatcaaatgaggtggagtgagattattggtccttaaatgttatccagctcagaaactccgacaaaaaataatgaggccttgttgatcagataatacattcaagtgagaatgtggacattgatgacttaatcaaggatcttcaccccaaggtaatgttgggtatacctttattggaagggaccagtccagcttcaagttttcctcgtattgcctttggctatgatgctgtgtgctacagttacatatggagtgaggtgtttgctgctgatctttttgtatcaaaatttaaagatgacttgctcaatcagcatgctggattgcggttcagaaataaggtgttggctccaggaggctcaaaagatcccctggagataataacggactacctaggaagagaaccatcactccaaccttttattcagagcagaacaaggaacagtctgtgagggatcatttatgatgtaaccgttgagttttttctttcttttttcctttttgaatttagctatagaaggcctgctgactgtctcgagttatttttttcgtaacggactgacaagtctgatctttgtgccattctgttttccgacgtcatttgtttgaccatttagttaagctggaatacaaaagatgtcgctagattctgctgtgttttcctaaccttagcatgctttcaagctcccatcaaaacgtctgagcacgtgaatcaagattgcacagaaagttagaaataagaacttcaagtctgttggtgtaagcacgaagcacgtctttttacaggttttgcgtgaagacttcggaaaattaaagttgatttctggatgaaaacttgtcatacaaacaattcactttcactaaacatttctgaagcttgcaaaacaaattaccagagttcagtgcacaccgaccatccaacaaaaagatgcacgctgatgcaag

SEQ ID NO: 220469 - DNA, 3208 bp, Zea Mays
ctggctcaggcgctgctaccgttcgagacaagtctcgccgcccacaccgccactaggaaaccttcttctctcctcgccgcccgcggccggccccttctccagaaccttctagaacccatcggggctccgggatggagcccagaagacgagagcgcagggtcatcgccatcgccggtgcggcagcgctcgttgccgtgggcctcaatatcgccttctccgccgtcgtcgcccaccgtcggaggaagcgacgagagcttccagggtttactgctcaagtcaacctatcagcagctgcgattaaaagaacgaccgaccgtatcatctctaagtcaagggaaacttatgattcagtggctgcagtgcccctagataaagtcagttttgctaatgtcattgcaccattggcagaattagatgcgctgcaattccctctggttcaagcttgtgttcttcctaggatggtatcaccatctgaggatgttcgcaaggcaagtgctgaagcagagaagctattggattcccactttgtgctttgcaggcagcgtgaagatgtttatcgtgtcataaaagcatttacagtgaaaggcgagagaataggtcctgaagcaacaagatttcttcagtttttggtgcagaattctttcgctacatataaatttgatcgtaatgttctgattctgaccgacaactgaatgtttatacatgtgatgatttattgtcaatgctttaaccctgaatatcatttttccataactgttgtatacttgtattcttatctatttcaatatgaacatacctaatggctaatgtaggtataatctggctcctgagtggtctcgtaaggttctcatactgcatgttcttttacggtgatgtgtctttgcatcctcagtaccatcgcctcattcatcttgaacttgaatttctgaattatttgttagcataaaatattaatatgatctttttaaattcattaaggtgcatcaaagctcaaaaaaaccatagaattaattgactgtaaacatactgaaagatatgtgatgtgtcttgctattgtattatttgcaatttgtattaagatgattttgcaaattgatttgactatcgttttgctgaattgtctaattatggttgaacaggtgaaagagtttgagcgcaatggagtaaaactatctcaaagcaagagaaaagaaatggagaaattgaaatctcatatagatgcattaaacttgaagtatctccaaaatttgaatgatttcaccaaattccttcttttaggtgaagatgaactagctggaatgccctttgagttccttaaggatctggaaaaggctgatgggaagtttaaggttccgttgactagttaccatgttactccagttcttgagcactgcaaggaagcagattgctgttgcttatggacaaaaaggtgggaaggataatgtagccatcctagaaaatttggtccagctaagacacaagtttgctaaattgctggggtacaccaactatgctgattttgctattgagcccagaatgccaaagacttcgaggaagatcttagagtttttggaagagatgtctgaacaattaagtgatgtggctaatagagagctcaacatactcaaagacctcaagatcaaggaggaaggaaatgctcagtttggaatggaagatttgttgtactacatcaaaagagctgaagaattcaaggttgatcttgacgttggtgaaattaaacaatacttccctgttggcctggtcatatctggaatgctgaagatatttcaggatctatttgcactacgattcgacgaaattaaggatgttgatgtttggcatgatacagttcgtgtgttttctgtttgggatgcaagttcaagtgatcttttgggttacttttttcttgatatcttttccagggaaggaaagtatgcccacacttgtgttgtgacccttcagaatggatgcttatgttctaatggtacacgtaaggttccggctgctgtgatattatctcagtgtccaaaagagtttgatggtaattcagcattgctgcggttccctgaagttgtgaggctattccatgaatttagccatgtggtccatcacgtatccaacagagccaccttttcaagattttcaggccttcgactggagggtgactttgctgaaattccaagcctgctactcgagaattggtgctatgagagtatttctctgaaaatgatgtccggcttccatcaggacattacgaaatccataagtagtgaagcttgccaatctctgaaaagaaggcgtgatttgtttgctggcctgaaaatgaaacaagagatacttttgtgccttgttgatcagataatacattcaagtgagaatgtggacattgatgacttaatcaaggatcttcaccccaaggtaatgttgggtatacctttattggaagggaccagtccagcttcaagttttcctcgtattgcctttggctatgatgctgtgtgctacagttacatatggagtgaggtgtttgctgctgatctttttgtatcaaaatttaaagatgacttgctcaatcagcatgctggattgcggttcagaaataaggtgttggctccaggaggctcaaaagatcccctggagataataacggactacctaggaagagaaccatcactccaaccttttattcagagcagaacaaggaacagtctgtgagggatcatttatgatgtaaccgttgagttttttctttcttttttcctttttgaatttagctatagaaggcctgctgactgtctcgagttatttttttcgtaacggactgacaagtctgatctttgtgccattctgttttccgacgtcatttgtttgaccatttagttaagctggaatacaaaagatgtcgctagattctgctgtgttttcctaaccttagcatgctttcaagctcccatcaaaacgtctgagcacgtgaatcaagattgcacagaaagttagaaataagaacttcaagtctgttggtgtaagcacgaagcacgtctttttacaggttttgcgtgaagacttcggaaaattaaagttgatttctggatgaaaacttgtcatacaaacaattcactttcactaaacatttctgaagcttgcaaaacaaattaccagagttcagtgcacaccgaccatccaacaaaaagatgcacgctgatgcaag

SEQ ID NO: 220470 - DNA, 3188 bp, Zea Mays
ctggctcaggcgctgctaccgttcgagacaagtctcgccgcccacaccgccactaggaaaccttcttctctcctcgccgcccgcggccggccccttctccagaaccttctagaacccatcggggctccgggatggagcccagaagacgagagcgcagggtcatcgccatcgccggtgcggcagcgctcgttgccgtgggcctcaatatcgccttctccgccgtcgtcgcccaccgtcggaggaagcgacgagagcttccagggtttactgctcaagtcaacctatcagcagctgcgattaaaagaacgaccgaccgtatcatctctaagtcaagggaaacttatgattcagtggctgcagtgcccctagataaaaattagatgcgctgcaattccctctggttcaagcttgtgttcttcctaggatggtatcaccatctgaggatgttcgcaaggcaagtgctgaagcagagaagctattggattcccactttgtgctttgcaggcagcgtgaagatgtttatcgtgtcataaaagcatttacagtgaaaggcgagagaataggtcctgaagcaacaagatttcttcagtttttggtgcagaattctttcgctacatataaatttgatcgtaatgttctgattctgaccgacaactgaatgtttatacatgtgatgatttattgtcaatgctttaaccctgaatatcatttttccataactgttgtatacttgtattcttatctatttcaatatgaacatacctaatggctaatgtaggtataatctggctcctgagtggtctcgtaaggttctcatactgcatgttcttttacggtgatgtgtctttgcatcctcagtaccatcgcctcattcatcttgaacttgaatttctgaattatttgttagcataaaatattaatatgatctttttaaattcattaaggtgcatcaaagctcaaaaaaaccatagaattaattgactgtaaacatactgaaagatatgtgatgtgtcttgctattgtattatttgcaatttgtattaagatgattttgcaaattgatttgactatcgttttgctgaattgtctaattatggttgaacaggtgaaagagtttgagcgcaatggagtaaaactatctcaaagcaagagaaaagaaatggagaaattgaaatctcatatagatgcattaaacttgaagtatctccaaaatttgaatgatttcaccaaattccttcttttaggtgaagatgaactagctggaatgccctttgagttccttaaggatctggaaaaggctgatgggaagtttaaggttccgttgactagttaccatgttactccagttcttgagcactgcaaggttggctctaccaggaagcagattgctgttgcttatggacaaaaaggtgggaaggataatgtagccatcctagaaaatttggtccagctaagacacaagtttgctaaattgctggggtacaccaactatgctgattttgctattgagcccagaatgccaaagacttcgaggaagatcttagagtttttggaagagatgtctgaacaattaagtgatgtggctaatagagagctcaacatactcaaagacctcaagatcaaggaggaaggaaatgctcagtttggaatggaagatttgttgtactacatcaaaagagctgaagaattcaaggttgatcttgacgttggtgaaattaaacaatacttccctgttggcctggtcatatctggaatgctgaagatatttcaggatctatttgcactacgattcgacgaaattaaggatgttgatgtttggcatgatacagttcgtgtgttttctgtttgggatgcaagttcaagtgatcttttgggttacttttttcttgatatcttttccagggaaggaaagtatgcccacacttgtgttgtgacccttcagaatggatgcttatgttctaatggtacacgtaaggttccggctgctgtgatattatctcagtgtccaaaagagtttgatggtaattcagcattgctgcggttccctgaagttgtgaggctattccatgaatttagccatgtggtccatcacgtatccaacagagccaccttttcaagattttcaggccttcgactggagggtgactttgctgaaattccaagcctgctactcgagaattggtgctatgagagtatttctctgaaaatgatgtccggcttccatcaggacattacgaaatccataagtagtgaagcttgccaatctctgaaaagaaggcgtgatttgtttgctggcctgaaaatgaaacaagagatacttttgtgccttgttgatcagataatacattcaagtgagaatgtggacattgatgacttaatcaaggatcttcaccccaaggtaatgttgggtatacctttattggaagggaccagtccagcttcaagttttcctcgtattgcctttggctatgatgctgtgtgctacagttacatatggagtgaggtgtttgctgctgatctttttgtatcaaaatttaaagatgacttgctcaatcagcatgctggattgcggttcagaaataaggtgttggctccaggaggctcaaaagatcccctggagataataacggactacctaggaagagaaccatcactccaaccttttattcagagcagaacaaggaacagtctgtgagggatcatttatgatgtaaccgttgagttttttctttcttttttcctttttgaatttagctatagaaggcctgctgactgtctcgagttatttttttcgtaacggactgacaagtctgatctttgtgccattctgttttccgacgtcatttgtttgaccatttagttaagctggaatacaaaagatgtcgctagattctgctgtgttttcctaaccttagcatgctttcaagctcccatcaaaacgtctgagcacgtgaatcaagattgcacagaaagttagaaataagaacttcaagtctgttggtgtaagcacgaagcacgtctttttacaggttttgcgtgaagacttcggaaaattaaagttgatttctggatgaaaacttgtcatacaaacaattcactttcactaaacatttctgaagcttgcaaaacaaattaccagagttcagtgcacaccgaccatccaacaaaaagatgcacgctgatgcaag

SEQ ID NO: 220471 - DNA, 2899 bp, Zea Mays
ctggctcaggcgctgctaccgttcgagacaagtctcgccgcccacaccgccactaggaaaccttcttctctcctcgccgcccgcggccggccccttctccagaaccttctagaacccatcggggctccgggatggagcccagaagacgagagcgcagggtcatcgccatcgccggtgcggcagcgctcgttgccgtgggcctcaatatcgccttctccgccgtcgtcgcccaccgtcggaggaagcgacgagagcttccagggtttactgctcaagtcaacctatcagcagctgcgattaaaagaacgaccgaccgtatcatctctaagtcaagggaaacttatgattcagtggctgcagtgcccctagataaagtcagttttgctaatgtcattgcaccattggcagaattagatgcgctgcaattccctctggttcaagcttgtgttcttcctaggatggtatcaccatctgaggatgttcgcaaggcaagtgctgaagcagagaagctattggattcccactttgtgctttgcaggcagcgtgaagatgtttatcgtgtcataaaagcatttacagtgaaaggcgagagaataggtcctgaagcaacaagatttcttcagtttttggtgaaagagtttgagcgcaatggagtaaaactatctcaaagcaagagaaaagaaatggagaaattgaaatctcatatagatgcattaaacttgaagtatctccaaaatttgaatgatttcaccaaattccttcttttaggtgaagatgaactagctggaatgccctttgagttccttaaggatctggaaaaggctgatgggaagtttaaggttccgttgactagttaccatgttactccagttcttgagcactgcaaggttggctctaccaggaagcagattgctgttgcttatggacaaaaaggtgggaaggataatgtagccatcctagaaaatttggtccagctaagacacaagtttgctaaattgctggggtacaccaactatgctgattttgctattgagcccagaatgccaaagacttcgaggaagatcttagagtttttggaagagatgtctgaacaattaagtgatgtggctaatagagagctcaacatactcaaagacctcaagatcaaggaggaaggaaatgctcagtttggaatggaagatttgttgtactacatcaaaagagctgaagaattcaaggttgatcttgacgttggtgaaattaaacaatacttccctgttggcctggtcatatctggaatgctgaagatatttcaggatctatttgcactacgattcgacgaaattaaggatgttgatgtttggcatgatacagttcgtgtgttttctgtttgggatgcaagttcaagtgatcttttgggttacttttttcttgatatcttttccagggaaggaaagtatgcccacacttgtgttgtgacccttcagaatggatgcttatgttctaatggtacacgtaaggttccggctgctgtgatattatctcagtgtccaaaagagtttgatggtaattcagcattgctgcggttccctgaagttgtgaggctattccatgaatttagccatgtggtccatcacgtatccaacagagccaccttttcaagattttcaggccttcgactggagggtgactttgctgaaattccaagcctgctactcgagaattggtgctatgagagtatttctctgaaaatgatgtccggcttccatcaggacattacgaaatccataagtagtgaagcttgccaatctctgaaaagaaggcgtgatttgtttgctggcctgaaaatgaaacaagagatacttttgtgtgagtcattttgctacctatcaaatgaggtggagtgagattattggtccttaaatgttatccagctcagaaactccgacaaaaaataatgaggttgaggtcctaatacagtttgactgacaccagccacctgaatttggctggcttttcatgtcctcaacacttaattctcttacttcagtaaacagccttgttgatcagataatacattcaagtgagaatgtggacattgatgacttaatcaaggatcttcaccccaaggtaatgttgggtatacctttattggaagggaccagtccagcttcaagttttcctcgtattgcctttggctatgatgctgtgtgctacagttacatatggagtgaggtgtttgctgctgatctttttgtatcaaaatttaaagatgacttgctcaatcagcatgctggattgcggttcagaaataaggtgttggctccaggaggctcaaaagatcccctggagataataacggactacctaggaagagaaccatcactccaaccttttattcagagcagaacaaggaacagtctgtgagggatcatttatgatgtaaccgttgagttttttctttcttttttcctttttgaatttagctatagaaggcctgctgactgtctcgagttatttttttcgtaacggactgacaagtctgatctttgtgccattctgttttccgacgtcatttgtttgaccatttagttaagctggaatacaaaagatgtcgctagattctgctgtgttttcctaaccttagcatgctttcaagctcccatcaaaacgtctgagcacgtgaatcaagattgcacagaaagttagaaataagaacttcaagtctgttggtgtaagcacgaagcacgtctttttacaggttttgcgtgaagacttcggaaaattaaagttgatttctggatgaaaacttgtcatacaaacaattcactttcactaaacatttctgaagcttgcaaaacaaattaccagagttcagtgcacaccgaccatccaacaaaaagatgcacgctgatgcaag

SEQ ID NO: 220472 - DNA, 1280 bp, Zea Mays
cagcaaaccccctctgtaccctccgggcaatcgggcatgaatccacccatccgcgatgctacatggagctcagcaagcctcggcgtcgtcgaccgcaggcccgcgccccaagagcactgctatcctgcagtctgatcagccacctcgcgccgccgccgcgcgggaggggggccgcggcggcacgggtccggagtcgcttgtgcgcggctcggtcgtcgcgccgtgcgtcagctgcggcatctgcggcggactcctccgtgacgccaccgccttcaccgagtgcctacacgcctgaaatgcatatatgacaaggttgcgaaagacaacataaagtgttgcccgaagtgtggcatttttatgggaaatccgttggagaagctcagacctgatcatagcctggaacacatcaggccactgatatttcctgctaagaggcgcaaggttgtcaccatgaagaagaggaaggaaagggtgtcctctgaatcaacccttccttcagtggtgggtaccactgcagaagaaagcactgcactgatacctgctgcttcagaaagtaaggcacaaaaggatcttactcctgtcggaagagatgctttgtcacgaattaggggtcgagactttgactcagcatgtggtcttactgaggatactggagccttgattgtatggcaagcaccacctattctagaggagacggctgcccacaatcagttagactccaagcaggacccagatagtttcaggcctccggcgacctctgatattgagtaccagcgacaaggaccaactgcacaaatgaccaatatttcgtttatggttgggaactcatcccatgcaaggccgactgaccaggatgatgaaaacatgagaggagatattctcacattgatcaatgaggtcttagtaaaaaggagcttcaagatctcgtgcaggagggcgcaaagttgttgatgaaagctgcttgtgctaagctgggaaatggagatgaagaccgcgatgaagatgatgacgaggaaagggatcgtcagcatgaataaggaaaacatgtcttgcctgggtgtccctctgtcctgtatctcaagtggatttgcattttgtcaaaactagtgtgttagctcgtttgtgatttgtgattttaggtcattgctgatcttggttcttgtttgttcctgggtcctgaatcaggcctgcatgcctagctggaaaactgttgttagtccagtaggtctcgttttgcggtgatcatgttcatctgcatgtttctctgattcctgggttgc

SEQ ID NO: 220473 - DNA, 1156 bp, Zea Mays
  misc_feature (1155)..(1156): n is a, c, g, or t
cagcaaaccccctctgtaccctccgggcaatcgggcatgaatccacccatccgcgatgctacatggagctcagcaagcctcggcgtcgtcgaccgcaggcccgcgccccaagagcactgctatcctgcagtctgatcagccacctcgcgccgccgccgcgcgggaggggggccgcggcggcacgggtccggagtcgcttgtgcgcggctcggtcgtcgcgccgtgcgtcagctgcggcatctgcggcggactcctccgtgacgccaccgccttcaccgagtgcctacacgccttttgcaggaaatgcatatatgacaaggttgcgaaagacaacataaagtgttgcccgaagtgtggcatttttatgggaaatccgttggagaagctcagacctgatcatagcctggaacacatcaggccactgatatttcctgctaagaggcgcaaggttgtcaccatgaagaagaggaaggaaagggtgtcctctgaatcaacccttccttcagtggtgggtaccactgcagaagaaagcactgcactgatacctgctgcttcagaaagtaaggcacaaaaggatcttactcctgtcggaagagatgctttgtcacgaattaggggtcgagactttgactcagcatgtggtcttactgaggatactggagccttgattgtatggcaagcaccacctattctagaggagacggctgcccacaatcagttagactccaagcaggacccagatagtttcaggcctccggcgacctctgatattgagtaccagcgacaaggaccaactgcacaaatgaccaatatttcgtttatggttgggaactcatcccatgcaaggccgactgaccaggatgatgaaaacatgagaggagatattctcacattgatcaatgagagcaatgcaagaatcatggaaatgtatgatgcccacatcagcaaactgaaggcaactggaaaatgaaagagcagctgcacttgagaggacaagaatccttgaagagaggctccagcaagagttggaaaacgaaaggacagttgctgctgagaggacaagacttcttgaaaagaagctccaaagagaactggaacatgaacgagaagctgctattgagagaacaagagttcttgacgagagactccaaagann

SEQ ID NO: 220474 - DNA, 1105 bp, Zea Mays
  misc_feature (1104)..(1105): n is a, c, g, or t
cagcaaaccccctctgtaccctccgggcaatcgggcatgaatccacccatccgcgatgctacatggagctcagcaagcctcggcgtcgtcgaccgcaggcccgcgccccaagagcactgctatcctgcagtctgatcagccacctcgcgccgccgccgcgcgggaggggggccgcggcggcacgggtccggagtcgcttgtgcgcggctcggtcgtcgcgccgtgcgtcagctgcggcatctgcggcggactcctccgtgacgccaccgccttcaccgagtgcctacacgccttttgcaggaaatgcatatatgacaaggttgcgaaagacaacataaagtgttgcccgaagtgtggcatttttatgggaaatccgttggagaagctcagacctgatcatagcctggaacacatcaggccactgatatttcctgctaagaggcgcaaggttgtcaccatgaagaagaggaaggaaagggtgtcctctgaatcaacccttccttcagtggtgggtaccactgcagaagaaagcactgcactgatacctgctgcttcagaaagtaaggcacaaaaggatcttactcctgtcggaagagatgctttgtcacgaattaggggtcgagactttgactcagcatgtggtcttactgaggatactggagccttgattgtatggcaagcaccacctattctagaggagacggctgcccacaatcagttagactccaagcaggacccagatagtttcaggcctccggcgacctctgatattgagtaccagcgacaaggaccaactgcacaaatgaccaatatttcgtttatggttgggaactcatcccatgcaaggccgactgaccaggatgatgaaaacatgagaggagatattctcacattgatcaatgaggcaactggaaaatgaaagagcagctgcacttgagaggacaagaatccttgaagagaggctccagcaagagttggaaaacgaaaggacagttgctgctgagaggacaagacttcttgaaaagaagctccaaagagaactggaacatgaacgagaagctgctattgagagaacaagagttcttgacgagagactccaaagann

SEQ ID NO: 220475 - DNA, 1726 bp, Zea Mays
gtttcttcgcccaacagatattttccagtgccgctctgaacagtgtgatgtggccgcgcgagccgcgaggagccagctagccatggtcgtcccagtcccgccgccgcctctcctcgcttcccacgtggccgtccgggccgcggcctccgccatatcccacggccgccgggtcctccttaacggcgaccacccgccgcaggtcgcggccctcgggcgcggcgactgggtcaagctcatctgcggcgccagctttgaggatgcagctgatgtcaggaatctctcccttgtctacactcttgctggagtggattgcattgattgtgcagcagatgcatctgtggtgggagcagtgaatgaaggtattgaagtagcagcatcaattgtaccaacagttcaaaggccttggctgatgattagtgttaatgatgattgcagagatcttcatttccgtaaagctgagtttgatcctgatgattgcccactggattgctcaaagccatgtgagaaagtttgcccagctgatgcaatatcactaaagcattccatggttgatggagagcgcacactatctgatcccttacgtggtaaatatgagggtggtgtaattactgagcggtgctatggatgtggtcggtgcttgccagtttgcccgtatgacagaataaaagctgcaagctttgcttgaaaccatttcaggagctgtgtcctatgttcgagaccctactatgactgctgaattattgaaaagagatgatgttgatgcaatagagatacataccactggaaaaggaactgatatgttcaataccctctgggacaacttgagtgggtccatcaataatgtgaagctggttgcagttagtcttcctgatataggtgaatcaactgttgacctcatgaacacaatatacacaataatggagccccattttaaagggtataatctttggcagttagatggccgacctatgagtggtgacattggccgaggtgcaacaagggagacagtttcttttgccgctcatgtggcttcaatgtcagaaagacctcctgggttctatcagttggctggtggcaccaactcatacactgttgattacttaaagaaagctggtcttttccaatcatcaaattggaattcagggaccgcaacctctgaaatggccagttctcaccaagctttaataggagggattgcttatggtggctatgctcgcaagatcgttggacgggttttgcgcaaaataccagaacagtttggccgtgtgcacatcgaggatcatcctgatcatctactggaggctctacaagaagccatgtcattagtaggacctgtgaagggttatatacccagtcattccaagcctttcatgaaacaagtagatagacaataggaagtaggaaaagcgcaggatatacccttcaacccagttttgggcgaagataaggcgcatcgtactttagctgtgacagtgaggagttcaatgtggtcattgggccaggaatctagtggttgctgtcggtcgctcgttctagatggattatgggctatggaacctggagtgccgtggtgctgcaaacatctcatgtttcattctgaaatctttttagatgtataatacgtagtagttgaattttctgtaaaaaaacatgttgcttggtgtttgcctttccaattggctgataagcctggccatatcgttatgcagacacggtcatctgcagc

SEQ ID NO: 220476 - DNA, 1742 bp, Zea Mays
gtttcttcgcccaacagatattttccagtgccgctctgaacagtgtgatgtggccgcgcgagccgcgaggagccagctagccatggtcgtcccagtcccgccgccgcctctcctcgcttcccacgtggccgtccgggccgcggcctccgccatatcccacggccgccgggtcctccttaacggcgaccacccgccgcaggtcgcggccctcgggcgcggcgactgggtcaagctcatctgcggcgccagctttgaggatgcagctgatgtcaggaatctctcccttgtctacactcttgctggagtggattgcattgattgtgcagcagatgcatctgtggtgggagcagtgaatgaaggtattgaagtagcagcatcaattgtaccaacagttcaaaggccttggctgatgattagtgttaatgatgattgcagagatcttcatttccgtaaagctgagtttgatcctgatgattgcccactggattgctcaaagccatgtgagaaagtttgcccagctgatgcaatatcactaaagcattccatggttgatggagagcgcacactatctgatcccttacgtggtaaatatgagggtggtgtaattactgagcggtgctatggatgtggtcggtgcttgccagtttgcccgtatgacagaataaaagctgcaagctttgcttgaaaccatttcaggagctgtgtcctatgttcgagaccctactatgactgctgaattattgaaaagagatgatgttgatgcaatagagatacataccactggaaaaggaactgatatgttcaataccctctgggacaacttgagtgggtccatcaataatgtgaagctggttgcagtaggttccacaattggttagtcttcctgatataggtgaatcaactgttgacctcatgaacacaatatacacaataatggagccccattttaaagggtataatctttggcagttagatggccgacctatgagtggtgacattggccgaggtgcaacaagggagacagtttcttttgccgctcatgtggcttcaatgtcagaaagacctcctgggttctatcagttggctggtggcaccaactcatacactgttgattacttaaagaaagctggtcttttccaatcatcaaattggaattcagggaccgcaacctctgaaatggccagttctcaccaagctttaataggagggattgcttatggtggctatgctcgcaagatcgttggacgggttttgcgcaaaataccagaacagtttggccgtgtgcacatcgaggatcatcctgatcatctactggaggctctacaagaagccatgtcattagtaggacctgtgaagggttatatacccagtcattccaagcctttcatgaaacaagtagatagacaataggaagtaggaaaagcgcaggatatacccttcaacccagttttgggcgaagataaggcgcatcgtactttagctgtgacagtgaggagttcaatgtggtcattgggccaggaatctagtggttgctgtcggtcgctcgttctagatggattatgggctatggaacctggagtgccgtggtgctgcaaacatctcatgtttcattctgaaatctttttagatgtataatacgtagtagttgaattttctgtaaaaaaacatgttgcttggtgtttgcctttccaattggctgataagcctggccatatcgttatgcagacacggtcatctgcagc

SEQ ID NO: 220477 - DNA, 1829 bp, Zea Mays
gtttcttcgcccaacagatattttccagtgccgctctgaacagtgtgatgtggccgcgcgagccgcgaggagccagctagccatggtcgtcccagtcccgccgccgcctctcctcgcttcccacgtggccgtccgggccgcggcctccgccatatcccacggccgccgggtcctccttaacggcgaccacccgccgcaggtcgcggccctcgggcgcggcgactgggtcaagctcatctgcggcgccagctttgaggatgcagctgatgtcaggaatctctcccttgtctacactcttgctggagatgcatctgtggtgggagcagtgaatgaaggtattgaagtagcagcatcaattgtaccaacagttcaaaggccttggctgatgattagtgttaatgatgattgcagagatcttcatttccgtaaagctgagtttgatcctgatgattgcccactggattgctcaaagccatgtgagaaagtttgcccagctgatgcaatatcactaaagcattccatggttgatggagagcgcacactatctgatcccttacgtggtaaatatgagggtggtgtaattactgagcggtgctatggatgtggtcggtgcttgccagtttgcccgtatgacagaataaaagctgcaagctttgcttgaaaccatttcaggagctgtgtcctatgttcgagaccctactatgactgctgaattattgaaaagagatgatgttgatgcaatagagatacataccactggaaaaggaactgatatgttcaataccctctgggacaacttgagtgggtccatcaataatgtgaagctggttgcagtaggttccacaattggtttgttgctgtatccacatatttgtattgctggaaatgtagccagtgactttttattgaaaaaaaaacttccattccatcattattaacgtgaaagttcactcttttcaggttagtcttcctgatataggtgaatcaactgttgacctcatgaacacaatatacacaataatggagccccattttaaagggtataatctttggcagttagatggccgacctatgagtggtgacattggccgaggtgcaacaagggagacagtttcttttgccgctcatgtggcttcaatgtcagaaagacctcctgggttctatcagttggctggtggcaccaactcatacactgttgattacttaaagaaagctggtcttttccaatcatcaaattggaattcagggaccgcaacctctgaaatggccagttctcaccaagctttaataggagggattgcttatggtggctatgctcgcaagatcgttggacgggttttgcgcaaaataccagaacagtttggccgtgtgcacatcgaggatcatcctgatcatctactggaggctctacaagaagccatgtcattagtaggacctgtgaagggttatatacccagtcattccaagcctttcatgaaacaagtagatagacaataggaagtaggaaaagcgcaggatatacccttcaacccagttttgggcgaagataaggcgcatcgtactttagctgtgacagtgaggagttcaatgtggtcattgggccaggaatctagtggttgctgtcggtcgctcgttctagatggattatgggctatggaacctggagtgccgtggtgctgcaaacatctcatgtttcattctgaaatctttttagatgtataatacgtagtagttgaattttctgtaaaaaaacatgttgcttggtgtttgcctttccaattggctgataagcctggccatatcgttatgcagacacggtcatctgcagc

SEQ ID NO: 220478 - DNA, 1811 bp, Zea Mays
gtttcttcgcccaacagatattttccagtgccgctctgaacagtgtgatgtggccgcgcgagccgcgaggagccagctagccatggtcgtcccagtcccgccgccgcctctcctcgcttcccacgtggccgtccgggccgcggcctccgccatatcccacggccgccgggtcctccttaacggcgaccacccgccgcaggtcgcggccctcgggcgcggcgactgggtcaagctcatctgcggcgccagctttgaggatgcagctgatgtcaggaatctctcccttgtctacactcttgctggagtggattgcattgattgtgcagcagatgcatctgtggtgggagcagtgaatgaaggtattgaagtagcagcatcaattgtaccaacagttcaaaggccttggctgatgattagtgttaatgatgattgcagagatcttcatttccgtaaagctgagtttgatcctgatgattgcccactggattgctcaaagccatgtgagaaagtttgcccagctgatgcaatatcactaaagcattccatggttgatggagagcgcacactatctgatcccttacgtggtaaatatgagggtggtgtaattactgagcggtgctatggatgtggtcggtgcttgccagtttgcccgtatgacagaataagagctgtgtcctatgttcgagaccctactatgactgctgaattattgaaaagagatgatgttgatgcaatagagatacataccactggaaaaggaactgatatgttcaataccctctgggacaacttgagtgggtccatcaataatgtgaagctggttgcagtaggttccacaattggtttgttgctgtatccacatatttgtattgctggaaatgtagccagtgactttttattgaaaaaaaaacttccattccatcattattaacgtgaaagttcactcttttcaggttagtcttcctgatataggtgaatcaactgttgacctcatgaacacaatatacacaataatggagccccattttaaagggtataatctttggcagttagatggccgacctatgagtggtgacattggccgaggtgcaacaagggagacagtttcttttgccgctcatgtggcttcaatgtcagaaagacctcctgttggctggtggcaccaactcatacactgttgattacttaaagaaagctggtcttttccaatcatcaaattggaattcagggaccgcaacctctgaaatggccagttctcaccaagctttaataggagggattgcttatggtggctatgctcgcaagatcgttggacgggttttgcgcaaaataccagaacagtttggccgtgtgcacatcgaggatcatcctgatcatctactggaggctctacaagaagccatgtcattagtaggacctgtgaagggttatatacccagtcattccaagcctttcatgaaacaagtagatagacaataggaagtaggaaaagcgcaggatatacccttcaacccagttttgggcgaagataaggcgcatcgtactttagctgtgacagtgaggagttcaatgtggtcattgggccaggaatctagtggttgctgtcggtcgctcgttctagatggattatgggctatggaacctggagtgccgtggtgctgcaaacatctcatgtttcattctgaaatctttttagatgtataatacgtagtagttgaattttctgtaaaaaaacatgttgcttggtgtttgcctttccaattggctgataagcctggccatatcgttatgcagacacggtcatctgcagc

SEQ ID NO: 220479 - DNA, 1818 bp, Zea Mays
gtttcttcgcccaacagatattttccagtgccgctctgaacagtgtgatgtggccgcgcgagccgcgaggagccagctagccatggtcgtcccagtcccgccgccgcctctcctcgcttcccacgtggccgtccgggccgcggcctccgccatatcccacggccgccgggtcctccttaacggcgaccacccgccgcaggtcgcggccctcgggcgcggcgactgggtcaagctcatctgcggcgccagctttgaggatgcagctgatgtcaggaatctctcccttgtctacactcttgctggagtggattgcattgattgtgcagcagatgcatctgtggtgggagcagtgaatgaaggtattgaagtagcagcatcaattgtaccaacagttcaaaggccttggctgatgattagtgttaatgatgattgcagagatcttcatttccgtaaagctgagtttgatcctgatgattgcccactggattgctcaaagccatgtgagaaagtttgcccagctgatgcaatatcactaaagcattccatggttgatggagagcgcacactatctgatcccttacgtggtaaatatgagggtggtgtaattactgagcggtgctatggatgtggtcggtgcttgccagtttgcccgtatgacagaataagagctgtgtcctatgttcgagaccctactatgactgctgaattattgaaaagagatgatgttgatgcaatagagatacataccactggaaaaggaactgatatgttcaataccctctgggacaacttgagtgggtccatcaataatgtgaagctggttgcagtaggttccacaattggtttgttgctgtatccacatatttgtattgctggaaatgtagccagtgactttttattgaaaaaaaaacttccattccatcattattaacgtgaaagttcactcttttcaggttagtcttcctgatataggtgaatcaactgttgacctcatgaacacaatatacacaataatggagccccattttaaagggtataatctttggcagatggccgacctatgagtggtgacattggccgaggtgcaacaagggagacagtttcttttgccgctcatgtggcttcaatgtcagaaagacctcctgggttctatcagttggctggtggcaccaactcatacactgttgattacttaaagaaagctggtcttttccaatcatcaaattggaattcagggaccgcaacctctgaaatggccagttctcaccaagctttaataggagggattgcttatggtggctatgctcgcaagatcgttggacgggttttgcgcaaaataccagaacagtttggccgtgtgcacatcgaggatcatcctgatcatctactggaggctctacaagaagccatgtcattagtaggacctgtgaagggttatatacccagtcattccaagcctttcatgaaacaagtagatagacaataggaagtaggaaaagcgcaggatatacccttcaacccagttttgggcgaagataaggcgcatcgtactttagctgtgacagtgaggagttcaatgtggtcattgggccaggaatctagtggttgctgtcggtcgctcgttctagatggattatgggctatggaacctggagtgccgtggtgctgcaaacatctcatgtttcattctgaaatctttttagatgtataatacgtagtagttgaattttctgtaaaaaaacatgttgcttggtgtttgcctttccaattggctgataagcctggccatatcgttatgcagacacggtcatctgcagc

SEQ ID NO: 220480 - DNA, 1832 bp, Zea Mays
gtttcttcgcccaacagatattttccagtgccgctctgaacagtgtgatgtggccgcgcgagccgcgaggagccagctagccatggtcgtcccagtcccgccgccgcctctcctcgcttcccacgtggccgtccgggccgcggcctccgccatatcccacggccgccgggtcctccttaacggcgaccacccgccgcaggtcgcggccctcgggcgcggcgactgggtcaagctcatctgcggcgccagctttgaggatgcagctgatgtcaggaatctctcccttgtctacactcttgctggagcagatgcatctgtggtgggagcagtgaatgaaggtattgaagtagcagcatcaattgtaccaacagttcaaaggccttggctgatgattagtgttaatgatgattgcagagatcttcatttccgtaaagctgagtttgatcctgatgattgcccactggattgctcaaagccatgtgagaaagtttgcccagctgatgcaatatcactaaagcattccatggttgatggagagcgcacactatctgatcccttacgtggtaaatatgagggtggtgtaattactgagcggtgctatggatgtggtcggtgcttgccagtttgcccgtatgacagaataaaagctgcaagctttgcttgaaaccatttcaggagctgtgtcctatgttcgagaccctactatgactgctgaattattgaaaagagatgatgttgatgcaatagagatacataccactggaaaaggaactgatatgttcaataccctctgggacaacttgagtgggtccatcaataatgtgaagctggttgcagtaggttccacaattggtttgttgctgtatccacatatttgtattgctggaaatgtagccagtgactttttattgaaaaaaaaacttccattccatcattattaacgtgaaagttcactcttttcaggttagtcttcctgatataggtgaatcaactgttgacctcatgaacacaatatacacaataatggagccccattttaaagggtataatctttggcagttagatggccgacctatgagtggtgacattggccgaggtgcaacaagggagacagtttcttttgccgctcatgtggcttcaatgtcagaaagacctcctgggttctatcagttggctggtggcaccaactcatacactgttgattacttaaagaaagctggtcttttccaatcatcaaattggaattcagggaccgcaacctctgaaatggccagttctcaccaagctttaataggagggattgcttatggtggctatgctcgcaagatcgttggacgggttttgcgcaaaataccagaacagtttggccgtgtgcacatcgaggatcatcctgatcatctactggaggctctacaagaagccatgtcattagtaggacctgtgaagggttatatacccagtcattccaagcctttcatgaaacaagtagatagacaataggaagtaggaaaagcgcaggatatacccttcaacccagttttgggcgaagataaggcgcatcgtactttagctgtgacagtgaggagttcaatgtggtcattgggccaggaatctagtggttgctgtcggtcgctcgttctagatggattatgggctatggaacctggagtgccgtggtgctgcaaacatctcatgtttcattctgaaatctttttagatgtataatacgtagtagttgaattttctgtaaaaaaacatgttgcttggtgtttgcctttccaattggctgataagcctggccatatcgttatgcagacacggtcatctgcagc

SEQ ID NO: 220481 - DNA, 1711 bp, Zea Mays
gtttcttcgcccaacagatattttccagtgccgctctgaacagtgtgatgtggccgcgcgagccgcgaggagccagctagccatggtcgtcccagtcccgccgccgcctctcctcgcttcccacgtggccgtccgggccgcggcctccgccatatcccacggccgccgggtcctccttaacggcgaccacccgccgcaggtcgcggccctcgggcgcggcgactgggtcaagctcatctgcggcgccagctttgaggatgcagctgatgtcaggaatctctcccttgtctacactcttgctggagtggattgcattgattgtgcagcagatgcatctgtggtgggagcagtgaatgaaggtattgaagtagcagcatcaattgtaccaacagttcaaaggccttggctgatgattagtgttaatgatgattgcagagatcttcatttccgtaaagctgagtttgatcctgatgattgcccactggattgctcaaagccatgtgagaaagtttgcccagctgatgcaatatcactaaagcattccatggttgatggagagcgcacactatctgatcccttacgtggtaaatatgagggtggtgtaattactgagcggtgctatggatgtggtcggtgcttgccagtttgcccgtatgacagaataagagctgtgtcctatgttcgagaccctactatgactgctgaattattgaaaagagatgatgttgatgcaatagagatacataccactggaaaaggaactgatatgttcaataccctctgggacaacttgagtgggtccatcaataatgtgaagctggttgcagtaggttccacaattggttagtcttcctgatataggtgaatcaactgttgacctcatgaacacaatatacacaataatggagccccattttaaagggtataatctttggcagttagatggccgacctatgagtggtgacattggccgaggtgcaacaagggagacagtttcttttgccgctcatgtggcttcaatgtcagaaagacctcctgggttctatcagttggctggtggcaccaactcatacactgttgattacttaaagaaagctggtcttttccaatcatcaaattggaattcagggaccgcaacctctgaaatggccagttctcaccaagctttaataggagggattgcttatggtggctatgctcgcaagatcgttggacgggttttgcgcaaaataccagaacagtttggccgtgtgcacatcgaggatcatcctgatcatctactggaggctctacaagaagccatgtcattagtaggacctgtgaagggttatatacccagtcattccaagcctttcatgaaacaagtagatagacaataggaagtaggaaaagcgcaggatatacccttcaacccagttttgggcgaagataaggcgcatcgtactttagctgtgacagtgaggagttcaatgtggtcattgggccaggaatctagtggttgctgtcggtcgctcgttctagatggattatgggctatggaacctggagtgccgtggtgctgcaaacatctcatgtttcattctgaaatctttttagatgtataatacgtagtagttgaattttctgtaaaaaaacatgttgcttggtgtttgcctttccaattggctgataagcctggccatatcgttatgcagacacggtcatctgcagc

SEQ ID NO: 220482 - DNA, 619 bp, Zea Mays
  misc_feature (1)..(2): n is a, c, g, or t
nntctgtcttttttttcacatttctactgctgttgtctaatgtacgtgagtgtcttcaggtcaatctgtgccttacaaatcaaacggacaaaactgtgggcccttttgaagtatttctggctccaagcatgtcgggtgaagacagagctgttctagtcaatgggccacagaagttgagcatggtgaccacccagctaggagtgcaaaagatttccggaattacaatgtacgccgtgcaggaaaagaagtactatgaacctttgcccgacatagagatttttgttgatgcagaatagcaacaccaaattgggacccatttgacgagctgaagatgcatttgtacttttcattaccatgggaggtctacatagtttacataaagcactggctgatgtatattgatacatgcgattgtcatattgatatcaaattgacttctgtcggatgtcactcaaccttggattaccacattctcactcaaccttgagctgcacattgatcatgctctgctaaagactgcacggattacaattcttcaagctgggaaagttttggcccaaaattactgctgaatgtggccggttgctcttgctggttatctcgtgattttctgtcaagt

SEQ ID NO: 220483 - DNA, 4088 bp, Zea Mays
ggaagcctccgcagtccgcacgaggcctggaactttccacgggtccaaaacccctctctctctatcgctcctctccctttctctctccgccccccatcccctcgcgatttccacctcctcccccacccccacctccgtaacccacttccaggtgggccccccacatcgccgccggtgacacgcacctccctccctgcctcccccgctaccgaccaccacgtccacgcccccggtcatgacgacctcgccgccgcccgccgagcaggaacagcaggaggaagaggaggtgctggtgccgcatggcccgcaccaggagctgcccaatggagcgcagccaatggaagttgtgcctgctgagccagctgctaccgtggagaaccaacagatagaggatccaccaatctcgagatttacttggaccattgagaatttatcaagagttagcacaaagaagctctactctgaaatttttgttgttggaggctacaagtggcgaattttgattttccctcgggggaataatgttgaattcttatctatgtatttggatgtagctgattctggagtcttgccctatggatggactagatacgcacaattcagcctctctgtggttaatcagattcacaacaagttcacaataagaaaagaaacacaacatcagttctctgctcgagaaagtgattggggtttcacttcatttatgccgctgggtgaactctacaacccaagtaggggttatcttgtaaatgatacttgtatagtggaagctgaagttgctgtgtgtaaagttgttgagtattggagttatgactctaaaaaggaaactggctatgttggtcttaaaaatcagggtgctacctgctatatgaattctcttcttcagacactctaccacattccgtatttcagaaaggctgtttatcacatgcccaccaccgagaacgatatgccctcaggaagcatcccactagctctacagtcactcttttataagttgcagtataatgacagcagtgtctctacaaaggagctcacaaaatcgtttgggtgggatatgcatgattcatttatgcaacatgatgtacaagaattgaacagagttctttccgagaagttggaagataagatgaagggaactgttgtggagggaacgatacaacaattgtttgaagggcaccacatgaactacattgagtgtatcaatgtggatttcaaatcaacaagaaaggaatccttctatgatctccagcttgatgtcaaaggttgtcaggatgtctatgcttcatttgataagtacgtagaagtggagcgtctggaaggtgacaacaagtatcatgccgacaaacatggcctgcaggatgcaaaaaaaggagttctttttatcgacttccctcctgttttgcaacttcagctaaaacgttttgagtatgatttcatgcgtgacacgatggtgaagataaacgatcgttatgaatttccactccaattggatcttgatagagataatggaaaatatttatctcctgatgctgacaggaatgtgcgtaatctttatacccttcacagtgttcttgtccatagtggtggtgttcatggtggacattactatgctttcatacgacctacactttctgatcaatggttcaagtttgatgatgagcgtgtgacaaaagaagatgcaaagagggcactagaagagcaatatggtggtgaggaggagctacctcagacaaatcctggcttaaacaacaccccattcaagtttactaaatattcaaatgcatacatgcttgtgtacattcgtgaaagtgacaaggacaaaattatatgtaatgtggatgagaaagatatagcggagcatcttcggattagattagaaaatgaccgtgaagagaaggaacgtcggaagaaggaaaaagcggaggcacacctctatactataatcaaggttgcaagggatgatgacttaaaagctcagatagggaaagacatatattttgatcttgttgatcatgataaagtcccaagcttccgtatccagaaacagatgacctttgctcaattcaaggaggaggtagcaaaagagtttggtattcctacacagtttcaacgattttggctgtgggccaagcgacaaaaccatacctaccgacctaacaggccattgtgtcctcaagacgaagcacatactgttgggcagctaaaggaactggtgaacaaggcccacaacgcagaactgaaactgttcttggaagttgaacttggactggaccttaaacctcttcctcttcccgacaagactagagaagatatatttcttttcttcaaactctatgaacctgaaaaggaacagctgcggtatgttggtaggctttttgtaaaggcttcaggaagaccacaggacattctgctgaagttaaggatgttggcaggtttttcacaggatgatgatattgaactttatgaggaaattaagttcgagcccaatgtgatgtgtgaatacattgacaacaggcttctgtttcgatcttgccagcttgaagacggggatataatttgttttcaaaagccttcaaaaccagatagtgcagaccgatatcgatttcctgacgtcccatcctttttgacgtatatacgtaaccggcaggtggtgcacttccgttcattggagaagcccaaggacgacgaattttgccttgagatgtcaaagattttcacatatgatcaagtcgtggaaaaagtagctgaaaaacttggcgtggatgacccatcgaaaattcgtcttacatcacataattgttattcgcaacagcctaagcctcaaccaataaagtacagaggcgttgaacgtctactggatatgctgattcattataaccagacttctgatattctgtactatgaagtattggacataccacttccagaattacaagcgctgaagacattaaaagttacctaccatcatgccacaaaagatgaggtgtcagttcacagtataagattaccaaaaaacagcactgttggcgatgtgctgaatgatatcaaaacgaaggttgagttgtctcataccaatgctgagctaagattacttgaggtcttttatcacaagatatacaaggtatttgcaccaaatgaaaagattgaaaacatcaatgatcagtactggacactgcgtgcagaggaggttccagaggaggagaaaaatcttggccccttcgatcgtttgattcatgtatatcattttacaaaagacactcaaaaccaaacgcaagttcagaactttggagaacctttttttatggttattcgtgaggatgagaccctatcttctatcaaagaacgtatacagaaaaagcttaaggttccagatgaggatttctcaaagtggaagtttgcatacatttcactcggtcgtcctgactattttgaagattcagatactgtagccctaaaattccagagaaacatgtatggagcttgggagcagtatcttggactggaacatccggacacggctcctaggaaggcacacacggctaatcagaaccggcattcattcgagagacctgtaaaaatttataactaggcatgttagaaattgagcgatgagctgccgctcaataccaagccaggctgaagttgctggcttgaaatagagagcatgttgctcaggtttttcgatggagctgtggaactagttcagaggagactgatcgggcgacttgtcatctttcctgtttgttttgctgccccggatatataaagttgtacagagatgaccccaccagacaattgtctttagtagataagataactttttacagtcgagtggccgatgttttagtcgatcactctgttctgcagttggtggtggtgctaggtggccttgagctgttgagggtacttgtctttcgactctttctgtatattattgacgcggcggatgtttgtaattccaatgatacatttcttacttgctggtttccggtgctttccttgctgcatcattctaatttggcattataatttagaattgagcgatgttcatcaccacttccatgatctattcgcagctgttcttg

SEQ ID NO: 220484 - DNA, 3984 bp, Zea Mays
ctctatcgctcctctccctttctctctccgccccccatcccctcgcgatttccacctcctcccccacccccacctccgtaacccacttccaggtgggccccccacatcgccgccggtgacacgcacctccctccctgcctcccccgctaccgaccaccacgtccacgcccccggtcatgacgacctcgccgccgcccgccgagcaggaacagcaggaggaagaggaggtgctggtgccgcatggcccgcaccaggagctgcccaatggagcgcagccaatggaagttgtgcctgctgagccagctgctaccgtggagaaccaacagatagaggatccaccaatctcgagatttacttggaccattgagaatttatcaagagttagcacaaagaagctctactctgaaatttttgttgttggaggctacaagtggcgaattttgattttccctcgggggaataatgttgaattcttatctatgtatttggatgtagctgattctggagtcttgccctatggatggactagatacgcacaattcagcctctctgtggttaatcagattcacaacaagttcacaataagaaaagaaacacaacatcagttctctgctcgagaaagtgattggggtttcacttcatttatgccgctgggtgaactctacaacccaagtaggggttatcttgtaaatgatacttgtatagtggaagctgaagttgctgtgtgtaaagttgttgagtattggagttatgactctaaaaaggaaactggctatgttggtcttaaaaatcagggtgctacctgctatatgaattctcttcttcagacactctaccacattccgtatttcagaaaggctgtttatcacatgcccaccaccgagaacgatatgccctcaggaagcatcccactagctctacagtcactcttttataagttgcagtataatgacagcagtgtctctacaaaggagctcacaaaatcgtttgggtgggatatgcatgattcatttatgcaacatgatgtacaagaattgaacagagttctttccgagaagttggaagataagatgaagggaactgttgtggagggaacgatacaacaattgtttgaagggcaccacatgaactacattgagtatctccagcttgatgtcaaaggttgtcaggatgtctatgcttcatttgataagtacgtagaagtggagcgtctggaaggtgacaacaagtatcatgccgacaaacatggcctgcaggatgcaaaaaaaggagttctttttatcgacttccctcctgttttgcaacttcagctaaaacgttttgagtatgatttcatgcgtgacacgatggtgaagataaacgatcgttatgaatttccactccaattggatcttgatagagataatggaaaatatttatctcctgatgctgacaggaatgtgcgtaatctttatacccttcacagtgttcttgtccatagtggtggtgttcatggtggacattactatgctttcatacgacctacactttctgatcaatggttcaagtttgatgatgagcgtgtgacaaaagaagatgcaaagagggcactagaagagcaatatggtggtgaggaggagctacctcagacaaatcctggcttaaacaacaccccattcaagtttactaaatattcaaatgcatacatgcttgtgtacattcgtgaaagtgacaaggacaaaattatatgtaatgtggatgagaaagatatagcggagcatcttcggattagattagaaaatgaccgtgaagagaaggaacgtcggaagaaggaaaaagcggaggcacacctctatactataatcaaggttgcaagggatgatgacttaaaagctcagatagggaaagacatatattttgatcttgttgatcatgataaagtcccaagcttccgtatccagaaacagatgacctttgctcaattcaaggaggaggtagcaaaagagtttggtattcctacacagtttcaacgattttggctgtgggccaagcgacaaaaccatacctaccgacctaacaggccattgtgtcctcaagacgaagcacatactgttgggcagctaaaggaactggtgaacaaggcccacaacgcagaactgaaactgttcttggaagttgaacttggactggaccttaaacctcttcctcttcccgacaagactagagaagatatatttcttttcttcaaactctatgaacctgaaaaggaacagctgcggtatgttggtaggctttttgtaaaggcttcaggaagaccacaggacattctgctgaagttaaggatgttggcaggtttttcacaggatgatgatattgaactttatgaggaaattaagttcgagcccaatgtgatgtgtgaatacattgacaacaggcttctgtttcgatcttgccagcttgaagacggggatataatttgttttcaaaagccttcaaaaccagatagtgcagaccgatatcgatttcctgacgtcccatcctttttgacgtatatacgtaaccggcaggtggtgcacttccgttcattggagaagcccaaggacgacgaattttgccttgagatgtcaaagattttcacatatgatcaagtcgtggaaaaagtagctgaaaaacttggcgtggatgacccatcgaaaattcgtcttacatcacataattgttattcgcaacagcctaagcctcaaccaataaagtacagaggcgttgaacgtctactggatatgctgattcattataaccagacttctgatattctgtactatgaagtattggacataccacttccagaattacaagcgctgaagacattaaaagttacctaccatcatgccacaaaagatgaggtgtcagttcacagtataagattaccaaaaaacagcactgttggcgatgtgctgaatgatatcaaaacgaaggttgagttgtctcataccaatgctgagctaagattacttgaggtcttttatcacaagatatacaaggtatttgcaccaaatgaaaagattgaaaacatcaatgatcagtactggacactgcgtgcagaggaggttccagaggaggagaaaaatcttggccccttcgatcgtttgattcatgtatatcattttacaaaagacactcaaaaccaaacgcaagttcagaactttggagaacctttttttatggttattcgtgaggatgagaccctatcttctatcaaagaacgtatacagaaaaagcttaaggttccagatgaggatttctcaaagtggaagtttgcatacatttcactcggtcgtcctgactattttgaagattcagatactgtagccctaaaattccagagaaacatgtatggagcttgggagcagtatcttggactggaacatccggacacggctcctaggaaggcacacacggctaatcagaaccggcattcattcgagagacctgtaaaaatttataactaggcatgttagaaattgagcgatgagctgccgctcaataccaagccaggctgaagttgctggcttgaaatagagagcatgttgctcaggtttttcgatggagctgtggaactagttcagaggagactgatcgggcgacttgtcatctttcctgtttgttttgctgccccggatatataaagttgtacagagatgaccccaccagacaattgtctttagtagataagataactttttacagtcgagtggccgatgttttagtcgatcactctgttctgcagttggtggtggtgctaggtggccttgagctgttgagggtacttgtctttcgactctttctgtatattattgacgcggcggatgtttgtaattccaatgatacatttcttacttgctggtttccggtgctttccttgctgcatcattctaatttggcattataatttagaattgagcgatgttcatcaccacttccatgatctattcgcagctgttcttg

SEQ ID NO: 220485 - DNA, 4014 bp, Zea Mays
ctctatcgctcctctccctttctctctccgccccccatcccctcgcgatttccacctcctcccccacccccacctccgtaacccacttccaggtgggccccccacatcgccgccggtgacacgcacctccctccctgcctcccccgctaccgaccaccacgtccacgcccccggtcatgacgacctcgccgccgcccgccgagcaggaacagcaggaggaagaggaggtgctggtgccgcatggcccgcaccaggagctgcccaatggagcgcagccaatggaagttgtgcctgctgagccagctgctaccgtggagaaccaacagatagaggatccaccaatctcgagatttacttggaccattgagaatttatcaagagttagcacaaagaagctctactctgaaatttttgttgttggaggctacaagtggcgaattttgattttccctcgggggaataatgttgaattcttatctatgtatttggatgtagctgattctggagtcttgccctatggatggactagatacgcacaattcagcctctctgtggttaatcagattcacaacaagttcacaataagaaaagaaacacaacatcagttctctgctcgagaaagtgattggggtttcacttcatttatgccgctgggtgaactctacaacccaagtaggggttatcttgtaaatgatacttgtatagtggaagctgaagttgctgtgtgtaaagttgttgagtattggagttatgactctaaaaaggaaactggctatgttggtcttaaaaatcagggtgctacctgctatatgaattctcttcttcagacactctaccacattccgtatttcagaaagatacagctaactacagatatctcttgccaggctgtttatcacatgcccaccaccgagaacgatatgccctcaggaagcatcccactagctctacagtcactcttttataagttgcagtataatgacagcagtgtctctacaaaggagctcacaaaatcgtttgggtgggatatgcatgattcatttatgcaacatgatgtacaagaattgaacagagttctttccgagaagttggaagataagatgaagggaactgttgtggagggaacgatacaacaattgtttgaagggcaccacatgaactacattgagtatctccagcttgatgtcaaaggttgtcaggatgtctatgcttcatttgataagtacgtagaagtggagcgtctggaaggtgacaacaagtatcatgccgacaaacatggcctgcaggatgcaaaaaaaggagttctttttatcgacttccctcctgttttgcaacttcagctaaaacgttttgagtatgatttcatgcgtgacacgatggtgaagataaacgatcgttatgaatttccactccaattggatcttgatagagataatggaaaatatttatctcctgatgctgacaggaatgtgcgtaatctttatacccttcacagtgttcttgtccatagtggtggtgttcatggtggacattactatgctttcatacgacctacactttctgatcaatggttcaagtttgatgatgagcgtgtgacaaaagaagatgcaaagagggcactagaagagcaatatggtggtgaggaggagctacctcagacaaatcctggcttaaacaacaccccattcaagtttactaaatattcaaatgcatacatgcttgtgtacattcgtgaaagtgacaaggacaaaattatatgtaatgtggatgagaaagatatagcggagcatcttcggattagattagaaaatgaccgtgaagagaaggaacgtcggaagaaggaaaaagcggaggcacacctctatactataatcaaggttgcaagggatgatgacttaaaagctcagatagggaaagacatatattttgatcttgttgatcatgataaagtcccaagcttccgtatccagaaacagatgacctttgctcaattcaaggaggaggtagcaaaagagtttggtattcctacacagtttcaacgattttggctgtgggccaagcgacaaaaccatacctaccgacctaacaggccattgtgtcctcaagacgaagcacatactgttgggcagctaaaggaactggtgaacaaggcccacaacgcagaactgaaactgttcttggaagttgaacttggactggaccttaaacctcttcctcttcccgacaagactagagaagatatatttcttttcttcaaactctatgaacctgaaaaggaacagctgcggtatgttggtaggctttttgtaaaggcttcaggaagaccacaggacattctgctgaagttaaggatgttggcaggtttttcacaggatgatgatattgaactttatgaggaaattaagttcgagcccaatgtgatgtgtgaatacattgacaacaggcttctgtttcgatcttgccagcttgaagacggggatataatttgttttcaaaagccttcaaaaccagatagtgcagaccgatatcgatttcctgacgtcccatcctttttgacgtatatacgtaaccggcaggtggtgcacttccgttcattggagaagcccaaggacgacgaattttgccttgagatgtcaaagattttcacatatgatcaagtcgtggaaaaagtagctgaaaaacttggcgtggatgacccatcgaaaattcgtcttacatcacataattgttattcgcaacagcctaagcctcaaccaataaagtacagaggcgttgaacgtctactggatatgctgattcattataaccagacttctgatattctgtactatgaagtattggacataccacttccagaattacaagcgctgaagacattaaaagttacctaccatcatgccacaaaagatgaggtgtcagttcacagtataagattaccaaaaaacagcactgttggcgatgtgctgaatgatatcaaaacgaaggttgagttgtctcataccaatgctgagctaagattacttgaggtcttttatcacaagatatacaaggtatttgcaccaaatgaaaagattgaaaacatcaatgatcagtactggacactgcgtgcagaggaggttccagaggaggagaaaaatcttggccccttcgatcgtttgattcatgtatatcattttacaaaagacactcaaaaccaaacgcaagttcagaactttggagaacctttttttatggttattcgtgaggatgagaccctatcttctatcaaagaacgtatacagaaaaagcttaaggttccagatgaggatttctcaaagtggaagtttgcatacatttcactcggtcgtcctgactattttgaagattcagatactgtagccctaaaattccagagaaacatgtatggagcttgggagcagtatcttggactggaacatccggacacggctcctaggaaggcacacacggctaatcagaaccggcattcattcgagagacctgtaaaaatttataactaggcatgttagaaattgagcgatgagctgccgctcaataccaagccaggctgaagttgctggcttgaaatagagagcatgttgctcaggtttttcgatggagctgtggaactagttcagaggagactgatcgggcgacttgtcatctttcctgtttgttttgctgccccggatatataaagttgtacagagatgaccccaccagacaattgtctttagtagataagataactttttacagtcgagtggccgatgttttagtcgatcactctgttctgcagttggtggtggtgctaggtggccttgagctgttgagggtacttgtctttcgactctttctgtatattattgacgcggcggatgtttgtaattccaatgatacatttcttacttgctggtttccggtgctttccttgctgcatcattctaatttggcattataatttagaattgagcgatgttcatcaccacttccatgatctattcgcagctgttcttg

SEQ ID NO: 220486 - DNA, 2381 bp, Zea Mays
ccatcccctcgcgatttccacctcctcccccacccccacctccgtaacccacttccaggtgggccccccacatcgccgccggtgacacgcacctccctccctgcctcccccgctaccgaccaccacgtccacgcccccggtcatgacgacctcgccgccgcccgccgagcaggaacagcaggaggaagaggaggaacgtcggaagaaggaaaaagcggaggcacacctctatactataatcaaggttgcaagggatgatgacttaaaagctcagatagggaaagacatatattttgatcttgttgatcatgataaagtcccaagcttccgtatccagaaacagatgacctttgctcaattcaaggaggaggtagcaaaagagtttggtattcctacacagtttcaacgattttggctgtgggccaagcgacaaaaccatacctaccgacctaacaggccattgtgtcctcaagacgaagcacatactgttgggcagctaaaggaactggtgaacaaggcccacaacgcagaactgaaactgttcttggaagttgaacttggactggaccttaaacctcttcctcttcccgacaagactagagaagatatatttcttttcttcaaactctatgaacctgaaaaggaacagctgcggtatgttggtaggctttttgtaaaggcttcaggaagaccacaggacattctgctgaagttaaggatgttggcaggtttttcacaggatgatgatattgaactttatgaggaaattaagttcgagcccaatgtgatgtgtgaatacattgacaacaggcttctgtttcgatcttgccagcttgaagacggggatataatttgttttcaaaagccttcaaaaccagatagtgcagaccgatatcgatttcctgacgtcccatcctttttgacgtatatacgtaaccggcaggtggtgcacttccgttcattggagaagcccaaggacgacgaattttgccttgagatgtcaaagattttcacatatgatcaagtcgtggaaaaagtagctgaaaaacttggcgtggatgacccatcgaaaattcgtcttacatcacataattgttattcgcaacagcctaagcctcaaccaataaagtacagaggcgttgaacgtctactggatatgctgattcattataaccagacttctgatattctgtactatgaagtattggacataccacttccagaattacaagcgctgaagacattaaaagttacctaccatcatgccacaaaagatgaggtgtcagttcacagtataagattaccaaaaaacagcactgttggcgatgtgctgaatgatatcaaaacgaaggttgagttgtctcataccaatgctgagctaagattacttgaggtcttttatcacaagatatacaaggtatttgcaccaaatgaaaagattgaaaacatcaatgatcagtactggacactgcgtgcagaggaggttccagaggaggagaaaaatcttggccccttcgatcgtttgattcatgtatatcattttacaaaagacactcaaaaccaaacgcaagttcagaactttggagaacctttttttatggttattcgtgaggatgagaccctatcttctatcaaagaacgtatacagaaaaagcttaaggttccagatgaggatttctcaaagtggaagtttgcatacatttcactcggtcgtcctgactattttgaagattcagatactgtagccctaaaattccagagaaacatgtatggagcttgggagcagtatcttggactggaacatccggacacggctcctaggaaggcacacacggctaatcagaaccggcattcattcgagagacctgtaaaaatttataactaggcatgttagaaattgagcgatgagctgccgctcaataccaagccaggctgaagttgctggcttgaaatagagagcatgttgctcaggtttttcgatggagctgtggaactagttcagaggagactgatcgggcgacttgtcatctttcctgtttgttttgctgccccggatatataaagttgtacagagatgaccccaccagacaattgtctttagtagataagataactttttacagtcgagtggccgatgttttagtcgatcactctgttctgcagttggtggtggtgctaggtggccttgagctgttgagggtacttgtctttcgactctttctgtatattattgacgcggcggatgtttgtaattccaatgatacatttcttacttgctggtttccggtgctttccttgctgcatcattctaatttggcattataatttagaattgagcgatgttcatcaccacttccatgatctattcgcagctgttcttg

SEQ ID NO: 220487 - DNA, 3996 bp, Zea Mays
tcccctcgcgatttccacctcctcccccacccccacctccgtaacccacttccaggtgggccccccacatcgccgccggtgacacgcacctccctccctgcctcccccgctaccgaccaccacgtccacgcccccggtcatgacgacctcgccgccgcccgccgagcaggaacagcaggaggaagaggaggtgctggtgccgcatggcccgcaccaggagctgcccaatggagcgcagccaatggaagttgtgcctgctgagccagctgctaccgtggagaaccaacagatagaggatccaccaatctcgagatttacttggaccattgagaatttatcaagagttagcacaaagaagctctactctgaaatttttgttgttggaggctacaagtggcgaattttgattttccctcgggggaataatgttgaattcttatctatgtatttggatgtagctgattctggagtcttgccctatggatggactagatacgcacaattcagcctctctgtggttaatcagattcacaacaagttcacaataagaaaagaaacacaacatcagttctctgctcgagaaagtgattggggtttcacttcatttatgccgctgggtgaactctacaacccaagtaggggttatcttgtaaatgatacttgtatagtggaagctgaagttgctgtgtgtaaagttgttgagtattggagttatgactctaaaaaggaaactggctatgttggtcttaaaaatcagggtgctacctgctatatgaattctcttcttcagacactctaccacattccgtatttcagaaaggctgtttatcacatgcccaccaccgagaacgatatgccctcaggaagcatcccactagctctacagtcactcttttataagttgcagtataatgacagcagtgtctctacaaaggagctcacaaaatcgtttgggtgggatatgcatgattcatttatgcaacatgatgtacaagaattgaacagagttctttccgagaagttggaagataagatgaagggaactgttgtggagggaacgatacaacaattgtttgaagggcaccacatgaactacattgagtgtatcaatgtggatttcaaatcaacaagaaaggaatccttctatggcaaatctccagcttgatgtcaaaggttgtcaggatgtctatgcttcatttgataagtacgtagaagtggagcgtctggaaggtgacaacaagtatcatgccgacaaacatggcctgcaggatgcaaaaaaaggagttctttttatcgacttccctcctgttttgcaacttcagctaaaacgttttgagtatgatttcatgcgtgacacgatggtgaagataaacgatcgttatgaatttccactccaattggatcttgatagagataatggaaaatatttatctcctgatgctgacaggaatgtgcgtaatctttatacccttcacagtgttcttgtccatagtggtggtgttcatggtggacattactatgctttcatacgacctacactttctgatcaatggttcaagtttgatgatgagcgtgtgacaaaagaagatgcaaagagggcactagaagagcaatatggtggtgaggaggagctacctcagacaaatcctggcttaaacaacaccccattcaagtttactaaatattcaaatgcatacatgcttgtgtacattcgtgaaagtgacaaggacaaaattatatgtaatgtggatgagaaagatatagcggagcatcttcggattagattagaaaatgaccgtgaagagaaggaacgtcggaagaaggaaaaagcggaggcacacctctatactataatcaaggttgcaagggatgatgacttaaaagctcagatagggaaagacatatattttgatcttgttgatcatgataaagtcccaagcttccgtatccagaaacagatgacctttgctcaattcaaggaggaggtagcaaaagagtttggtattcctacacagtttcaacgattttggctgtgggccaagcgacaaaaccatacctaccgacctaacaggccattgtgtcctcaagacgaagcacatactgttgggcagctaaaggaactggtgaacaaggcccacaacgcagaactgaaactgttcttggaagttgaacttggactggaccttaaacctcttcctcttcccgacaagactagagaagatatatttcttttcttcaaactctatgaacctgaaaaggaacagctgcggtatgttggtaggctttttgtaaaggcttcaggaagaccacaggacattctgctgaagttaaggatgttggcaggtttttcacaggatgatgatattgaactttatgaggaaattaagttcgagcccaatgtgatgtgtgaatacattgacaacaggcttctgtttcgatcttgccagcttgaagacggggatataatttgttttcaaaagccttcaaaaccagatagtgcagaccgatatcgatttcctgacgtcccatcctttttgacgtatatacgtaaccggcaggtggtgcacttccgttcattggagaagcccaaggacgacgaattttgccttgagatgtcaaagattttcacatatgatcaagtcgtggaaaaagtagctgaaaaacttggcgtggatgacccatcgaaaattcgtcttacatcacataattgttattcgcaacagcctaagcctcaaccaataaagtacagaggcgttgaacgtctactggatatgctgattcattataaccagacttctgatattctgtactatgaagtattggacataccacttccagaattacaagcgctgaagacattaaaagttacctaccatcatgccacaaaagatgaggtgtcagttcacagtataagattaccaaaaaacagcactgttggcgatgtgctgaatgatatcaaaacgaaggttgagttgtctcataccaatgctgagctaagattacttgaggtcttttatcacaagatatacaaggtatttgcaccaaatgaaaagattgaaaacatcaatgatcagtactggacactgcgtgcagaggaggttccagaggaggagaaaaatcttggccccttcgatcgtttgattcatgtatatcattttacaaaagacactcaaaaccaaacgcaagttcagaactttggagaacctttttttatggttattcgtgaggatgagaccctatcttctatcaaagaacgtatacagaaaaagcttaaggttccagatgaggatttctcaaagtggaagtttgcatacatttcactcggtcgtcctgactattttgaagattcagatactgtagccctaaaattccagagaaacatgtatggagcttgggagcagtatcttggactggaacatccggacacggctcctaggaaggcacacacggctaatcagaaccggcattcattcgagagacctgtaaaaatttataactaggcatgttagaaattgagcgatgagctgccgctcaataccaagccaggctgaagttgctggcttgaaatagagagcatgttgctcaggtttttcgatggagctgtggaactagttcagaggagactgatcgggcgacttgtcatctttcctgtttgttttgctgccccggatatataaagttgtacagagatgaccccaccagacaattgtctttagtagataagataactttttacagtcgagtggccgatgttttagtcgatcactctgttctgcagttggtggtggtgctaggtggccttgagctgttgagggtacttgtctttcgactctttctgtatattattgacgcggcggatgtttgtaattccaatgatacatttcttacttgctggtttccggtgctttccttgctgcatcattctaatttggcattataatttagaattgagcgatgttcatcaccacttccatgatctattcgcagctgttcttg

SEQ ID NO: 220488 - DNA, 4003 bp, Zea Mays
tcccctcgcgatttccacctcctcccccacccccacctccgtaacccacttccaggtgggccccccacatcgccgccggtgacacgcacctccctccctgcctcccccgctaccgaccaccacgtccacgcccccggtcatgacgacctcgccgccgcccgccgagcaggaacagcaggaggaagaggaggtgctggtgccgcatggcccgcaccaggagctgcccaatggagcgcagccaatggaagttgtgcctgctgagccagctgctaccgtggagaaccaacagatagaggatccaccaatctcgagatttacttggaccattgagaatttatcaagagttagcacaaagaagctctactctgaaatttttgttgttggaggctacaagtggcgaattttgattttccctcgggggaataatgttgaattcttatctatgtatttggatgtagctgattctggagtcttgccctatggatggactagatacgcacaattcagcctctctgtggttaatcagattcacaacaagttcacaataagaaaagaaacacaacatcagttctctgctcgagaaagtgattggggtttcacttcatttatgccgctgggtgaactctacaacccaagtaggggttatcttgtaaatgatacttgtatagtggaagctgaagttgctgtgtgtaaagttgttgagtattggagttatgactctaaaaaggaaactggctatgttggtcttaaaaatcagggtgctacctgctatatgaattctcttcttcagacactctaccacattccgtatttcagaaaggctgtttatcacatgcccaccaccgagaacgatatgccctcaggaagcatcccactagctctacagtcactcttttataagttgcagtataatgacagcagtgtctctacaaaggagctcacaaaatcgtttgggtgggatatgcatgattcatttatgcaacatgatgtacaagaattgaacagagttctttccgagaagttggaagataagatgaaggtttgacatctggaactgttgtggagggaacgatacaacaattgtttgaagggcaccacatgaactacattgagtgtatcaatgtggatttcaaatcaacaagaaaggaatccttctatgatctccagcttgatgtcaaaggttgtcaggatgtctatgcttcatttgataagtacgtagaagtggagcgtctggaaggtgacaacaagtatcatgccgacaaacatggcctgcaggatgcaaaaaaaggagttctttttatcgacttccctcctgttttgcaacttcagctaaaacgttttgagtatgatttcatgcgtgacacgatggtgaagataaacgatcgttatgaatttccactccaattggatcttgatagagataatggaaaatatttatctcctgatgctgacaggaatgtgcgtaatctttatacccttcacagtgttcttgtccatagtggtggtgttcatggtggacattactatgctttcatacgacctacactttctgatcaatggttcaagtttgatgatgagcgtgtgacaaaagaagatgcaaagagggcactagaagagcaatatggtggtgaggaggagctacctcagacaaatcctggcttaaacaacaccccattcaagtttactaaatattcaaatgcatacatgcttgtgtacattcgtgaaagtgacaaggacaaaattatatgtaatgtggatgagaaagatatagcggagcatcttcggattagattagaaaatgaccgtgaagagaaggaacgtcggaagaaggaaaaagcggaggcacacctctatactataatcaaggttgcaagggatgatgacttaaaagctcagatagggaaagacatatattttgatcttgttgatcatgataaagtcccaagcttccgtatccagaaacagatgacctttgctcaattcaaggaggaggtagcaaaagagtttggtattcctacacagtttcaacgattttggctgtgggccaagcgacaaaaccatacctaccgacctaacaggccattgtgtcctcaagacgaagcacatactgttgggcagctaaaggaactggtgaacaaggcccacaacgcagaactgaaactgttcttggaagttgaacttggactggaccttaaacctcttcctcttcccgacaagactagagaagatatatttcttttcttcaaactctatgaacctgaaaaggaacagctgcggtatgttggtaggctttttgtaaaggcttcaggaagaccacaggacattctgctgaagttaaggatgttggcaggtttttcacaggatgatgatattgaactttatgaggaaattaagttcgagcccaatgtgatgtgtgaatacattgacaacaggcttctgtttcgatcttgccagcttgaagacggggatataatttgttttcaaaagccttcaaaaccagatagtgcagaccgatatcgatttcctgacgtcccatcctttttgacgtatatacgtaaccggcaggtggtgcacttccgttcattggagaagcccaaggacgacgaattttgccttgagatgtcaaagattttcacatatgatcaagtcgtggaaaaagtagctgaaaaacttggcgtggatgacccatcgaaaattcgtcttacatcacataattgttattcgcaacagcctaagcctcaaccaataaagtacagaggcgttgaacgtctactggatatgctgattcattataaccagacttctgatattctgtactatgaagtattggacataccacttccagaattacaagcgctgaagacattaaaagttacctaccatcatgccacaaaagatgaggtgtcagttcacagtataagattaccaaaaaacagcactgttggcgatgtgctgaatgatatcaaaacgaaggttgagttgtctcataccaatgctgagctaagattacttgaggtcttttatcacaagatatacaaggtatttgcaccaaatgaaaagattgaaaacatcaatgatcagtactggacactgcgtgcagaggaggttccagaggaggagaaaaatcttggccccttcgatcgtttgattcatgtatatcattttacaaaagacactcaaaaccaaacgcaagttcagaactttggagaacctttttttatggttattcgtgaggatgagaccctatcttctatcaaagaacgtatacagaaaaagcttaaggttccagatgaggatttctcaaagtggaagtttgcatacatttcactcggtcgtcctgactattttgaagattcagatactgtagccctaaaattccagagaaacatgtatggagcttgggagcagtatcttggactggaacatccggacacggctcctaggaaggcacacacggctaatcagaaccggcattcattcgagagacctgtaaaaatttataactaggcatgttagaaattgagcgatgagctgccgctcaataccaagccaggctgaagttgctggcttgaaatagagagcatgttgctcaggtttttcgatggagctgtggaactagttcagaggagactgatcgggcgacttgtcatctttcctgtttgttttgctgccccggatatataaagttgtacagagatgaccccaccagacaattgtctttagtagataagataactttttacagtcgagtggccgatgttttagtcgatcactctgttctgcagttggtggtggtgctaggtggccttgagctgttgagggtacttgtctttcgactctttctgtatattattgacgcggcggatgtttgtaattccaatgatacatttcttacttgctggtttccggtgctttccttgctgcatcattctaatttggcattataatttagaattgagcgatgttcatcaccacttccatgatctattcgcagctgttcttg

SEQ ID NO: 220489 - DNA, 3977 bp, Zea Mays
tcccctcgcgatttccacctcctcccccacccccacctccgtaacccacttccaggtgggccccccacatcgccgccggtgacacgcacctccctccctgcctcccccgctaccgaccaccacgtccacgcccccggtcatgacgacctcgccgccgcccgccgagcaggaacagcaggaggaagaggaggtgctggtgccgcatggcccgcaccaggagctgcccaatggagcgcagccaatggaagttgtgcctgctgagccagctgctaccgtggagaaccaacagatagaggatccaccaatctcgagatttacttggaccattgagaatttatcaagagttagcacaaagaagctctactctgaaatttttgttgttggaggctacaagtggcgaattttgattttccctcgggggaataatgttgaattcttatctatgtatttggatgtagctgattctggagtcttgccctatggatggactagatacgcacaattcagcctctctgtggttaatcagattcacaacaagttcacaataagaaaagaaacacaacatcagttctctgctcgagaaagtgattggggtttcacttcatttatgccgctgggtgaactctacaacccaagtaggggttatcttgtaaatgatacttgtatagtggaagctgaagttgctgtgtgtaaagttgttgagtattggagttatgactctaaaaaggaaactggctatgttggtcttaaaaatcagggtgctacctgctatatgaattctcttcttcagacactctaccacattccgtatttcagaaaggctgtttatcacatgcccaccaccgagaacgatatgccctcaggaagcatcccactagctctacagtcactcttttataagttgcagtataatgacagcagtgtctctacaaaggagctcacaaaatcgtttgggtgggatatgcatgattcatttatgcaacatgatgtacaagaattgaacagagttctttccgagaagttggaagataagatgaagggaactgttgtggagggaacgatacaacaattgtttgaagggcaccacatgaactacattgagtgtatcaatgtggatttcaaatcaacaagaaaggaatccttctatgatctccagcttgatgtcaaaggttgtcaggatgtctatgcttcatttgataagtacgtagaagtggagcgtctggaaggtgacaacaagtatcatgccgacaaacatggcctgcaggatgcaaaaaaaggagttctttttatcgacttccctcctgttttgcaacttcagctaaaacgttttgagtatgatttcatgcgtgacacgatggtgaagataaacgatcgttatgaatttccactccaattggatcttgatagagataatggaaaatatttatctcctgatgctgacaggaatgtgcgtaatctttatacccttcacagtggtggtgttcatggtggacattactatgctttcatacgacctacactttctgatcaatggttcaagtttgatgatgagcgtgtgacaaaagaagatgcaaagagggcactagaagagcaatatggtggtgaggaggagctacctcagacaaatcctggcttaaacaacaccccattcaagtttactaaatattcaaatgcatacatgcttgtgtacattcgtgaaagtgacaaggacaaaattatatgtaatgtggatgagaaagatatagcggagcatcttcggattagattagaaaatgaccgtgaagagaaggaacgtcggaagaaggaaaaagcggaggcacacctctatactataatcaaggttgcaagggatgatgacttaaaagctcagatagggaaagacatatattttgatcttgttgatcatgataaagtcccaagcttccgtatccagaaacagatgacctttgctcaattcaaggaggaggtagcaaaagagtttggtattcctacacagtttcaacgattttggctgtgggccaagcgacaaaaccatacctaccgacctaacaggccattgtgtcctcaagacgaagcacatactgttgggcagctaaaggaactggtgaacaaggcccacaacgcagaactgaaactgttcttggaagttgaacttggactggaccttaaacctcttcctcttcccgacaagactagagaagatatatttcttttcttcaaactctatgaacctgaaaaggaacagctgcggtatgttggtaggctttttgtaaaggcttcaggaagaccacaggacattctgctgaagttaaggatgttggcaggtttttcacaggatgatgatattgaactttatgaggaaattaagttcgagcccaatgtgatgtgtgaatacattgacaacaggcttctgtttcgatcttgccagcttgaagacggggatataatttgttttcaaaagccttcaaaaccagatagtgcagaccgatatcgatttcctgacgtcccatcctttttgacgtatatacgtaaccggcaggtggtgcacttccgttcattggagaagcccaaggacgacgaattttgccttgagatgtcaaagattttcacatatgatcaagtcgtggaaaaagtagctgaaaaacttggcgtggatgacccatcgaaaattcgtcttacatcacataattgttattcgcaacagcctaagcctcaaccaataaagtacagaggcgttgaacgtctactggatatgctgattcattataaccagacttctgatattctgtactatgaagtattggacataccacttccagaattacaagcgctgaagacattaaaagttacctaccatcatgccacaaaagatgaggtgtcagttcacagtataagattaccaaaaaacagcactgttggcgatgtgctgaatgatatcaaaacgaaggttgagttgtctcataccaatgctgagctaagattacttgaggtcttttatcacaagatatacaaggtatttgcaccaaatgaaaagattgaaaacatcaatgatcagtactggacactgcgtgcagaggaggttccagaggaggagaaaaatcttggccccttcgatcgtttgattcatgtatatcattttacaaaagacactcaaaaccaaacgcaagttcagaactttggagaacctttttttatggttattcgtgaggatgagaccctatcttctatcaaagaacgtatacagaaaaagcttaaggttccagatgaggatttctcaaagtggaagtttgcatacatttcactcggtcgtcctgactattttgaagattcagatactgtagccctaaaattccagagaaacatgtatggagcttgggagcagtatcttggactggaacatccggacacggctcctaggaaggcacacacggctaatcagaaccggcattcattcgagagacctgtaaaaatttataactaggcatgttagaaattgagcgatgagctgccgctcaataccaagccaggctgaagttgctggcttgaaatagagagcatgttgctcaggtttttcgatggagctgtggaactagttcagaggagactgatcgggcgacttgtcatctttcctgtttgttttgctgccccggatatataaagttgtacagagatgaccccaccagacaattgtctttagtagataagataactttttacagtcgagtggccgatgttttagtcgatcactctgttctgcagttggtggtggtgctaggtggccttgagctgttgagggtacttgtctttcgactctttctgtatattattgacgcggcggatgtttgtaattccaatgatacatttcttacttgctggtttccggtgctttccttgctgcatcattctaatttggcattataatttagaattgagcgatgttcatcaccacttccatgatctattcgcagctgttcttg

SEQ ID NO: 220490 - DNA, 3989 bp, Zea Mays
tcccctcgcgatttccacctcctcccccacccccacctccgtaacccacttccaggtgggccccccacatcgccgccggtgacacgcacctccctccctgcctcccccgctaccgaccaccacgtccacgcccccggtcatgacgacctcgccgccgcccgccgaggaacagcaggaggaagaggaggtgctggtgccgcatggcccgcaccaggagctgcccaatggagcgcagccaatggaagttgtgcctgctgagccagctgctaccgtggagaaccaacagatagaggatccaccaatctcgagatttacttggaccattgagaatttatcaagagttagcacaaagaagctctactctgaaatttttgttgttggaggctacaagtggcgaattttgattttccctcgggggaataatgttgaattcttatctatgtatttggatgtagctgattctggagtcttgccctatggatggactagatacgcacaattcagcctctctgtggttaatcagattcacaacaagttcacaataagaaaagaaacacaacatcagttctctgctcgagaaagtgattggggtttcacttcatttatgccgctgggtgaactctacaacccaagtaggggttatcttgtaaatgatacttgtatagtggaagctgaagttgctgtgtgtaaagttgttgagtattggagttatgactctaaaaaggaaactggctatgttggtcttaaaaatcagggtgctacctgctatatgaattctcttcttcagacactctaccacattccgtatttcagaaaggctgtttatcacatgcccaccaccgagaacgatatgccctcaggaagcatcccactagctctacagtcactcttttataagttgcagtataatgacagcagtgtctctacaaaggagctcacaaaatcgtttgggtgggatatgcatgattcatttatgcaacatgatgtacaagaattgaacagagttctttccgagaagttggaagataagatgaagggaactgttgtggagggaacgatacaacaattgtttgaagggcaccacatgaactacattgagtgtatcaatgtggatttcaaatcaacaagaaaggaatccttctatgatctccagcttgatgtcaaaggttgtcaggatgtctatgcttcatttgataagtacgtagaagtggagcgtctggaaggtgacaacaagtatcatgccgacaaacatggcctgcaggatgcaaaaaaaggagttctttttatcgacttccctcctgttttgcaacttcagctaaaacgttttgagtatgatttcatgcgtgacacgatggtgaagataaacgatcgttatgaatttccactccaattggatcttgatagagataatggaaaatatttatctcctgatgctgacaggaatgtgcgtaatctttatacccttcacagtgttcttgtccatagtggtggtgttcatggtggacattactatgctttcatacgacctacactttctgatcaatggttcaagtttgatgatgagcgtgtgacaaaagaagatgcaaagagggcactagaagagcaatatggtggtgaggaggagctacctcagacaaatcctggcttaaacaacaccccattcaagtttactaaatattcaaatgcatacatgcttgtgtacattcgtgaaagtgacaaggacaaaattatatgtaatgtggatgagaaagatatagcggagcatcttcggattagattagaaaatgaccgtgaagagaaggaacgtcggaagaaggaaaaagcggaggcacacctctatactataatcaaggttgcaagggatgatgacttaaaagctcagatagggaaagacatatattttgatcttgttgatcatgataaagtcccaagcttccgtatccagaaacagatgacctttgctcaattcaaggaggaggtagcaaaagagtttggtattcctacacagtttcaacgattttggctgtgggccaagcgacaaaaccatacctaccgacctaacaggccattgtgtcctcaagacgaagcacatactgttgggcagctaaaggaactggtgaacaaggcccacaacgcagaactgaaactgttcttggaagttgaacttggactggaccttaaacctcttcctcttcccgacaagactagagaagatatatttcttttcttcaaactctatgaacctgaaaaggaacagctgcggtatgttggtaggctttttgtaaaggcttcaggaagaccacaggacattctgctgaagttaaggatgttggcaggtttttcacaggatgatgatattgaactttatgaggaaattaagttcgagcccaatgtgatgtgtgaatacattgacaacaggcttctgtttcgatcttgccagcttgaagacggggatataatttgttttcaaaagccttcaaaaccagatagtgcagaccgatatcgatttcctgacgtcccatcctttttgacgtatatacgtaaccggcaggtggtgcacttccgttcattggagaagcccaaggacgacgaattttgccttgagatgtcaaagattttcacatatgatcaagtcgtggaaaaagtagctgaaaaacttggcgtggatgacccatcgaaaattcgtcttacatcacataattgttattcgcaacagcctaagcctcaaccaataaagtacagaggcgttgaacgtctactggatatgctgattcattataaccagacttctgatattctgtactatgaagtattggacataccacttccagaattacaagcgctgaagacattaaaagttacctaccatcatgccacaaaagatgaggtgtcagttcacagtataagattaccaaaaaacagcactgttggcgatgtgctgaatgatatcaaaacgaaggttgagttgtctcataccaatgctgagctaagattacttgaggtcttttatcacaagatatacaaggtatttgcaccaaatgaaaagattgaaaacatcaatgatcagtactggacactgcgtgcagaggaggttccagaggaggagaaaaatcttggccccttcgatcgtttgattcatgtatatcattttacaaaagacactcaaaaccaaacgcaagttcagaactttggagaacctttttttatggttattcgtgaggatgagaccctatcttctatcaaagaacgtatacagaaaaagcttaaggttccagatgaggatttctcaaagtggaagtttgcatacatttcactcggtcgtcctgactattttgaagattcagatactgtagccctaaaattccagagaaacatgtatggagcttgggagcagtatcttggactggaacatccggacacggctcctaggaaggcacacacggctaatcagaaccggcattcattcgagagacctgtaaaaatttataactaggcatgttagaaattgagcgatgagctgccgctcaataccaagccaggctgaagttgctggcttgaaatagagagcatgttgctcaggtttttcgatggagctgtggaactagttcagaggagactgatcgggcgacttgtcatctttcctgtttgttttgctgccccggatatataaagttgtacagagatgaccccaccagacaattgtctttagtagataagataactttttacagtcgagtggccgatgttttagtcgatcactctgttctgcagttggtggtggtgctaggtggccttgagctgttgagggtacttgtctttcgactctttctgtatattattgacgcggcggatgtttgtaattccaatgatacatttcttacttgctggtttccggtgctttccttgctgcatcattctaatttggcattataatttagaattgagcgatgttcatcaccacttccatgatctattcgcagctgttcttg

SEQ ID NO: 220491 - DNA, 4040 bp, Zea Mays
tcccctcgcgatttccacctcctcccccacccccacctccgtaacccacttccaggtgggccccccacatcgccgccggtgacacgcacctccctccctgcctcccccgctaccgaccaccacgtccacgcccccggtcatgacgacctcgccgccgcccgccgagcaggaacagcaggaggaagaggaggtgctggtgccgcatggcccgcaccaggagctgcccaatggagcgcagccaatggaagttgtgcctgctgagccagctgctaccgtggagaaccaacagatagaggatccaccaatctcgagatttacttggaccattgagaatttatcaagagttagcacaaagaagctctactctgaaatttttgttgttggaggctacaagtggcgaattttgattttccctcgggggaataatgttgaattcttatctatgtatttggatgtagctgattctggagtcttgccctatggatggactagatacgcacaattcagcctctctgtggttaatcagattcacaacaagttcacaataagaaaagaaacacaacatcagttctctgctcgagaaagtgattggggtttcacttcatttatgccgctgggtgaactctacaacccaagtaggggttatcttgtaaatgatacttgtatagtggaagctgaagttgctgtgtgtaaagttgttgagtattggagttatgactctaaaaaggaaactggctatgttggtcttaaaaatcagggtgctacctgctatatgaattctcttcttcagacactctaccacattccgtatttcagaaaggctgtttatcacatgcccaccaccgagaacgatatgccctcaggaagcatcccactagctctacagtcactcttttataagttgcagtataatgacagcagtgtctctacaaaggagctcacaaaatcgtttgggtgggatatgcatgattcatttatgcaacatgatgtacaagaattgaacagagttctttccgagaagttggaagataagatgaagggaactgttgtggagggaacgatacaacaattgtttgaagggcaccacatgaactacattgagtatctccagcttgatgtcaaaggttgtcaggatgtctatgcttcatttgataagtacgtagaagtggagcgtctggaaggtgacaacaagtatcatgccgacaaacatggcctgcaggtcctagagccctctgaggcgtctatggaccacaatgggaggcaacatgctcatcgctactggatgtcttcaattccttgtaggtgtgttaaggatgcaaaaaaaggagttctttttatcgacttccctcctgttttgcaacttcagctaaaacgttttgagtatgatttcatgcgtgacacgatggtgaagataaacgatcgttatgaatttccactccaattggatcttgatagagataatggaaaatatttatctcctgatgctgacaggaatgtgcgtaatctttatacccttcacagtgttcttgtccatagtggtggtgttcatggtggacattactatgctttcatacgacctacactttctgatcaatggttcaagtttgatgatgagcgtgtgacaaaagaagatgcaaagagggcactagaagagcaatatggtggtgaggaggagctacctcagacaaatcctggcttaaacaacaccccattcaagtttactaaatattcaaatgcatacatgcttgtgtacattcgtgaaagtgacaaggacaaaattatatgtaatgtggatgagaaagatatagcggagcatcttcggattagattagaaaatgaccgtgaagagaaggaacgtcggaagaaggaaaaagcggaggcacacctctatactataatcaaggttgcaagggatgatgacttaaaagctcagatagggaaagacatatattttgatcttgttgatcatgataaagtcccaagcttccgtatccagaaacagatgacctttgctcaattcaaggaggaggtagcaaaagagtttggtattcctacacagtttcaacgattttggctgtgggccaagcgacaaaaccatacctaccgacctaacaggccattgtgtcctcaagacgaagcacatactgttgggcagctaaaggaactggtgaacaaggcccacaacgcagaactgaaactgttcttggaagttgaacttggactggaccttaaacctcttcctcttcccgacaagactagagaagatatatttcttttcttcaaactctatgaacctgaaaaggaacagctgcggtatgttggtaggctttttgtaaaggcttcaggaagaccacaggacattctgctgaagttaaggatgttggcaggtttttcacaggatgatgatattgaactttatgaggaaattaagttcgagcccaatgtgatgtgtgaatacattgacaacaggcttctgtttcgatcttgccagcttgaagacggggatataatttgttttcaaaagccttcaaaaccagatagtgcagaccgatatcgatttcctgacgtcccatcctttttgacgtatatacgtaaccggcaggtggtgcacttccgttcattggagaagcccaaggacgacgaattttgccttgagatgtcaaagattttcacatatgatcaagtcgtggaaaaagtagctgaaaaacttggcgtggatgacccatcgaaaattcgtcttacatcacataattgttattcgcaacagcctaagcctcaaccaataaagtacagaggcgttgaacgtctactggatatgctgattcattataaccagacttctgatattctgtactatgaagtattggacataccacttccagaattacaagcgctgaagacattaaaagttacctaccatcatgccacaaaagatgaggtgtcagttcacagtataagattaccaaaaaacagcactgttggcgatgtgctgaatgatatcaaaacgaaggttgagttgtctcataccaatgctgagctaagattacttgaggtcttttatcacaagatatacaaggtatttgcaccaaatgaaaagattgaaaacatcaatgatcagtactggacactgcgtgcagaggaggttccagaggaggagaaaaatcttggccccttcgatcgtttgattcatgtatatcattttacaaaagacactcaaaaccaaacgcaagttcagaactttggagaacctttttttatggttattcgtgaggatgagaccctatcttctatcaaagaacgtatacagaaaaagcttaaggttccagatgaggatttctcaaagtggaagtttgcatacatttcactcggtcgtcctgactattttgaagattcagatactgtagccctaaaattccagagaaacatgtatggagcttgggagcagtatcttggactggaacatccggacacggctcctaggaaggcacacacggctaatcagaaccggcattcattcgagagacctgtaaaaatttataactaggcatgttagaaattgagcgatgagctgccgctcaataccaagccaggctgaagttgctggcttgaaatagagagcatgttgctcaggtttttcgatggagctgtggaactagttcagaggagactgatcgggcgacttgtcatctttcctgtttgttttgctgccccggatatataaagttgtacagagatgaccccaccagacaattgtctttagtagataagataactttttacagtcgagtggccgatgttttagtcgatcactctgttctgcagttggtggtggtgctaggtggccttgagctgttgagggtacttgtctttcgactctttctgtatattattgacgcggcggatgtttgtaattccaatgatacatttcttacttgctggtttccggtgctttccttgctgcatcattctaatttggcattataatttagaattgagcgatgttcatcaccacttccatgatctattcgcagctgttcttg

SEQ ID NO: 220492 - DNA, 4085 bp, Zea Mays
tcccctcgcgatttccacctcctcccccacccccacctccgtaacccacttccaggtgggccccccacatcgccgccggtgacacgcacctccctccctgcctcccccgctaccgaccaccacgtccacgcccccggtcatgacgacctcgccgccgcccgccgagcaggaacagcaggaggaagaggaggtgctggtgccgcatggcccgcaccaggagctgcccaatggagcgcagccaatggaagttgtgcctgctgagccagctgctaccgtggagaaccaacagatagaggatccaccaatctcgagatttacttggaccattgagaatttatcaagagttagcacaaagaagctctactctgaaatttttgttgttggaggctacaagtggcgaattttgattttccctcgggggaataatgttgaattcttatctatgtatttggatgtagctgattctggagtcttgccctatggatggactagatacgcacaattcagcctctctgtggttaatcagattcacaacaagttcacaataagaaaagaaacacaacatcagttctctgctcgagaaagtgattggggtttcacttcatttatgccgctgggtgaactctacaacccaagtaggggttatcttgtaaatgatacttgtatagtggaagctgaagttgctgtgtgtaaagttgttgagtattggagttatgactctaaaaaggaaactggctatgttggtcttaaaaatcagggtgctacctgctatatgaattctcttcttcagacactctaccacattccgtatttcagaaaggctgtttatcacatgcccaccaccgagaacgatatgccctcaggaagcatcccactagctctacagtcactcttttataagttgcagtataatgacagcagtgtctctacaaaggagctcacaaaatcgtttgggtgggatatgcatgattcatttatgcaacatgatgtacaagaattgaacagagttctttccgagaagttggaagataagatgaagggaactgttgtggagggaacgatacaacaattgtttgaagggcaccacatgaactacattgagtgtatcaatgtggatttcaaatcaacaagaaaggaatccttctatgatctccagcttgatgtcaaaggttgtcaggatgtctatgcttcatttgataagtacgtagaagtggagcgtctggaaggtgacaacaagtatcatgccgacaaacatggcctgcaggtcctagagccctctgaggcgtctatggaccacaatgggaggcaacatgctcatcgctactggatgtcttcaattccttgtaggtgtgttaaggatgcaaaaaaaggagttctttttatcgacttccctcctgttttgcaacttcagctaaaacgttttgagtatgatttcatgcgtgacacgatggtgaagataaacgatcgttatgaatttccactccaattggatcttgatagagataatggaaaatatttatctcctgatgctgacaggaatgtgcgtaatctttatacccttcacagtgttcttgtccatagtggtggtgttcatggtggacattactatgctttcatacgacctacactttctgatcaatggttcaagtttgatgatgagcgtgtgacaaaagaagatgcaaagagggcactagaagagcaatatggtggtgaggaggagctacctcagacaaatcctggcttaaacaacaccccattcaagtttactaaatattcaaatgcatacatgcttgtgtacattcgtgaaagtgacaaggacaaaattatatgtaatgtggatgagaaagatatagcggagcatcttcggattagattagaaaatgaccgtgaagagaaggaacgtcggaagaaggaaaaagcggaggcacacctctatactataatcaaggttgcaagggatgatgacttaaaagctcagatagggaaagacatatattttgatcttgttgatcatgataaagtcccaagcttccgtatccagaaacagatgacctttgctcaattcaaggaggaggtagcaaaagagtttggtattcctacacagtttcaacgattttggctgtgggccaagcgacaaaaccatacctaccgacctaacaggccattgtgtcctcaagacgaagcacatactgttgggcagctaaaggaactggtgaacaaggcccacaacgcagaactgaaactgttcttggaagttgaacttggactggaccttaaacctcttcctcttcccgacaagactagagaagatatatttcttttcttcaaactctatgaacctgaaaaggaacagctgcggtatgttggtaggctttttgtaaaggcttcaggaagaccacaggacattctgctgaagttaaggatgttggcaggtttttcacaggatgatgatattgaactttatgaggaaattaagttcgagcccaatgtgatgtgtgaatacattgacaacaggcttctgtttcgatcttgccagcttgaagacggggatataatttgttttcaaaagccttcaaaaccagatagtgcagaccgatatcgatttcctgacgtcccatcctttttgacgtatatacgtaaccggcaggtggtgcacttccgttcattggagaagcccaaggacgacgaattttgccttgagatgtcaaagattttcacatatgatcaagtcgtggaaaaagtagctgaaaaacttggcgtggatgacccatcgaaaattcgtcttacatcacataattgttattcgcaacagcctaagcctcaaccaataaagtacagaggcgttgaacgtctactggatatgctgattcattataaccagacttctgatattctgtactatgaagtattggacataccacttccagaattacaagcgctgaagacattaaaagttacctaccatcatgccacaaaagatgaggtgtcagttcacagtataagattaccaaaaaacagcactgttggcgatgtgctgaatgatatcaaaacgaaggttgagttgtctcataccaatgctgagctaagattacttgaggtcttttatcacaagatatacaaggtatttgcaccaaatgaaaagattgaaaacatcaatgatcagtactggacactgcgtgcagaggaggttccagaggaggagaaaaatcttggccccttcgatcgtttgattcatgtatatcattttacaaaagacactcaaaaccaaacgcaagttcagaactttggagaacctttttttatggttattcgtgaggatgagaccctatcttctatcaaagaacgtatacagaaaaagcttaaggttccagatgaggatttctcaaagtggaagtttgcatacatttcactcggtcgtcctgactattttgaagattcagatactgtagccctaaaattccagagaaacatgtatggagcttgggagcagtatcttggactggaacatccggacacggctcctaggaaggcacacacggctaatcagaaccggcattcattcgagagacctgtaaaaatttataactaggcatgttagaaattgagcgatgagctgccgctcaataccaagccaggctgaagttgctggcttgaaatagagagcatgttgctcaggtttttcgatggagctgtggaactagttcagaggagactgatcgggcgacttgtcatctttcctgtttgttttgctgccccggatatataaagttgtacagagatgaccccaccagacaattgtctttagtagataagataactttttacagtcgagtggccgatgttttagtcgatcactctgttctgcagttggtggtggtgctaggtggccttgagctgttgagggtacttgtctttcgactctttctgtatattattgacgcggcggatgtttgtaattccaatgatacatttcttacttgctggtttccggtgctttccttgctgcatcattctaatttggcattataatttagaattgagcgatgttcatcaccacttccatgatctattcgcagctgttcttg

SEQ ID NO: 220493 - DNA, 1872 bp, Zea Mays
tttcatgattctaggtgcggaggatgtttggctgccagctgccactcctcccttaggaccttaaacctcttcctcttcccgacaagactagagaagatatatttcttttcttcaaactctatgaacctgaaaaggaacagctgcggtatgttggtaggctttttgtaaaggcttcaggaagaccacaggacattctgctgaagttaaggatgttggcaggtttttcacaggatgatgatattgaactttatgaggaaattaagttcgagcccaatgtgatgtgtgaatacattgacaacaggcttctgtttcgatcttgccagcttgaagacggggatataatttgttttcaaaagccttcaaaaccagatagtgcagaccgatatcgatttcctgacgtcccatcctttttgacgtatatacgtaaccggcaggtggtgcacttccgttcattggagaagcccaaggacgacgaattttgccttgagatgtcaaagattttcacatatgatcaagtcgtggaaaaagtagctgaaaaacttggcgtggatgacccatcgaaaattcgtcttacatcacataattgttattcgcaacagcctaagcctcaaccaataaagtacagaggcgttgaacgtctactggatatgctgattcattataaccagacttctgatattctgtactatgaagtattggacataccacttccagaattacaagcgctgaagacattaaaagttacctaccatcatgccacaaaagatgaggtgtcagttcacagtataagattaccaaaaaacagcactgttggcgatgtgctgaatgatatcaaaacgaaggttgagttgtctcataccaatgctgagctaagattacttgaggtcttttatcacaagatatacaaggtatttgcaccaaatgaaaagattgaaaacatcaatgatcagtactggacactgcgtgcagaggaggttccagaggaggagaaaaatcttggccccttcgatcgtttgattcatgtatatcattttacaaaagacactcaaaaccaaacgcaagttcagaactttggagaacctttttttatggttattcgtgaggatgagaccctatcttctatcaaagaacgtatacagaaaaagcttaaggttccagatgaggatttctcaaagtggaagtttgcatacatttcactcggtcgtcctgactattttgaagattcagatactgtagccctaaaattccagagaaacatgtatggagcttgggagcagtatcttggactggaacatccggacacggctcctaggaaggcacacacggctaatcagaaccggcattcattcgagagacctgtaaaaatttataactaggcatgttagaaattgagcgatgagctgccgctcaataccaagccaggctgaagttgctggcttgaaatagagagcatgttgctcaggtttttcgatggagctgtggaactagttcagaggagactgatcgggcgacttgtcatctttcctgtttgttttgctgccccggatatataaagttgtacagagatgaccccaccagacaattgtctttagtagataagataactttttacagtcgagtggccgatgttttagtcgatcactctgttctgcagttggtggtggtgctaggtggccttgagctgttgagggtacttgtctttcgactctttctgtatattattgacgcggcggatgtttgtaattccaatgatacatttcttacttgctggtttccggtgctttccttgctgcatcattctaatttggcattataatttagaattgagcgatgttcatcaccacttccatgatctattcgcagctgttcttg

SEQ ID NO: 220494 - DNA, 2691 bp, Zea Mays
aatttggacattgtgtataccttgcatcttcaccaggtttcatcaccgtgctctgctggagttatagcattttcagcaaggatatggagtacaccccctgcacagcaagttcctttgtatcccacatctcgctgctcgaggaagttcttggctggaggttttgtctttacggagacttcctggtcatctcttttgtcaactgcacttgaggatcaacccacacttagtgactgccttgcctggtcccatgctgtcagacattagagttgcccagtgattacactattacagtgcagctgtagcacatttatttgagcatggtggatctgtttctctggcaacattccagtaatctttgtcttggtgctaatcagccagcagaagttaccatcaagacatctttggacacttggatctaacgcttagagctttgccttcgcatataggctctaggtttgggttttcgttttctgctagctttcttctactctaccactgtaagttttcagtctgatcggtccaaagtttggtgtgtattggttacgctgtccttcaccagccttcactttgcatggcgtgaccttagagaagacgtgttcaagattttgttgtcgcaaaagcatgggaatagcatacatagctttgagaggagtctccagtgactttggtgttgtaacatccaaagacactcctgttatacatatatgagtcctgttttttactatacaactgttctgaaataagggcagttctgtgcaccaccagcgaataaaatggagagatatacaattatcaacgaagttggtgatggaacatttgggagtgtttggcgtgcaaccaataaggaaagcggtgaagtggttgcgatcaagaagatgaagaaaaagtattattcttgggaagagtgcataaacctccgtgaagtgaagtccctgcgaaggatgaaccatccaaacattgtaaagctcaaagaagtcataagagagagtgatacgctgttctttgtttttgagtacatggaatgcagtctttatcagctgatgaagagcagagggaagcccttttcagagactgaaatccgaaactggtgctttcaaatatttcaagctctgagtcacatgcaccagcgtggatattttcaccgtgaccttaagcctgaaaatttgcttgttacaaaggaactcatcaagatagcggattttgggcttgctcgtgaaatttcttctgagccaccttatacggaatatgtgtccactcgttggtatcgtgcccctgaagttcttcttcaagctactgtttataatgctgcagttgacatgtgggcaatgggtgccattatcgcggagctattttcactgcgacctctttttcctggatcaagcattattggcactccaaatcagcgtacttggcctgaaggactgcagctagcagcatctatgggttttcagttccctcagtgtgaaagtgtacatctttcggaagtggttcctttagcaagcaaagatgcaatcaatcttatctcgtggctttgctcatgggacccacgaagaaggccaacagcagtggaggttttgcagcatcccttctttcagccatgcttctatgtcccaccttcacttcgcttcaaatctactggatatgcatcaacgccaccatcagctggggctaaaggagctgttgatcagaagaacattaggagatactacatgggtactgtacccaatgcgaggccaacagttaattactcgtacttgagaaacaatgctcctgcaagagcagttggtgcacaaaggaaattggagttggattatcagctcccagagactaataaccataataaggtgacaaaggcagaagcgatgaaccagtcttggtccagaccagcagcagtaaggagcaatgcaggaaatcatcttgccaacgacctgaacccccgtgtacctgaccttgccgagaagctgtctcagttgtcaatgggccccaacagggtgtcgggtttgggttccgagaggtttgttagaacccatgagaacgctgccaagcgccccttgcccgtgggatccagggcgtggcatggtccagctgaccccttccggcgcccatacgagatgccaggtgatagaactctccttccaaggaatctcgttcgctgaggctgtgaagctcttcgcaagaaacatatccaacgctcgctgtcttcggagctactcttccccggctatttacctcgcaacaataaataaacaaccaaacttcgtttccagcagtgggtgttgctcagcattgtctgttaccgtgcttgtgcgtgacgaggataagaggcgtccgggtttgtgcaccccccccccccccccgggtcctcgagggctccagggctggttggttgcagcatggcccgatgtgcctccatgtgatatcgtttttttaattatgctgtgcgatgtgtgattggtaacactgcttcagttgttaccgctgcttgttcagtgggtttgtatgaactgtgacatgctccgctaaacgttattctaaatactggtatgcaaacatgtcgaaggtgaacaatcaatggtgtatgtagagtagacttaaatggtaactgccttgtttcattctttacaagcctactctagtcccaattcgcatggtaactgccctattttgatcatacagattgttctttaatcc

SEQ ID NO: 220495 - DNA, 1376 bp, Zea Mays
tcgcgatccaacaggggtctttgtgaaagtgttttgggctgatctgcaaacttgcggtgaaattccggtttcggcttccgcggggtgggaatttggatagcgcggcgcaggaaaaatggcggcttccgctctccacctccgcctccacccctcgccgccggcgggtgtgaagcttcagcagcggaaactgcgctcgaaaatacagaggcagggtggcctatctcgaagattttcaaaagttgtgtcctattacggtctcacaaccccaccatataaactggatgctctggaaccttatatgagcaagaggacagttgaacttcactggggtaagcaccatcaagattacgtggatggcttgaataagcagttggctaccagccctctgtatggatacactctggaggatctgataaaagaagcttataacaatggcaatccattaccagagtataacaacgcagcacaggtctggaaccatcacttcttctgggaatcaatgcaaccagaaggtggtggcttacctgagggagtgaagagaaatgagagaaagctttcggttgttcatacacgaaatgctatctccccacttgcttttggtgacattccaatcatcagcctagacttgtgggagcacgcttactacttagactacaaggatgataagctaacatatgtcacaaactttatggaccatcttgtctcttggcatactgtcactctacgcatgatgcgtgcagagtcttttgtgaaccttggtgagccaaatatcccagaggcttgagctacagatacaccctagttatcatcgtgaggcattcttcggatacatcggatcaaatcctgctggaggaaccagagagttggaaaatctcatgtctcacaagaaatgcttatcaccccaatgtcatacacgccaagataagctgctgggatttcaccattgcccttggatattgctacaaggaaatcactagtcagcatccagtttgaagacatgcaacaaaacagctctagaagctatggagctggtagattctggagttggcagtgaggcagtgatccaacttgggctttgaagccatggtgctttctctagacggctattatttccatagtgttgttagaataatcctggttctgtgttttcataacttcatcatgctagggttctgttgtagcgtaacgcagaatggaacggaacaatattcttgttttactggttgagaaacctgttagttttggactgcagggaaatcttttacttgtatcagacgctgcaagcatggactttttttgtctggaaggaagttgaaacttctgaacttgaatgcaatactatagccatccaattccaaaacgtgcagaccttgaga

SEQ ID NO: 220496 - DNA, 936 bp, Zea Mays
agtgttttgggctgatctgcaaacttgcggtgaaattccggtttcggcttccgcggggtgggaatttggatagcgcggcgcaggaaaaatggcggcttccgctctccacctccgcctccacccctcgccgccggcgggtgtgaagcttcagcagcggaaactgcgctcgaaaatacagaggcagggtggcctatctcgaagattttcaaaagttgtgtcctattacggtctcacaaccccaccatataaactggatgctctggaaccttatatgagcaagaggacagttgaacttcactggggtaagcaccatcaagattacgtggatggcttgaataagcagttggctaccagccctctgtatggatacactctggaggatctgataaaagaagcttataacaatggcaatccattaccagagtataacaacgcagcacaggtctggaaccatcacttcttctgggaatcaatgcaaccagaaggtggtggcttacctgagggaggtgtgctgcagcagattgaaaaggattttggctcgtttactaattttagggaagagtttatccgctcagccttacagctgttagggtctggttgggtttggcttgtcttgaagagaaatgagagaaagctttcggttgttcatacacgaaatgctatctccccacttgcttttggtgacattccaatcatcagcctagacttgtgggagcacgcttactacttagactacaaggatgataagctaacatatgtcacaaactttatggaccatcttgtctcttggcatactgtcactctacgcatgatgcgtgcagagtcttttgtgaaccttggtgagccaaatatcccagaggcttgagctacagatacaccctagttatcatcgtgaggaaacagggacactgtttagtttctttgtgcttttttccc

SEQ ID NO: 220497 - DNA, 1520 bp, Zea Mays
agtgttttgggctgatctgcaaacttgcggtgaaattccggtttcggcttccgcggggtgggaatttggatagcgcggcgcaggaaaaatggcggcttccgctctccacctccgcctccacccctcgccgccggcgggtgtgaagcttcagcagcggaaactgcgctcgaggcagggtggcctatctcgaagattttcaaaagttgtgtcctattacggtctcacaaccccaccatataaactggatgctctggaaccttatatgagcaagaggacagttgaacttcactggggtaagcaccatcaagattacgtggatggcttgaataagcagttggctaccagccctctgtatggatacactctggaggatctgataaaagaagcttataacaatggcaatccattaccagagtataacaacgcagcacaggtctggaaccatcacttcttctgggaatcaatgcaaccagaaggtggtggcttacctgagggaggtgtgctgcagcagattgaaaaggattttggctcgtttactaattttagggaagagtttatccgctcagccttacagctgttagggtctggttgggtttggcttgtcttgaagagaaatgagagaaagctttcggttgttcatacacgaaatgctatctccccacttgcttttggtgacattccaatcatcagcctagacttgtgggaggtaaggacatggactatgagtttttagattttatttcgtgccaaatattgactcttctccttttatctccagcacgcttactacttagactacaaggatgataagctaacatatgtcacaaactttatggaccatcttgtctcttggcatactgtcactctacgcatgatgcgtgcagagtcttttgtgaaccttggtgagccaaatatcccagaggcttgagctacagatacaccctagttatcatcgtgaggcattcttcggatacatcggatcaaatcctgctggaggaaccagagagttggaaaatctcatgtctcacaagaaatgcttatcaccccaatgtcatacacgccaagataagctgctgggatttcaccattgcccttggatattgctacaaggaaatcactagtcagcatccagtttgaagacatgcaacaaaacagctctagaagctatggagctggtagattctggagttggcagtgaggcagtgatccaacttgggctttgaagccatggtgctttctctagacggctattatttccatagtgttgttagaataatcctggttctgtgttttcataacttcatcatgctagggttctgttgtagcgtaacgcagaatggaacggaacaatattcttgttttactggttgagaaacctgttagttttggactgcagggaaatcttttacttgtatcagacgctgcaagcatggactttttttgtctggaaggaagttgaaacttctgaacttgaatgcaatactatagccatccaattccaaaacgtgcagaccttgaga

SEQ ID NO: 220498 - DNA, 4237 bp, Zea Mays
ctcccccttttgactcaccacggttccgcctctccccccttctccctctcgcattcttcctcccccgtttcggggagacgccacgagaaaagagggagcagggaaagaaatcgcctccacgtccacggtgacgccggatcgcgcgtcaaatttctttgccgcggatttggtgctgcaaattttctagaattttttcgttttgtagggggcattattggcacggtatcttagtcctgggcttatattatctgcattttcgtttcccccgattttttcgactcaatttcttaacggatttgggaatcgcggctagggggctctgcattgccggatttgctcgatttcgtgggcgcattgcagctttgcattgcataacgatctttgccttggtcgcccacgttcgcgattctgtctgagcttcctcacccgggctcgtgcatttctccgaacatctccaggtgtctgttgcacaagctctcgcttgttgctccaatttcacgcgttctgcatgcatgtattccccgaaggtggtgccattctggggctgttgcaaagttctctggtcaaaaccaatggattccgtcgagcaatcggttccacggtgctaagagattgttgtccattggccatccccatgaatttctgaagggggagaagaattgctgttgcatttcccgggcaggtgcattggcatggtcgcagtagtgtaggaagcagaaaagatgaggcactgttggagtgcatggctcctggccctgtgcctcgtctctgtccagctcctcgctccattggtatgcgagcgattgctcgttgcagcacagaacctgtcaccgccagccttgacaccgccccttgtcaaagaagtagacgatgtggtggaacatgtatggatctcatgtgggttagacaggggatctcttgaagacgttagaaaacatttcaattacaaccacgtatttgacattctccgtacgctctccggaaaagatactaaggatagctctcctgaaactgaagatgccagcaaagcactgtctccagaaattaaaaacactttgctgaactgcttaagcaagcacccacttgtagttgctgcacatgagagtgcaaaaaacttacctattgattatatcaaaatgctttttgccttgttaagaagagatgtggctcaaggatctacaggtgcagcgacaacttctgcaccaccagcagctgtgaaatcaaatccatcaccttctttaggggaaccttcctcaacaaaacctgacaaaaatccagatcctccattagaaacaacacccgaagaaaaaatggtgccccaaactgaaaaaacagtggccaaaaaggaagataacagtaacatgtcaatcactgctgtcattggtttgtctgtgtctgctattgcgttgttagcccttctctgcttatgcaactttgtttgccgtgcaaaacaggcctcttcatctgaagtaggggttgataaaccgcctctgaatcagaacctgagtaatttatctggtatgaaatatacccacccacctttctccagtgtactgtttgaaattatgatgttcatttcattaggctattcctttggccaacaacaaaattgatgctgttagttttgtacaaaaaatatttacttatgatttatggttataattttctatcacatttgaaatattgacggtgtaactgttggccaaagccttgtaaaaaatgtagtagggagtaatgtgacattgccttctagtgttgatttacattctttattttgtagcttctcttaagttttccaaaggaaactcaattgatgtcaacaagctgggagcactgccgctaaagtcagaggctggccaaaatggcaatgccaaactaagctcatctgaaatctctaaaactgaagttaccccagcagtctacaactgtttggctgaaccaatggctgcttctactggttatgtcccaggatcaagaccaacaaccccaccatctatgccacctccagcccctgcacatccgaaggctcctccctcatcaactcctcaagcacctgcatctctgaaggctcctccctcatcaactcctcaagcacctgcacctctgaaggctcctcactcatcaactcctgaaacacccgcaccaccttcaaagcctagttcagttcttcactcagaaccctcatcaccatctgctctaaaagctgcacctccaccaaaagatgcaccacagccaaaagctgcacctccaccgccaccaaaatctaccggcccaccaccaccagcaatgtctggttcatcgaatacacgtccaccaccgcttatgaagaaatcaggcaataagatggatgatggcgcaaattctcatgaagctaaaacaaagctaaagcccttcttttgggataaagtaacagcaaatgctaatcagtctatggtgtgggatcacctcaagtctggatctttccagtttaatgagggtaagatggaaagcctttttggttataactctgtggagaaaataggcggtgatggcaagaaagatttattatctaaggatatacctcaatttgtgaggatacttgaacctaagaaggcacagaaccttgcgatatcattaagggctctgagtgtttcaccagaggaagtatgtagtgcagttaaggaaggaaatgaacttccatcagacttgatagacacactactaaagtggatcccaagcaatgaggaggagcttaggcttcgactgtacactggggaactgtctcagcttggtcctgcagagcaattcctaaaatcgattatcgatattccatatattttccaacgtctggatgcattacttttcatgtccagtctaccagaggaaacttcaaatgtgaaacacgcttttgctactttagaggtggcttgccaagagcttaaaaacagccggcttttcttgaagttacttgaagcggtccttaaaacaggaaacaggatgaatgttggcacattccgtggaggagctcaggcttttaaacttgacacgctccttaagttatctgatgtcaaaggaactgatgggaagacaacacttctgcattttgtggttgaagaaattattcgttctgaaggtatccgtgctacaagggctgcaaaagatactgacggtaataatatgcgaactgaagatgattacaaacaacttgggctgaaagttgtgtccaatttaagtgatgagctacaaaatgtcaggaaggcagcgatcctggatgcagatcaattgacaatgtcagtagcaactcttggccacaagcttgtcaaaaccaaagaattccttaacacgggcatgagaagtctggatgaacacagtgggtttcaccgcaagctgaagcatttcgcagagcagtgccaaactgatgtttctttgttgcaagaggaagaaaagaaaattcggtccttggtcaggggcactgttgattatttccatgggagtacagggaaggacgagggcctgcggttatttgtggtagtacgagatttccttgcgatgctggacaaggtttgtaaagaggtgaaagaagcatcaaaagtggctccaaagaaaacaaagaccgctcagccatctcaagcatctttcaatgatcccaggcgcaaactattcccagcaattcaagacctaagggcagacagttcaagctctgatgaagacgattagctgtataccgaatcaaggagtccatgttttcaccttcgaatgcactgaatttgacccttcaaaacaatagtgcggtgatacataatacatggaaactgatgggaaatggtgaagtgacgctattttttgccatccactgatcaaaaaggcaacaatcaaattgggaaacctggcttggctttacactgacatgttggtaatgacaaatcatcagaccagatctggcattcttggccaatgggtttgtatggcactctcctatctagcaagaaggatgttcatatggtcgagacagcatctatataaaaggtgtggctggtggaaaatggataattcaaaggaaatggaagaaaactggctctagtttagaaccggtgtaaatgcaggaggaagtctgactaatactatttttctgttcattgtacacatgtaccattgtaccgaacgcagagaaatgcagcgcaaacttgtgaatccggtgccattacccttgcaaacaggaatacaaatgaagtgtttggtttgagaaataagctagttt

SEQ ID NO: 220499 - DNA, 3991 bp, Zea Mays
caacagactgaccgacctcccccttttgactcaccacggttccgcctctccccccttctccctctcgcattcttcctcccccgtttcggggagacgccacgagaaaagagggagcagggaaagaaatcgcctccacgtccacggtgacgccggatcgcgcgtcaaatttctttgccgcggatttggtgctgcaaattttctagaattttttcgttttgtagggggcattattggcacggtatcttagtcctgggcttatattatctgcattttcgtttcccccgattttttcgactcaatttcttaacggatttgggaatcgcggctagggggctctgcattgccggatttgctcgatttcgtgggcgcattgcagctttgcattgcataacgatctttgccttggtcgcccacgttcgcgattctgtctgagcttcctcacccgggctcgtgcatttctccgaacatctccaggtgtctgttgcacaagctctcgcttgttgctccaatttcacgcgttctgcatgcatgtattccccgaaggtggtgccattctggggctgttgcaaagttctctggtcaaaaccaatggattccgtcgagcaatcggttccacggtgctaagagattgttgtccattggccatccccatgaatttctgaagggggagaagaattgctgttgcatttcccgggcaggtgcattggcatggtcgcagtagtgtaggaagcagaaaagatgaggcactgttggagtgcatggctcctggccctgtgcctcgtctctgtccagctcctcgctccattggtatgcgagcgattgctcgttgcagcacagaacctgtcaccgccagccttgacaccgccccttgtcaaagaagtagacgatgtggtggaacatgtatggatctcatgtgggttagacaggggatctcttgaagacgttagaaaacatttcaattacaaccacgtatttgacattctccgtacgctctccggaaaagatactaaggatagctctcctgaaactgaagatgccagcaaagcactgtctccagaaattaaaaacactttgctgaactgcttaagcaagcacccacttgtagttgctgcacatgagagtgcaaaaaacttacctattgattatatcaaaatgctttttgccttgttaagaagagatgtggctcaaggatctacaggtgcagcgacaacttctgcaccaccagcagctgtgaaatcaaatccatcaccttctttaggggaaccttcctcaacaaaacctgacaaaaatccagatcctccattagaaacaacacccgaagaaaaaatggtgccccaaactgaaaaaacagtggccaaaaaggaagataacagtaacatgtcaatcactgctgtcattggtttgtctgtgtctgctattgcgttgttagcccttctctgcttatgcaactttgtttgccgtgcaaaacaggcctcttcatctgaagtaggggttgataaaccgcctctgaatcagaacctgagtaatttatctgcttctcttaagttttccaaaggaaactcaattgatgtcaacaagctgggagcactgccgctaaagtcagaggctggccaaaatggcaatgccaaactaagctcatctgaaatctctaaaactgaagttaccccagcagtctacaactgtttggctgaaccaatggctgcttctactggttatgtcccaggatcaagaccaacaaccccaccatctatgccacctccagcccctgcacatccgaaggctcctccctcatcaactcctcaagcacctgcatctctgaaggctcctccctcatcaactcctcaagcacctgcacctctgaaggctcctcactcatcaactcctgaaacacccgcaccaccttcaaagcctagttcagttcttcactcagaaccctcatcaccatctgctctaaaagctgcacctccaccaaaagatgcaccacagccaaaagctgcacctccaccgccaccaaaatctaccggcccaccaccaccagcaatgtctggttcatcgaatacacgtccaccaccgcttatgaagaaatcaggcaataagatggatgatggcgcaaattctcatgaagctaaaacaaagctaaagcccttcttttgggataaagtaacagcaaatgctaatcagtctatggtgtgggatcacctcaagtctggatctttccagtttaatgagggtaagatggaaagcctttttggttataactctgtggagaaaataggcggtgatggcaagaaagatttattatctaaggatatacctcaatttgtgaggatacttgaacctaagaaggcacagaaccttgcgatatcattaagggctctgagtgtttcaccagaggaagtatgtagtgcagttaaggaaggaaatgaacttccatcagacttgatagacacactactaaagtggatcccaagcaatgaggaggagcttaggcttcgactgtacactggggaactgtctcagcttggtcctgcagagcaattcctaaaatcgattatcgatattccatatattttccaacgtctggatgcattacttttcatgtccagtctaccagaggaaacttcaaatgtgaaacacgcttttgctactttagaggtggcttgccaagagcttaaaaacagccggcttttcttgaagttacttgaagcggtccttaaaacaggaaacaggatgaatgttggcacattccgtggaggagctcaggcttttaaacttgacacgctccttaagttatctgatgtcaaaggaactgatgggaagacaacacttctgcattttgtggttgaagaaattattcgttctgaaggtatccgtgctacaagggctgcaaaagatactgacggtaataatatgcgaactgaagatgattacaaacaacttgggctgaaagttgtgtccaatttaagtgatgagctacaaaatgtcaggaaggcagcgatcctggatgcagatcaattgacaatgtcagtagcaactcttggccacaagcttgtcaaaaccaaagaattccttaacacgggcatgagaagtctggatgaacacagtgggtttcaccgcaagctgaagcatttcgcagagcagtgccaaactgatgtttctttgttgcaagaggaagaaaagaaaattcggtccttggtcaggggcactgttgattatttccatgggagtacagggaaggacgagggcctgcggttatttgtggtagtacgagatttccttgcgatgctggacaaggtttgtaaagaggtgaaagaagcatcaaaagtggctccaaagaaaacaaagaccgctcagccatctcaagcatctttcaatgatcccaggcgcaaactattcccagcaattcaagacctaagggcagacagttcaagctctgatgaagacgattagctgtataccgaatcaaggagtccatgttttcaccttcgaatgcactgaatttgacccttcaaaacaatagtgcggtgatacataatacatggaaactgatgggaaatggtgaagtgacgctattttttgccatccactgatcaaaaaggcaacaatcaaattgggaaacctggcttggctttacactgacatgttggtaatgacaaatcatcagaccagatctggcattcttggccaatgggtttgtatggcactctcctatctagcaagaaggatgttcatatggtcgagacagcatctatataaaaggtgtggctggtggaaaatggataattcaaaggaaatggaagaaaactggctctagtttagaaccggtgtaaatgcaggaggaagtctgactaatactatttttctgttcattgtacacatgtaccattgtaccgaacgcagagaaatgcagcgcaaacttgtgaatccggtgccattacccttgcaaacaggaatacaaatgaagtgtttggtttgagaaataagctagttt

SEQ ID NO: 220500 - DNA, 4180 bp, Zea Mays
ctcattatcgcttcaaagccaagcgaaagccgaaagcccaaccgaaacgacccgcccaaccgcacgcgcctcgcctagttgcctgcggtttacacccacccattgcggcggtgcggcccgcgccaatggcgagctccaccacgctgcgctaggtctccgcctgcggcgatcgccatggcgtcgcggcaccggaatgcttctccggtgacggcagggaaggactcgccgcagcctgcctcggcggcaacctcgctgcggcttgtggcagagttcccgctcgacgcgcccgaggccaaggagagcgtgaccgttaccgtccgcttccggccgctcagctcgcaggaggttcggctgggggaagagatcgcttggtacgcggatggggacaccattgtgcggagcgagcagaatcacagcatcgcttacgcgtacgatcgggtcttcggaccaactacaacaacccgacacgtatatgatgctgcagctctgcatgttattagtggtgccatggagggaataaatggtacaatatttgcatatggagttacaagcagtgggaagacacatacgatgcatggagatcaaagatccccggggatcatacctttggctgtgaaagatgcatttagtataatacaggagactccaaagcgagagtttcttcttcgtgtatcatacttggaaatctataatgagtgccctttcgcccaggaagtctgtaatcaaattctcaattgggaaggattgacaatgccacaacaagcaaacccatcaaactttgatagcattagcgagtggtgggaatcggcggcttctcacatctccagagaccgcagtagagaattcaatggatctgtgatctacaccatgtggaatatctggaaagagcgcaaccgaaggatcttcgagcacaactcgctatcggttgtaaacgatcttcttaatccttcgggtcagaacttacggattagggaggatcttcagggaacatttgtcgagggcataaaagaagaagtggtcttgtctcctgcacatgctttgtcccttattgcagccggagaagaacatagacatgttggatccacaaatttcaatttgctaagcagcaggagccatacaattttcacactgaacctcatcgatctggcaggttcagagagttcaagggctgaaactacaggagtacgccggaaggaaggatcttatatcaataaaagcttgctaactcttggaacggtgatatcaaaactgactgatggaaaagctactcatgttccatttcgagattccaaattgacacggttactacagtcatccttaagtggccagggacgtgtttctctaatatgcactgttactccagcatcaagcaattcagaagagactcgtaacacgttaaaatttgcccaccgtgcaaagcacattgagattcaagtgtcacaaaacaagattatggatgagaagtctttgataaagaagtaccagaatgaaatttgccaattaaaggaagagctagaccaactgaaaaggggtatactttctggcactccttcgaaagatgccacagaagacaatgtcattctttggaaacagaagctagaagatggtaatgtcaagctccagtctagactggaacaagaagaggcagctaaagctgctttgcttgcaaggatacaacgtctaacaaagctaatcctggtttccacaaaagcaactcagactcctagactgtcccaatgtcctaggccaaggagaagacattcttttggtgaagaggagttggcatgtctcccacacagaaggcgagatattgtattggatggtgaaagcaatgatttatttgttgctatggaaggatttgatgaaacatttgaagtttcttccaaaggagagaacaagaatcgcaaagggcttcttaactggttcaaacttcgggtatacaaatcagacaccgtataatccactgcattggcaattcccagtatagtgacagttaagtacaccatgtagcatttcatctagcaactgatacccaatactcctatggctgtatatgtgataccatctaatgaagatttaattctaaggaatgtaaatttctgaagtgtgttagatatatacaagaacataaaaagtaaacagattgctagaaaaggtctcaactcatcaattattctagggctttggacaatttggaaccacagaaatagatgcgtatttgatggtctttttcctaacttggaaacagccatcagaagagcaaaggaagaaagagaaatgtgggagctggctggtgccaagagtttggccctccttactgccccaatcccggtgattggctcgtagtgttttttagtttgtttagatggatcttctcaggtttctgagttttagacctccgtaagggagtctttgtaccttgtctgtttttcagaccttcttttccttcttcttaatataacggggcgcagttcttctgtgcttttcgagaaaaaaagtaagcagattgcattcttttgtcgtgtatagaactctgcttactgacatttacatgctgaactgtaaccagaaacatgacggtggttctaatgctccaagcttaggtggtgaccaatctagcctgaggaaagcattggctgccccttggacacccgtagaaattggacttaattctcaaacagagcaagagatgtctaattctcccgagaatctatcagctaacctactgagcattgaccatgaagaatttcattctgatggactttatggagaagaagcttctttggtcaccagaaaaacatcagatcatgttgatttattgagagagcaactgaagatcctatcagaggaggttgcattacataaaagtgttctaaagcgactcgtcgaaggagctggaagaagcacaatgaatgggcatgtcgagatcgaaatgaaaaaggtcagtgacgagattaaggacaagcagcagcagatagcacatttagaaaggcagattaagggggagcttgaccagttagaacatacaccgtctcatgctacgctcctggagcaggtcaacgagaaagcatttgaacttgaggtgaagacagcagataacagaatattgcaagaccagctacaacaaaagacgagagagtgtcaggcattagaagaaacagttgcccacttacacgaacagctttcccaagctcttgaagctaatgatttattgtcagaaagcatcatatttcagcagtacacagacaacaaccttcaaactggatcgcaaattcacattgaaaatccagaatctatagatatctctgatgaactgcatcagaaggcagagcagtcagagattgatgaattgaagcaaagattgtgtgagcttactgaggccaaaactcaactagagacccacaatcagaagctgcaagaggaaagcatgtacgcaaaaggcctggcctcggctgcaggtgtggaactgaaagcactgtctggggaggtcaccaaactcatgaaccacaacgagaggctcgcgaacgatttggctttggcaagaaattcaacacgagtgagaagtggtcatagggttgggaggagggatagctatactaaacggcttgagccagcgagtagaagagatgttcatgctagcagtgagagggaatcagctctggaggtcatgcttatggcgaaagaccaaagagaggcagagctccaaaagaaaatcgaggagtccaagcagaaggaagccttcctggaaggagagcttgcgaacatgtgggttcttgtggcgaaactgaagaaaggtcaggtaattgaccaagatgatgtctcgatgccgtacccaatggatcgtgattcatgaccctagacaatgacaaaaacaattattgaatcggctatgcttcggcattgcactttccttgtctgtggactgtggtggtttgcaccagtgtgaatccgtgtatctatattgccggtagttgtaattagctggattggaatcttgtaatgtatataacaatcagattttgccttgttctcaggattgtcatgcctgtctagtttgttcagggctttcaacaattatactgtacatagattgtcgagtggaaagaaatgaaagcctgatgatgcatctcccccaaataaagtgttttgaacttatgaaatcacacattgcattttgaag

SEQ ID NO: 220501 - DNA, 3372 bp, Zea Mays
caaccgcacgcgcctcgcctagttgcctgcggtttacacccacccattgcggcggtgcggcccgcgccaatggcgagctccaccacgctgcgctaggtctccgcctgcggcgatcgccatggcgtcgcggcaccggaatgcttctccggtgacggcagggaaggactcgccgcagcctgcctcggcggcaacctcgctgcggcttgtggcagagttcccgctcgacgcgcccgaggccaaggagagcgtgaccgttaccgtccgcttccggccgctcaggttgggtcccctgctgcgccgcacgtggctgcaatttgttcgtgacttcgtgttaatccttattccttaatggaccgggttcggctttgcatctttgggcaatgcggattggtttcgttgtttttttttctttctgtgtgtgttaagctcgcaggaggttcggctgggggaagagatcgcttggtacgcggatggggacaccattgtgcggagcgagcagaatcacagcatcgcttacgcgtacgatcgggtcttcggaccaactacaacaacccgacacgtatatgatgctgcagctctgcatgttattagtggtgccatggagggaataaatggtacaatatttgcatatggagttacaagcagtgggaagacacatacgatgcatggagatcaaagatccccggggatcatacctttggctgtgaaagatgcatttagtataatacaggagactccaaagcgagagtttcttcttcgtgtatcatacttggaaatctataatgaggttgtaaacgatcttcttaatccttcgggtcagaacttacggattagggaggatcttcagggaacatttgtcgagggcataaaagaagaagtggtcttgtctcctgcacatgctttgtcccttattgcagccggagaagaacatagacatgttggatccacaaatttcaatttgctaagcagcaggagccatacaattttcacactgacaatagagagcagcggcccctgcagtgaatctagtgaagaggaagcggttaccttctcacagctgaacctcatcgatctggcaggttcagagagttcaagggctgaaactacaggagtacgccggaaggaaggatcttatatcaataaaagcttgctaactcttggaacggtgatatcaaaactgactgatggaaaagctactcatgttccatttcgagattccaaattgacacggttactacagtcatccttaagtggccagggacgtgtttctctaatatgcactgttactccagcatcaagcaattcagaagagactcgtaacacgttaaaatttgcccaccgtgcaaagcacattgagattcaagtgtcacaaaacaagattatggatgagaagtctttgataaagaagtaccagaatgaaatttgccaattaaaggaagagctagaccaactgaaaaggggtatactttctggcactccttcgaaagatgccacagaagacaatgtcattctttggaaacagaagaagatggtaatgtcaagctccagtctagactggaacaagaagaggcagctaaagctgctttgcttgcaaggatacaacgtctaacaaagctaatcctggtttccacaaaagcaactcagactcctagactgtcccaatgtcctaggccaaggagaagacattcttttggtgaagaggagttggcatgtctcccacacagaaggcgagatattgtattggatggtgaaagcaatgatttatttgttgctatggaaggatttgatgaaacatttgaagtttcttccaaaggagagaacaagaatcgcaaagggcttcttaactggttcaaacttcgggtatacaaatcagacaccgtataatccactgcattggcaattcccagtatagtgacaaaacatgacggtggttctaatgctccaagcttaggtggtgaccaatctagcctgaggaaagcattggctgccccttggacacccgtagaaattggacttaattctcaaacagagcaagagatgtctaattctcccgagaatctatcagctaacctactgagcattgaccatgaagaatttcattctgatggactttatggagaagaagcttctttggtcaccagaaaaacatcagatcatgttgatttattgagagagcaactgaagatcctatcagaggaggttgcattacataaaagtgttctaaagcgactcgtcgaaggagctggaagaagcacaatgaatgggcatgtcgaggtgaagacagcagataacagaatattgcaagaccagctacaacaaaagacgagagagtgtcaggcattagaagaaacagttgcccacttacacgaacagctttcccaagctcttgaagctaatgatttattgtcagaaagcatcatatttcagcagtacacagacaacaaccttcaaactggatcgcaaattcacattgaaaatccagaatctatagatatctctgatgaactgcatcagaaggcagagcagtcagagattgatgaattgaagcaaagattgtgtgagcttactgaggccaaaactcaactagagacccacaatcagaagctgcaagaggaaagcatgtacgcaaaaggcctggcctcggctgcaggtgtggaactgaaagcactgtctggggaggtcaccaaactcatgaaccacaacgagaggctcgcgaacgatttggctttggcaagaaattcaacacgagtgagaagtggtcatagggttgggaggagggatagctatactaaacggcttgagccagcgagtagaagagatgttcatgctagcagtgagagggaatcagctctggaggtcatgcttatggcgaaagaccaaagagaggcagagctccaaaagaaaatcgaggagtccaagcagaaggaagccttcctggaaggagagcttgcgaacatgtgggttcttgtggcgaaactgaagaaaggtcaggtaattgaccaagatgatgtctcgatgccgtacccaatggatcgtgattcatgaccctagacaatgacaaaaacaattattgaatcggctatgcttcggcattgcactttccttgtctgtggactgtggtggtttgcaccagtgtgaatccgtgtatctatattgccggtagttgtaattagctggattggaatcttgtaatgtatataacaatcagattttgccttgttctcaggattgtcatgcctgtctagtttgttcagggctttcaacaattatactgtacatagattgtcgagtggaaagaaatgaaagcctgatgatgcatctcccccaaataaagtgttttgaacttatgaaatcacacattgcattttgaag

SEQ ID NO: 220502 - DNA, 1552 bp, Zea Mays
ctgaaattgtattgtggccggcatctccattagcgcagaatagcgtccggcagatcaccacttcaccggtaggtggctgagcgcctcgggttaaagtaaagtgttaaacacctgcactgcaccgcaagtaacccaaccctgcttccagtgcaagtgactgaccccgtgacccggcccatcataacaaatcaaaccatcacccgacttgtttacccccgaaaatttgccgtcttctcatctcgctcccctctttgcgccgcccccagatccggcaccgcccgctgctcgaacccgcaccccacgcccgcaggccgggaccggtgggcgcgcgccgggcagtaggagggagaggaagggcggcatggcggcgccgccggcgagggcccgggccgactacgactaccttatcaagcttcttctcattggggatagcggtgttggcaagagttgcctcctgttgcggttctctgatggttccttcactacaagctttattaccacaattggtattgactttaagatacggacaatagaattggatggcaagcgtataaagctacagatttgggatacagcgggccaagaacgcttccgtactattaccactgcgtactaccgtggagctatgggtatcttgctggtttatgatgtcaccgatgaatcttctttcaacaacatccgaaactggattcggaacattgagcaacatgcctctgataatgtcaacaaaattttggtgggcaacaaggccgatatggacgaaagcaagagggctgtacctactgcgaaaggacaagcacttgctgatgagtatgggatcaagttttttgaaacgagtgccaagacaaacctgaacgtggagcaagtgttcttctccatcgcacgtgacatcaagcagaggcttgcagagactgattcaaagccagaggacaaggcaatcaaaattaacaagccagaccagggttccgaggcaccagctgcccagcgatctgcatgctgcggttcataagcagacgcacgatagccataatcattggttatttgacactatttatttcctgcttggcttttataggaagaatttgaggaagccacttatgatatactgatgatgtggttgtactcttgtttgcttccactcttcgaagcaagcacctcttgctgttgacgtagctattgcactctggacatccgttggaacaacctctctcctccctacagtctacagtgtgtgatggacgaattccatgccgttgggtttgcattatcgatcaatgcatggattaacgtatcgcccttgtgtggattgttgtgttttttttctctcatgttgctgttcctttagattgaatttgttgggaaggaaaatatattttccttttcttatgtatatcaggtgcatttttatcttttgtacctggaatgtatgtatccacggaaagcgtgaatcttcaatttagaaaagaagaaaacttatctggaaatataagaccagtgcatgcggtattgtttgaataaaaaatataataaaacttatacatttgtatatctc

SEQ ID NO: 220503 - DNA, 1022 bp, Zea Mays
gtaggagacagcaagagggcgaggctgtgtgtgagagagggggaggcagagaacattcggcagtgtgagaatcggaatcggagatggcttggaatggccgcttcggcgacgacgaggaggggagcggccttgagctcagccttagcctcccgggctacttctccggatcgccaacccaagctgcagcaggtttcgaggacaaagcagacggcggctctgctgctgctgctgctgctgggcgagcaaagggaagcaatggcttcaaggccaggccggcggcagctgctccggtcgtgggatggccgccagtgcgcgcgttccggcggaacctcgcctcggcgtcctccaagccgtcccgcgatccgccaccaagccacagaggaaacgagtccgcgagcgtcggcgccggcggcaaggccgtcgagggcggcaacaagggcctgttcgtcaaggtcaacatggacggcgtgcccatcggccggaagctcgacctgggcggccacgccggctacgacacgctaaccgccgccgtcgaccacctcttccgcggcctcctctccgctcaaacgtcgggaccaggcggcgagcggcaggcggtcgcggggatcctgaacggtggcggcgagtacacgctggtgtacgaggacgacgagggagaccagatgctggtcggggacgtgccgtggcagatgttcgccgccaccgccaggcgtctgcgcgtgctgcggagctccgatctcaacccctcgtcgctaagggcagcgaccaggaagagagctgcagcttagtgctgcgctggcgtaccctggagtctcaactctgaacattttgcggccttttcggagggccaccaatgtaaaattgaagcggtttttcgtggatttttgttaccattaccatcatgtatgtgatcaagtagggaagcaggaatctagaggagatgagtggtgttgttagaatcacgtgtctcaacttatctgaaagtctaacaaggtgtcttggcgctggagtgtatagttcat

SEQ ID NO: 220504 - DNA, 1759 bp, Zea Mays
aaaaaaatggatgctttcatggggtcagtgctgggtgccctcctggccgtgctcgcctccacgctgctgatcggagcgctgttctttctggtgtggaagccctacgtcgtcacccggtggtttcggggccagggcatcgggggcccaagctacaggttcctcgtcggctccctgccggagatcaagcggatgaaagccgccggcagcaagatcacactcgacgtcggctcccatgacttcgtccccatcgtgcagccgcagtaccgtagatgggtatccgattacgggaagacatttctgtactggttcggcgcggtgccgaccatctgcgtcgccgaggtgggcctggtgaagcaggtgctcgcggagaggacaggcctgttccccaaggactacatgaacgacagcatggaggtactccttggcaagggtctcgttctcgccaacggcgaagactggaaacgccaccgcgaggtggtgcacccggccttcaagcccgacaagctcaagacgatgtcggtggtcatggccgacctggtgcagcggatgatgcagcaatggcgatctcagatacagcgggccagcaaccatgaggctgaaattgaactcagcagcgagttctcggagctgacttcagatgtcatcgcgcacacggccttcggtaccagctacaaggagggtaaggaggtgttcgtcgcgcagaaggagctccaagaactcacattctcgacatggcttgatatccctgctcctgcttgtctaagccgacgagttgaagagctggacaagaaggtgaggagcatgctcatggcgataatcgaagggcgccttgccgcgaggggcaccagtggatacggcaacgatctgctcggcctgatgctccaagcgcgcgctctggagcaagaagggcaccagatgctcaccacggaggagatcgtggacgagtgcaagaccttcatcttcgctgggcaggacaccacctcgcacctcctcacctggaccatgttcctgcttagcaggtactctgagtggcaacacaggctgagggaggaggtgctgagagagtgtggcgatgcagtgccaaatccggacacagtcaccaagctcaaactggttaacatggttcttctcgagtcattgaggctctacagccccgtggtgttcataagaagggccgtaggctcagacatcctgctccgcagcacgagggtgcccaagggaacaatgctgtcgataccaattgcattgctgcacagggacaaggatgtctggggccaagatgctgacgagttcaaccctgacaggttcgagcatggcgtgtccaatgccgctgccaaacaccccaatgccctgctgtccttctcccaggggcctagggcttgcatcggccagaacttcgcgatgcttgaggcccgtatcgggatcgccatgatccttcagaggttctcgtttgagctctcgccaaactatgtccatgcacccaaggaagcggtcacccttatgcccaggttcgggcttcccatcatcctgaggaaccttcacgattgagatgtgctaccataaatatatatacgcactgccacttccttttgcccgaggtttgtcacactaaacaaacacttgtgggtatttggtatgtcattatgtgatgctgttgtatttttttactttatttacggtttgctttagtttcttacgcagaatgtaatgaataaaaacttgtcagggagattacctgcaataattatagttgtgttcc

SEQ ID NO: 220505 - DNA, 4242 bp, Zea Mays
caaaagctcacttctgaaacccgtatttttaggttaggccagggtgcatcttacaaaaatcatccacttcctcaccccctgcgtttcctccgacgtctgctctcccggcgaaggaagggaaggagccacgcgaaagaaagctgacgcccacgcgcccaggagcaccaccggtgacgcgtgatcatattcgagcaccaatcccctcatcctccccagcccccggcgctaaaatctacacaaagcctcgctaaaccggcctgattcgcgctcccgatctcgcgttcgatcccagcccaccgtgaggtcctccagcctcccgcctcccgccagatctcggtgtcgttcgttcggtttcgatttggtggtggaagggaagggatgagcgggatgagcgcacggataaaggagatggtgcgtgtggccacggcgcggctgggcggtgagcaggcggggggtggcggggcttcctcctcaggcttcgcgcgccgggagtccacggcgcggctcggcggcgggggcaccagcctccggaggcagccgcagccgatggcaccctccgtgcgcaccgtctgttgcaacgaccgcgaggccaacgcccctgtcgggtacaagggaaattctgtgtcgactacgaagtacaacatcctaactttcttacctaaaggattattcgagcagttcaggcgggttgcaaatctttactttctcatgatctcaatcatgtcaactacacctatcagtccagttcatcctgtcactaatgttgttcccctaagtcttgtgcttctggtgtctctcatcaaggaagcttttgaggattggaagcgttttcagaatgatatgtcaattaacaatgcacatgtcgatgtattgcaaggtcaatgttgggaaagtactccatggaaacgactgcaggttggagatattgtgaggatcaagcaagatggttatttccctgctgacttgctcttcctatcaagtacaaaccctgatggtgtttgctacatcgagacagcaaatcttgatggggaaacaaatctgaaaataaggaaggctttggagaagacttgggactatgtaattcctgaaaaggcttctgagttcaaaggtgaagtgcagtgtgaacaaccaaacaattccctttatacgtttactggcaatcttatcatggacaagcagactatacctctctcaccgaaccagttactcctaagaggatgcagccttcgtaatacagaatacattgttggtgttgtcatattcaccgggcacgagacaaaagttatgatgaattccatgaatgttccctccaaaagaagtacattggagaaaaagctagacaagcttatccttgccctttttgcaaccctcttcacaatgtgtgttattggtgccattggaagtggtgtgtttattaatgaaaaatacttttatcttggattgcgtgggcatgtggaggaccagttcaatccccaaaacaaatttgtggtgaccattttaaccatgtttactctaataactctatactcaaccatcatcccaatttctctttatgtgtccattgagatgatcaaattcatacagtgcacaaaattcattaataacgatcttcatatgtaccatgctgagagtaacacccctgctttggcgcggacttctaatcttaatgaggaacttgggcaggttgaatatatattttctgacaaaactggaacgcttacaagaaacctgatggaattctttaaatgctcgattggtggagaaatgtatggaactggcatcacagagattgagaaaggaggagcagagcgggctggaattaaaattgatgatgatgagggtaaaaggtctgccaatgcagtccatgaaaaaggattcaattttgatgacgctagaatcatgcgtggtgcatggagaaatgaacctaatcttgaggcttgcaaggaattctttagatgccttgcaatctgtcatacagttcttccagagggtgaggaaactccggaaaagataagttaccaggctgcctcacctgatgaggctgcacttgtggctgctgctaagaattttggtttcttcttttacaggcgtacacccaccacagttatggttcgtgagtcacatgttgaaaggatggggagtatacaagatgttccatatgaaattctgaatgttctggaattcaacagcacgagaaagcgacaatcggtggtttgccgtttcccaaatggaagattagttctctattgcaagggtgctgataatgtcgtatatgaacgattggctgatggaaatcatgatatgaaaaagacaagcagagaacatctagagcaatttggttctgctggcttgcgtactctttgtcttgcctatcgggatcttagcagggagcaatacgaaagctggaatgaaaagtttgtacaagcaaagtcatctttacgagatcgtgataagaagctcgatgaggtggctgagttgattgaaaaagaccttatattagttgggtgcacagctatagaggacaaactgcaagaaggcgtgccaacctgcattgaaactctctctgcagctggcataaaaatttgggtgttaacgggagataagatggaaacagcaattaacattgcatatgcatgcagcttggtaaacaatgacaccaaacagttcatcattagttcagagacagacactattagggaggctgaagaccggggtgaccctgtggaaattgcacgtgttattaaagattcagtaaaacagagtctgaaaagctttcacgaggaagcccgacattctttgattagcacccctgaaaggaagttggctctcattattgatggtagatgcctgatgtatgcactggacccaactcttcgtgttgatcttcttggattgagtctaagttgccactcagttgtatgctgccgagtttctccgctgcaaaaggcacaggttacaagtttagttaggaagggcgctcagaaaataactctcagcattggtgacggtgctaatgatgtgagtatgattcaagctgctcatgttgggattggcatcagtggccaagaaggaatgcaagctgttatggctagcgactttgccattgcccagtttcgttttcttactgatttgcttcttgtacatggacggtggtcttacttgagactctgcaaggttatcacatacttcttctacaagaatctgacatttacactaactcagttctggttcactttccaaactggcttttctggtcagcggttttatgatgactggtttcagtctctatataatgttatcttcacggcactacctgtaattatagttggattgtttgataaggatgttagcgcgtcactgtcaaaaaaatacccacagctttacaaggaaggaatcaggaattcattcttcaagtggagagtgattgcagtgtggggtttctttgctttctatcagtcaatagtgttcttctacttcactgcagctgcaagtcagcatggtcacggttcatctggcaagattcttggcctatgggatgttagcactatggcctttacttgtgtcgtggtaactgtgaatctccgccttctcatggcatgcaactctataacgaggtggcattacatcagtgtggctggcagtatagtggcctggtttatgtttattttcatatactctgcaataatgacgtcgtttgacagacaggaaaatgagtattttgtgatttatgttctgatgagcacctttttcttctatatgacaatcttgcttgttccgatcattgccctgtttggtgatttcctatatttatcgattcaaaggtggctattcccctacgactaccaaataattcaggagcagcacaaggacgagccccacgtgtacagcagggtgcagctacccgagaccagccacctaagcccacaggaagcgagaagctacatgatgtcgatgctccctcgggagtcatcaaagcacactggctttgccttcgactccccaggatacgagtcgttcttcgcctcgcagcaaggcgtcggcgtgccacacaagccgtgggatgtagcccggagagcaagcatgaagcagcaacgagcaggaaaatcctaatctccgccgtgtaaagttttgtatatctggtttcttgattgcaatcgcagaccacaggaattagtataggcagccctttttcgtgtttgccagtggttcacccatatgtggttttgggatgaggcatctgcc

SEQ ID NO: 220506 - DNA, 4163 bp, Zea Mays
caaaagctcacttctgaaacccgtatttttaggttaggccagggtgcatcttacaaaaatcatccacttcctcaccccctgcgtttcctccgacgtctgctctcccggcgaaggaagggaaggagccacgcgaaagaaagctgacgcccacgcgcccaggagcaccaccggtgacgcgtgatcatattcgagcaccaatcccctcatcctccccagcccccggcgctaaaatctacacaaagcctcgctaaaccggcctgattcgcgctcccgatctcgcgttcgatcccagcccaccgtgaggtcctccagcctcccgcctcccgccagatctcggtgtcgttcgttcggtttcgatttggtggtggaagggaagggatgagcgggatgagcgcacggataaaggagatggtgcgtgtggccacggcgcggctgggcggtgagcaggcggggggtggcggggcttcctcctcaggcttcgcgcgccgggagtccacggcgcggctcggcggcgggggcaccagcctccggaggcagccgcagccgatggcaccctccgtgcgcaccgtctgttgcaacgaccgcgaggccaacgcccctgtcgggtacaagggaaattctgtgtcgactacgaagtacaacatcctaactttcttacctaaaggattattcgagcagttcaggcgggttgcaaatctttactttctcatgatctcaatcatgtcaactacacctatcagtccagttcatcctgtcactaatgttgttcccctaagtcttgtgcttctggtgtctctcatcaaggaagcttttgaggattggaagcgttttcagaatgatatgtcaattaacaatgcacatgtcgatgtattgcaaggtcaatgttgggaaagtactccatggaaacgactgcaggttggagatattgtgaggatcaagcaagatggttatttccctgctgacttgctcttcctatcaagtacaaaccctgatggtgtttgctacatcgagacagcaaatcttgatggggaaacaaatctgaaaataaggaaggctttggagaagacttgggactatgtaattcctgaaaaggcttctgagttcaaaggtgaagtgcagtgtgaacaaccaaacaattccctttatacgtttactggcaatcttatcatggacaagcagactatacctctctcaccgaaccagttactcctaagaggatgcagccttcgtaatacagaatacattgttggtgttgtcatattcaccgggcacgagacaaaagttatgatgaattccatgaatgttccctccaaaagaagtacattggagaaaaagctagacaagcttatccttgccctttttgcaaccctcttcacaatgtgtgttattggtgccattggaagtggtgtgtttattaatgaaaaatacttttatcttggattgcgtgggcatgtggaggaccagttcaatccccaaaacaaatttgtggtgaccattttaaccatgtttactctaataactctatactcaaccatcatcccaatttctctttatgtgtccattgagatgatcaaattcatacagtgcacaaaattcattaataacgatcttcatatgtaccatgctgagagtaacacccctgctttggcgcggacttctaatcttaatgaggaacttgggcaggttgaatatatattttctgacaaaactggaacgcttacaagaaacctgatggaattctttaaatgctcgattggtggagaaatgtatggaactggcatcacagagattgagaaaggaggagcagagcgggctggaattaaaattgatgatgatgagggtaaaaggtctgccaatgcagtccatgaaaaaggattcaattttgatgacgctagaatcatgcgtggtgcatggagaaatgaacctaatcttgaggcttgcaaggaattctttagatgccttgcaatctgtcatacagttcttccagagggtgaggaaactccggaaaagataagttaccaggctgcctcacctgatgaggctgcacttgtggctgctgctaagaattttggtttcttcttttacaggcgtacacccaccacagttatggttcgtgagtcacatgttgaaaggatggggagtatacaagatgttccatatgaaattctgaatgttctggaattcaacagcacgagaaagcgacaatcggtggtttgccgtttcccaaatggaagattagttctctattgcaagggtgctgataatgtcgtatatgaacgattggctgatggaaatcatgatatgaaaaagacaagcagagaacatctagagcaatttggttctgctggcttgcgtactctttgtcttgcctatcgggatcttagcagggagcaatacgaaagctggaatgaaaagtttgtacaagcaaagtcatctttacgagatcgtgataagaagctcgatgaggtggctgagttgattgaaaaagaccttatattagttgggtgcacagctatagaggacaaactgcaagaaggcgtgccaacctgcattgaaactctctctgcagctggcataaaaatttgggtgttaacgggagataagatggaaacagcaattaacattgcatatgcatgcagcttggtaaacaatgacaccaaacagttcatcattagttcagagacagacactattagggaggctgaagaccggggtgaccctgtggaaattgcacgtgttattaaagattcagtaaaacagagtctgaaaagctttcacgaggaagcccgacattctttgattagcacccctgaaaggaagttggctctcattattgatggtagatgcctgatgtatgcactggacccaactcttcgtgttgatcttcttggattgagtctaagttgccactcagttgtatgctgccgagtttctccgctgcaaaaggcacaggttacaagtttagttaggaagggcgctcagaaaataactctcagcattggtgacggtgctaatgatgtgagtatgattcaagctgctcatgttgggattggcatcagtggccaagaaggaatgcaagctgttatggctagcgactttgccattgcccagtttcgttttcttactgatttacactaactcagttctggttcactttccaaactggcttttctggtcagcggttttatgatgactggtttcagtctctatataatgttatcttcacggcactacctgtaattatagttggattgtttgataaggatgttagcgcgtcactgtcaaaaaaatacccacagctttacaaggaaggaatcaggaattcattcttcaagtggagagtgattgcagtgtggggtttctttgctttctatcagtcaatagtgttcttctacttcactgcagctgcaagtcagcatggtcacggttcatctggcaagattcttggcctatgggatgttagcactatggcctttacttgtgtcgtggtaactgtgaatctccgccttctcatggcatgcaactctataacgaggtggcattacatcagtgtggctggcagtatagtggcctggtttatgtttattttcatatactctgcaataatgacgtcgtttgacagacaggaaaatgagtattttgtgatttatgttctgatgagcacctttttcttctatatgacaatcttgcttgttccgatcattgccctgtttggtgatttcctatatttatcgattcaaaggtggctattcccctacgactaccaaataattcaggagcagcacaaggacgagccccacgtgtacagcagggtgcagctacccgagaccagccacctaagcccacaggaagcgagaagctacatgatgtcgatgctccctcgggagtcatcaaagcacactggctttgccttcgactccccaggatacgagtcgttcttcgcctcgcagcaaggcgtcggcgtgccacacaagccgtgggatgtagcccggagagcaagcatgaagcagcaacgagcaggaaaatcctaatctccgccgtgtaaagttttgtatatctggtttcttgattgcaatcgcagaccacaggaattagtataggcagccctttttcgtgtttgccagtggttcacccatatgtggttttgggatgaggcatctgcc

SEQ ID NO: 220507 - DNA, 4002 bp, Zea Mays
caaaagctcacttctgaaacccgtatttttaggttaggccagggtgcatcttacaaaaatcatccacttcctcaccccctgcgtttcctccgacgtctgctctcccggcgaaggaagggaaggagccacgcgaaagaaagctgacgcccacgcgcccaggagcaccaccggtgacgcgtgatcatattcgagcaccaatcccctcatcctccccagcccccggcgctaaaatctacacaaagcctcgctaaaccggcctgattcgcgctcccgatctcgcgttcgatcccagcccaccgtgaggtcctccagcctcccgcctcccgccagatctcggtgtcgttcgttcggtttcgatttggtggtggaagggaagggatgagcgggatgagcgcacggataaaggagatggtgcgtgtggccacggcgcggctgggcggtgagcaggcggggggtggcggggcttcctcctcaggcttcgcgcgccgggagtccacggcgcggctcggcggcgggggcaccagcctccggaggcagccgcagccgatggcaccctccgtgcgcaccgtctgttgcaacgaccgcgaggccaacgcccctgtcgggtacaagggaaattctgtgtcgactacgaagtacaacatcctaactttcttacctaaaggattattcgagcagttcaggcgggttgcaaatctttactttctcatgatctcaatcatgtcaactacacctatcagtccagttcatcctgtcactaatgttgttcccctaagtcttgtgcttctggtgtctctcatcaaggaagcttttgaggattggaagcgttttcagaatgatatgtcaattaacaatgcacatgtcgatgtattgcaaggtcaatgttgggaaagtactccatggaaacgactgcaggttggagatattgtgaggatcaagcaagatggttatttccctgctgacttgctcttcctatcaagtacaaaccctgatggtgtttgctacatcgagacagcaaatcttgatggggaaacaaatctgaaaataaggaaggctttggagaagacttgggactatgtaattcctgaaaaggcttctgagttcaaaggtgaagtgcagtgtgaacaaccaaacaattccctttatacgtttactggcaatcttatcatggacaagcagactatacctctctcaccgaaccagttactcctaagaggatgcagccttcgtaatacagaatacattgttggtgttgtcatattcaccgggcacgagacaaaagttatgatgaattccatgaatgttccctccaaaagaagtacattggagaaaaagctagacaagcttatccttgccctttttgcaaccctcttcacaatgtgtgttattggtgccattggaagtggtgtgtttattaatgaaaaatacttttatcttggattgcgtgggcatgtggaggaccagttcaatccccaaaacaaatttgtggtgaccattttaaccatgtttactctaataactctatactcaaccatcatcccaatttctctttatgtgtccattgagatgatcaaattcatacagtgcacaaaattcattaataacgatcttcatatgtaccatgctgagagtaacacccctgctttggcgcggacttctaatcttaatgaggaacttgggcaggttgaatatatattttctgacaaaactggaacgcttacaagaaacctgatggaattctttaaatgctcgattggtggagaaatgtatggaactggcatcacagagattgagaaaggaggagcagagcgggctggaattaaaattgatgatgatgagggtaaaaggtctgccaatgcagtccatgaaaaaggattcaattttgatgacgctagaatcatgcgtggtgcatggagaaatgaacctaatcttgaggcttgcaaggaattctttagatgccttgcaatctgtcatacagttcttccagagggtgaggaaactccggaaaagataagttaccaggctgcctcacctgatgaggctgcacttgtggctgctgctaagaattttggtttcttcttttacaggcgtacacccaccacagttatggttcgtgagtcacatgttgaaaggatggggagtatacaagatgttccatatgaaattctgaatgttctggaattcaacagcacgagaaagcgacaatcggtggtttgccgtttcccaaatggaagattagttctctattgcaagggtgctgataatgtcgtatatgaacgattggctgatggaaatcatgatatgaaaaagacaagcagagaacatctagagcaatttggttctgctggcttgcgtactctttgtcttgcctatcgggatcttagcagggagcaatacgaaagctggaatgaaaagtttgtacaagcaaagtcatctttacgagatcgtgataagaagctcgatgaggtggctgagttgattgaaaaagaccttatattagttgggtgcacagctatagaggacaaactgcaagaaggcgtgccaacctgcattgaaactctctctgcagctggcataaaaatttgggtgttaacgggagataagatggaaacagcaattaacattgcatatgcatgcagcttggtaaacaatgacaccaaacagttcatcattagttcagagacagacactattagggaggctgaagaccgggttacaagtttagttaggaagggcgctcagaaaataactctcagcattggtgacggtgctaatgatgtgagtatgattcaagctgctcatgttgggattggcatcagtggccaagaaggaatgcaagctgttatggctagcgactttgccattgcccagtttcgttttcttactgatttgcttcttgtacatggacggtggtcttacttgagactctgcaaggttatcacatacttcttctacaagaatctgacatttacactaactcagttctggttcactttccaaactggcttttctggtcagcggttttatgatgactggtttcagtctctatataatgttatcttcacggcactacctgtaattatagttggattgtttgataaggatgttagcgcgtcactgtcaaaaaaatacccacagctttacaaggaaggaatcaggaattcattcttcaagtggagagtgattgcagtgtggggtttctttgctttctatcagtcaatagtgttcttctacttcactgcagctgcaagtcagcatggtcacggttcatctggcaagattcttggcctatgggatgttagcactatggcctttacttgtgtcgtggtaactgtgaatctccgccttctcatggcatgcaactctataacgaggtggcattacatcagtgtggctggcagtatagtggcctggtttatgtttattttcatatactctgcaataatgacgtcgtttgacagacaggaaaatgagtattttgtgatttatgttctgatgagcacctttttcttctatatgacaatcttgcttgttccgatcattgccctgtttggtgatttcctatatttatcgattcaaaggtggctattcccctacgactaccaaataattcaggagcagcacaaggacgagccccacgtgtacagcagggtgcagctacccgagaccagccacctaagcccacaggaagcgagaagctacatgatgtcgatgctccctcgggagtcatcaaagcacactggctttgccttcgactccccaggatacgagtcgttcttcgcctcgcagcaaggcgtcggcgtgccacacaagccgtgggatgtagcccggagagcaagcatgaagcagcaacgagcaggaaaatcctaatctccgccgtgtaaagttttgtatatctggtttcttgattgcaatcgcagaccacaggaattagtataggcagccctttttcgtgtttgccagtggttcacccatatgtggttttgggatgaggcatctgcc

SEQ ID NO: 220508 - DNA, 4208 bp, Zea Mays
caaaagctcacttctgaaacccgtatttttaggttaggccagggtgcatcttacaaaaatcatccacttcctcaccccctgcgtttcctccgacgtctgctctcccggcgaaggaagggaaggagccacgcgaaagaaagctgacgcccacgcgcccaggagcaccaccggtgacgcgtgatcatattcgagcaccaatcccctcatcctccccagcccccggcgctaaaatctacacaaagcctcgctaaaccggcctgattcgcgctcccgatctcgcgttcgatcccagcccaccgtgaggtcctccagcctcccgcctcccgccagatctcggtgtcgttcgttcggtttcgatttggtggtggaagggaagggatgagcgggatgagcgcacggataaaggagatggtgcgtgtggccacggcgcggctgggcggtgagcaggcggggggtggcggggcttcctcctcaggcttcgcgcgccgggagtccacggcgcggctcggcggcgggggcaccagcctccggaggcagccgcagccgatggcaccctccgtgcgcaccgtctgttgcaacgaccgcgaggccaacgcccctgtcgggtacaagggaaattctgtgtcgactacgaagtacaacatcctaactttcttacctaaaggattattcgagcagttcaggcgggttgcaaatctttactttctcatgatctcaatcatgtcaactacacctatcagtccagttcatcctgtcactaatgttgttcccctaagtcttgtgcttctggtgtctctcatcaaggaagcttttgaggattggaagcgttttcagaatgatatgtcaattaacaatgcacatgtcgatgtattgcaaggtcaatgttgggaaagtactccatggaaacgactgcaggttggagatattgtgaggatcaagcaagatggttatttccctgctgacttgctcttcctatcaagtacaaaccctgatggtgtttgctacatcgagacagcaaatcttgatggggaaacaaatctgaaaataaggaaggctttggagaagacttgggactatgtaattcctgaaaaggcttctgagttcaaaggtgaagtgcagtgtgaacaaccaaacaattccctttatacgtttactggcaatcttatcatggacaagcagactatacctctctcaccgaaccagttactcctaagaggatgcagccttcgtaatacagaatacattgttggtgttgtcatattcaccgggcacgagacaaaagttatgatgaattccatgaatgttccctccaaaagaagtacattggagaaaaagctagacaagcttatccttgccctttttgcaaccctcttcacaatgtgtgttattggtgccattggaagtggtgtgtttattaatgaaaaatacttttatcttggattgcgtgggcatgtggaggaccagttcaatccccaaaacaaatttgtggtgaccattttaaccatgtttactctaataactctatactcaaccatcatcccaatttctctttatgtgtccattgagatgatcaaattcatacagtgcacaaaattcattaataacgatcttcatatgtaccatgctgagagtaacacccctgctttggcgcggacttctaatcttaatgaggaacttgggcaggttgaatatatattttctgacaaaactggaacgcttacaagaaacctgatggaattctttaaatgctcgattggtggagaaatgtatggaactggcatcacagagattgagaaaggaggagcagagcgggctggaattaaaattgatgatgatgagggtaaaaggtctgccaatgcagtccatgaaaaaggattcaattttgatgacgctagaatcatgcgtggtgcatggagaaatgaacctaatcttgaggcttgcaagttcttccagagggtgaggaaactccggaaaagataagttaccaggctgcctcacctgatgaggctgcacttgtggctgctgctaagaattttggtttcttcttttacaggcgtacacccaccacagttatggttcgtgagtcacatgttgaaaggatggggagtatacaagatgttccatatgaaattctgaatgttctggaattcaacagcacgagaaagcgacaatcggtggtttgccgtttcccaaatggaagattagttctctattgcaagggtgctgataatgtcgtatatgaacgattggctgatggaaatcatgatatgaaaaagacaagcagagaacatctagagcaatttggttctgctggcttgcgtactctttgtcttgcctatcgggatcttagcagggagcaatacgaaagctggaatgaaaagtttgtacaagcaaagtcatctttacgagatcgtgataagaagctcgatgaggtggctgagttgattgaaaaagaccttatattagttgggtgcacagctatagaggacaaactgcaagaaggcgtgccaacctgcattgaaactctctctgcagctggcataaaaatttgggtgttaacgggagataagatggaaacagcaattaacattgcatatgcatgcagcttggtaaacaatgacaccaaacagttcatcattagttcagagacagacactattagggaggctgaagaccggggtgaccctgtggaaattgcacgtgttattaaagattcagtaaaacagagtctgaaaagctttcacgaggaagcccgacattctttgattagcacccctgaaaggaagttggctctcattattgatggtagatgcctgatgtatgcactggacccaactcttcgtgttgatcttcttggattgagtctaagttgccactcagttgtatgctgccgagtttctccgctgcaaaaggcacaggttacaagtttagttaggaagggcgctcagaaaataactctcagcattggtgacggtgctaatgatgtgagtatgattcaagctgctcatgttgggattggcatcagtggccaagaaggaatgcaagctgttatggctagcgactttgccattgcccagtttcgttttcttactgatttgcttcttgtacatggacggtggtcttacttgagactctgcaaggttatcacatacttcttctacaagaatctgacatttacactaactcagttctggttcactttccaaactggcttttctggtcagcggttttatgatgactggtttcagtctctatataatgttatcttcacggcactacctgtaattatagttggattgtttgataaggatgttagcgcgtcactgtcaaaaaaatacccacagctttacaaggaaggaatcaggaattcattcttcaagtggagagtgattgcagtgtggggtttctttgctttctatcagtcaatagtgttcttctacttcactgcagctgcaagtcagcatggtcacggttcatctggcaagattcttggcctatgggatgttagcactatggcctttacttgtgtcgtggtaactgtgaatctccgccttctcatggcatgcaactctataacgaggtggcattacatcagtgtggctggcagtatagtggcctggtttatgtttattttcatatactctgcaataatgacgtcgtttgacagacaggaaaatgagtattttgtgatttatgttctgatgagcacctttttcttctatatgacaatcttgcttgttccgatcattgccctgtttggtgatttcctatatttatcgattcaaaggtggctattcccctacgactaccaaataattcaggagcagcacaaggacgagccccacgtgtacagcagggtgcagctacccgagaccagccacctaagcccacaggaagcgagaagctacatgatgtcgatgctccctcgggagtcatcaaagcacactggctttgccttcgactccccaggatacgagtcgttcttcgcctcgcagcaaggcgtcggcgtgccacacaagccgtgggatgtagcccggagagcaagcatgaagcagcaacgagcaggaaaatcctaatctccgccgtgtaaagttttgtatatctggtttcttgattgcaatcgcagaccacaggaattagtataggcagccctttttcgtgtttgccagtggttcacccatatgtggttttgggatgaggcatctgcc

SEQ ID NO: 220509 - DNA, 4224 bp, Zea Mays
ctgaaacccgtatttttaggttaggccagggtgcatcttacaaaaatcatccacttcctcaccccctgcgtttcctccgacgtctgctctcccggcgaaggaagggaaggagccacgcgaaagaaagctgacgcccacgcgcccaggagcaccaccggtgacgcgtgatcatattcgagcaccaatcccctcatcctccccagcccccggcgctaaaatctacacaaagcctcgctaaaccggcctgattcgcgctcccgatctcgcgttcgatcccagcccaccgtgaggtcctccagcctcccgcctcccgccagatctcggtgtcgttcgttcggtttcgatttggtggtggaagggaagggatgagcgggatgagcgcacggataaaggagatggtgcgtgtggccacggcgcggctgggcggtgagcaggcggggggtggcggggcttcctcctcaggcttcgcgcgccgggagtccacggcgcggctcggcggcgggggcaccagcctccggaggcagccgcagccgatggcaccctccgtgcgcaccgtctgttgcaacgaccgcgaggccaacgcccctgtcgggtacaagggaaattctgtgtcgactacgaagtacaacatcctaactttcttacctaaaggattattcgagcaggcgggttgcaaatctttactttctcatgatctcaatcatgtcaactacacctatcagtccagttcatcctgtcactaatgttgttcccctaagtcttgtgcttctggtgtctctcatcaaggaagcttttgaggattggaagcgttttcagaatgatatgtcaattaacaatgcacatgtcgatgtattgcaaggtcaatgttgggaaagtactccatggaaacgactgcaggttggagatattgtgaggatcaagcaagatggttatttccctgctgacttgctcttcctatcaagtacaaaccctgatggtgtttgctacatcgagacagcaaatcttgatggggaaacaaatctgaaaataaggaaggctttggagaagacttgggactatgtaattcctgaaaaggcttctgagttcaaaggtgaagtgcagtgtgaacaaccaaacaattccctttatacgtttactggcaatcttatcatggacaagcagactatacctctctcaccgaaccagttactcctaagaggatgcagccttcgtaatacagaatacattgttggtgttgtcatattcaccgggcacgagacaaaagttatgatgaattccatgaatgttccctccaaaagaagtacattggagaaaaagctagacaagcttatccttgccctttttgcaaccctcttcacaatgtgtgttattggtgccattggaagtggtgtgtttattaatgaaaaatacttttatcttggattgcgtgggcatgtggaggaccagttcaatccccaaaacaaatttgtggtgaccattttaaccatgtttactctaataactctatactcaaccatcatcccaatttctctttatgtgtccattgagatgatcaaattcatacagtgcacaaaattcattaataacgatcttcatatgtaccatgctgagagtaacacccctgctttggcgcggacttctaatcttaatgaggaacttgggcaggttgaatatatattttctgacaaaactggaacgcttacaagaaacctgatggaattctttaaatgctcgattggtggagaaatgtatggaactggcatcacagagattgagaaaggaggagcagagcgggctggaattaaaattgatgatgatgagggtaaaaggtctgccaatgcagtccatgaaaaaggattcaattttgatgacgctagaatcatgcgtggtgcatggagaaatgaacctaatcttgaggcttgcaaggaattctttagatgccttgcaatctgtcatacagttcttccagagggtgaggaaactccggaaaagataagttaccaggctgcctcacctgatgaggctgcacttgtggctgctgctaagaattttggtttcttcttttacaggcgtacacccaccacagttatggttcgtgagtcacatgttgaaaggatggggagtatacaagatgttccatatgaaattctgaatgttctggaattcaacagcacgagaaagcgacaatcggtggtttgccgtttcccaaatggaagattagttctctattgcaagggtgctgataatgtcgtatatgaacgattggctgatggaaatcatgatatgaaaaagacaagcagagaacatctagagcaatttggttctgctggcttgcgtactctttgtcttgcctatcgggatcttagcagggagcaatacgaaagctggaatgaaaagtttgtacaagcaaagtcatctttacgagatcgtgataagaagctcgatgaggtggctgagttgattgaaaaagaccttatattagttgggtgcacagctatagaggacaaactgcaagaaggcgtgccaacctgcattgaaactctctctgcagctggcataaaaatttgggtgttaacgggagataagatggaaacagcaattaacattgcatatgcatgcagcttggtaaacaatgacaccaaacagttcatcattagttcagagacagacactattagggaggctgaagaccggggtgaccctgtggaaattgcacgtgttattaaagattcagtaaaacagagtctgaaaagctttcacgaggaagcccgacattctttgattagcacccctgaaaggaagttggctctcattattgatggtagatgcctgatgtatgcactggacccaactcttcgtgttgatcttcttggattgagtctaagttgccactcagttgtatgctgccgagtttctccgctgcaaaaggcacaggttacaagtttagttaggaagggcgctcagaaaataactctcagcattggtgacggtgctaatgatgtgagtatgattcaagctgctcatgttgggattggcatcagtggccaagaaggaatgcaagctgttatggctagcgactttgccattgcccagtttcgttttcttactgatttgcttcttgtacatggacggtggtcttacttgagactctgcaaggttatcacatacttcttctacaagaatctgacatttacactaactcagttctggttcactttccaaactggcttttctggtcagcggttttatgatgactggtttcagtctctatataatgttatcttcacggcactacctgtaattatagttggattgtttgataaggatgttagcgcgtcactgtcaaaaaaatacccacagctttacaaggaaggaatcaggaattcattcttcaagtggagagtgattgcagtgtggggtttctttgctttctatcagtcaatagtgttcttctacttcactgcagctgcaagtcagcatggtcacggttcatctggcaagattcttggcctatgggatgttagcactatggcctttacttgtgtcgtggtaactgtgaatctccgccttctcatggcatgcaactctataacgaggtggcattacatcagtgtggctggcagtatagtggcctggtttatgtttattttcatatactctgcaataatgacgtcgtttgacagacaggaaaatgagtattttgtgatttatgttctgatgagcacctttttcttctatatgacaatcttgcttgttccgatcattgccctgtttggtgatttcctatatttatcgattcaaaggtggctattcccctacgactaccaaataattcaggagcagcacaaggacgagccccacgtgtacagcagggtgcagctacccgagaccagccacctaagcccacaggaagcgagaagctacatgatgtcgatgctccctcgggagtcatcaaagcacactggctttgccttcgactccccaggatacgagtcgttcttcgcctcgcagcaaggcgtcggcgtgccacacaagccgtgggatgtagcccggagagcaagcatgaagcagcaacgagcaggaaaatcctaatctccgccgtgtaaagttttgtatatctggtttcttgattgcaatcgcagaccacaggaattagtataggcagccctttttcgtgtttgccagtggttcacccatatgtggttttgggatgaggcatctgcc

SEQ ID NO: 220510 - DNA, 4223 bp, Zea Mays
gttaggccagggtgcatcttacaaaaatcatccacttcctcaccccctgcgtttcctccgacgtctgctctcccggcgaaggaagggaaggagccacgcgaaagaaagctgacgcccacgcgcccaggagcaccaccggtgacgcgtgatcatattcgagcaccaatcccctcatcctccccagcccccggcgctaaaatctacacaaagcctcgctaaaccggcctgattcgcgctcccgatctcgcgttcgatcccagcccaccgtgaggtcctccagcctcccgcctcccgccagatctcggtgtcgttcgttcggtttcgatttggtggtggaagggaagggatgagcgggatgagcgcacggataaaggagatggtgcgtgtggccacggcgcggctgggcggtgagcaggcggggggtggcggggcttcctcctcaggcttcgcgcgccgggagtccacggcgcggctcggcggcgggggcaccagcctccggaggcagccgcagccgatggcaccctccgtgcgcaccgtctgttgcaacgaccgcgaggccaacgcccctgtcgggtacaagggaaattctgtgtcgactacgaagtacaacatcctaactttcttacctaaaggattattcgagcagttcaggcgggttgcaaatctttactttctcatgatctcaatcatgtcaactacacctatcagtccagttcatcctgtcactaatgttgttcccctaagtcttgtgcttctggtgtctctcatcaaggaagcttttgaggattggaagcgttttcagaatgatatgtcaattaacaatgcacatgtcgatgtattgcaaggtcaatgttgggaaagtactccatggaaacgactgcaggttggagatattgtgaggatcaagcaagatggttatttccctgctgacttgctcttcctatcaagtacaaaccctgatggtgtttgctacatcgagacagcaaatcttgatggggaaacaaatctgaaaataaggaaggctttggagaagacttgggactatgtaattcctgaaaaggcttctgagttcaaaggtgaagtgcagtgtgaacaaccaaacaattccctttatacgtttactggcaatcttatcatggacaagcagactatacctctctcaccgaaccagttactcctaagaggatgcagccttcgtaatacagaatacattgttggtgttgtcatattcaccgggcacgagacaaaaaaaaccgttgcaggttatgatgaattccatgaatgttccctccaaaagaagtacattggagaaaaagctagacaagcttatccttgccctttttgcaaccctcttcacaatgtgtgttattggtgccattggaagtggtgtgtttattaatgaaaaatacttttatcttggattgcgtgggcatgtggaggaccagttcaatccccaaaacaaatttgtggtgaccattttaaccatgtttactctaataactctatactcaaccatcatcccaatttctctttatgtgtccattgagatgatcaaattcatacagtgcacaaaattcattaataacgatcttcatatgtaccatgctgagagtaacacccctgctttggcgcggacttctaatcttaatgaggaacttgggcaggttgaatatatattttctgacaaaactggaacgcttacaagaaacctgatggaattctttaaatgctcgattggtggagaaatgtatggaactggcatcacagagattgagaaaggaggagcagagcgggctggaattaaaattgatgatgatgagggtaaaaggtctgccaatgcagtccatgaaaaaggattcaattttgatgacgctagaatcatgcgtggtgcatggagaaatgaacctaatcttgaggcttgcaaggaattctttagatgccttgcaatctgtcatacagttcttccagagggtgaggaaactccggaaaagataagttaccaggctgcctcacctgatgaggctgcacttgtggctgctgctaagaattttggtttcttcttttacaggcgtacacccaccacagttatggttcgtgagtcacatgttgaaaggatggggagtatacaagatgttccatatgaaattctgaatgttctggaattcaacagcacgagaaagcgacaatcggtggtttgccgtttcccaaatggaagattagttctctattgcaagggtgctgataatgtcgtatatgaacgattggctgatggaaatcatgatatgaaaaagacaagcagagaacatctagagcaatttggttctgctggcttgcgtactctttgtcttgcctatcgggatcttagcagggagcaatacgaaagctggaatgaaaagtttgtacaagcaaagtcatctttacgagatcgtgataagaagctcgatgaggtggctgagttgattgaaaaagaccttatattagttgggtgcacagctatagaggacaaactgcaagaaggcgtgccaacctgcattgaaactctctctgcagctggcataaaaatttgggtgttaacgggagataagatggaaacagcaattaacattgcatatgcatgcagcttggtaaacaatgacaccaaacagttcatcattagttcagagacagacactattagggaggctgaagaccggggtgaccctgtggaaattgcacgtgttattaaagattcagtaaaacagagtctgaaaagctttcacgaggaagcccgacattctttgattagcacccctgaaaggaagttggctctcattattgatggtagatgcctgatgtatgcactggacccaactcttcgtgttgatcttcttggattgagtctaagttgccactcagttgtatgctgccgagtttctccgctgcaaaaggcacaggttacaagtttagttaggaagggcgctcagaaaataactctcagcattggtgacggtgctaatgatgtgagtatgattcaagctgctcatgttgggattggcatcagtggccaagaaggaatgcaagctgttatggctagcgactttgccattgcccagtttcgttttcttactgatttgcttcttgtacatggacggtggtcttacttgagactctgcaaggttatcacatacttcttctacaagaatctgacatttacactaactcagttctggttcactttccaaactggcttttctggtcagcggttttatgatgactggtttcagtctctatataatgttatcttcacggcactacctgtaattatagttggattgtttgataaggatgttagcgcgtcactgtcaaaaaaatacccacagctttacaaggaaggaatcaggaattcattcttcaagtggagagtgattgcagtgtggggtttctttgctttctatcagtcaatagtgttcttctacttcactgcagctgcaagtcagcatggtcacggttcatctggcaagattcttggcctatgggatgttagcactatggcctttacttgtgtcgtggtaactgtgaatctccgccttctcatggcatgcaactctataacgaggtggcattacatcagtgtggctggcagtatagtggcctggtttatgtttattttcatatactctgcaataatgacgtcgtttgacagacaggaaaatgagtattttgtgatttatgttctgatgagcacctttttcttctatatgacaatcttgcttgttccgatcattgccctgtttggtgatttcctatatttatcgattcaaaggtggctattcccctacgactaccaaataattcaggagcagcacaaggacgagccccacgtgtacagcagggtgcagctacccgagaccagccacctaagcccacaggaagcgagaagctacatgatgtcgatgctccctcgggagtcatcaaagcacactggctttgccttcgactccccaggatacgagtcgttcttcgcctcgcagcaaggcgtcggcgtgccacacaagccgtgggatgtagcccggagagcaagcatgaagcagcaacgagcaggaaaatcctaatctccgccgtgtaaagttttgtatatctggtttcttgattgcaatcgcagaccacaggaattagtataggcagccctttttcgtgtttgccagtggttcacccatatgtggttttgggatgaggcatctgcc

SEQ ID NO: 220511 - DNA, 1400 bp, Zea Mays
gtgcatcttacaaaaatcatccacttcctcaccccctgcgtttcctccgacgtctgctctcccggcgaaggaagggaaggagccacgcgaaagaaagctgacgcccacgcgcccaggagcaccaccggtgacgcgtgatcatattcgagcaccaatcccctcatcctccccagcccccggcgctaaaatctacacaaagcctcgctaaaccggcctgattcgcgctcccgatctcgcgttcgatcccagcccaccgtgaggtcctccagcctcccgcctcccgccagatctcggtgtcgttcgttcggtttcgatttggtggtggaagggaagggatgagcgggatgagcgcacggataaaggagatggtgcgtgtggccacggcgcggctgggcggtgagcaggcggggggtggcggggcttcctcctcaggcttcgcgcgccgggagtccacggcgcggctcggcggcgggggcaccagcctccggaggcagccgcagccgatggcaccctccgtgcgcaccgtctgttgcaacgaccgcgaggccaacgcccctgtcgggtacaagggaaattctgtgtcgactacgaagtacaacatcctaactttcttacctaaaggattattcgagcagttcaggcgggttgcaaatctttactttctcatgatctcaatcatgtcaactacacctatcagtccagttcatcctgtcactaatgttgttcccctaagtcttgtgcttctggtgtctctcatcaaggaagcttttgaggattggaagcgttttcagaatgatatgtcaattaacaatgcacatgtcgatgtattgcaaggtcaatgttgggaaagtactccatggaaacgactgcaggttggagatattgtgaggatcaagcaagatggttatttccctgctgacttgctcttcctatcaagtacaaaccctgatggtgtttgctacatcgagacagcaaatcttgatggggaaacaaatctgaaaataaggaaggctttggagaagacttgggactatgtaattcctgaaaaggcttctgagttcaaaggtgaagtgcagtgtgaacaaccaaacaattccctttatacgtttactggcaatcttatcatggacaagcagactatacctctctcaccgaaccagttactcctaagaggatgcagccttcgtaatacagaatacattgttggtgttgtcatattcaccgggcacgagacaaaagttatgatgaattccatgaatgttccctccaaaagaagtacattggagaaaaagctagacaagcttatccttgccctttttgcaaccctcttcacaatgtgtgttattggtgccattggaagaagaatcagattggtgggataatcattgtatcgcattggg

SEQ ID NO: 220512 - DNA, 4109 bp, Zea Mays
tgcatcttacaaaaatcatccacttcctcaccccctgcgtttcctccgacgtctgctctcccggcgaaggaagggaaggagccacgcgaaagaaagctgacgcccacgcgcccaggagcaccaccggtgacgcgtgatcatattcgagcaccaatcccctcatcctccccagcccccggcgctaaaatctacacaaagcctcgctaaaccggcctgattcgcgctcccgatctcgcgttcgatcccagcccaccgtgaggtcctccagcctcccgcctcccgccagatctcggtgtcgttcgttcggtttcgatttggtggtggaagggaagggatgagcgggatgagcgcacggataaaggagatggtgcgtgtggccacggcgcggctgggcggtgagcaggcggggggtggcggggcttcctcctcaggcttcgcgcgccgggagtccacggcgcggctcggcggcgggggcaccagcctccggaggcagccgcagccgatggcaccctccgtgcgcaccgtctgttgcaacgaccgcgaggccaacgcccctgtcgggtacaagggaaattctgtgtcgactacgaagtacaacatcctaactttcttacctaaaggattattcgagcagttcaggcgggttgcaaatctttactttctcatgatctcaatcatgtcaactacacctatcagtccagttcatcctgtcactaatgttgttcccctaagtcttgtgcttctggtgtctctcatcaaggaagcttttgaggattgggtcaatgttgggaaagtactccatggaaacgactgcaggttggagatattgtgaggatcaagcaagatggttatttccctgctgacttgctcttcctatcaagtacaaaccctgatggtgtttgctacatcgagacagcaaatcttgatggggaaacaaatctgaaaataaggaaggctttggagaagacttgggactatgtaattcctgaaaaggcttctgagttcaaaggtgaagtgcagtgtgaacaaccaaacaattccctttatacgtttactggcaatcttatcatggacaagcagactatacctctctcaccgaaccagttactcctaagaggatgcagccttcgtaatacagaatacattgttggtgttgtcatattcaccgggcacgagacaaaagttatgatgaattccatgaatgttccctccaaaagaagtacattggagaaaaagctagacaagcttatccttgccctttttgcaaccctcttcacaatgtgtgttattggtgccattggaagtggtgtgtttattaatgaaaaatacttttatcttggattgcgtgggcatgtggaggaccagttcaatccccaaaacaaatttgtggtgaccattttaaccatgtttactctaataactctatactcaaccatcatcccaatttctctttatgtgtccattgagatgatcaaattcatacagtgcacaaaattcattaataacgatcttcatatgtaccatgctgagagtaacacccctgctttggcgcggacttctaatcttaatgaggaacttgggcaggttgaatatatattttctgacaaaactggaacgcttacaagaaacctgatggaattctttaaatgctcgattggtggagaaatgtatggaactggcatcacagagattgagaaaggaggagcagagcgggctggaattaaaattgatgatgatgagggtaaaaggtctgccaatgcagtccatgaaaaaggattcaattttgatgacgctagaatcatgcgtggtgcatggagaaatgaacctaatcttgaggcttgcaaggaattctttagatgccttgcaatctgtcatacagttcttccagagggtgaggaaactccggaaaagataagttaccaggctgcctcacctgatgaggctgcacttgtggctgctgctaagaattttggtttcttcttttacaggcgtacacccaccacagttatggttcgtgagtcacatgttgaaaggatggggagtatacaagatgttccatatgaaattctgaatgttctggaattcaacagcacgagaaagcgacaatcggtggtttgccgtttcccaaatggaagattagttctctattgcaagggtgctgataatgtcgtatatgaacgattggctgatggaaatcatgatatgaaaaagacaagcagagaacatctagagcaatttggttctgctggcttgcgtactctttgtcttgcctatcgggatcttagcagggagcaatacgaaagctggaatgaaaagtttgtacaagcaaagtcatctttacgagatcgtgataagaagctcgatgaggtggctgagttgattgaaaaagaccttatattagttgggtgcacagctatagaggacaaactgcaagaaggcgtgccaacctgcattgaaactctctctgcagctggcataaaaatttgggtgttaacgggagataagatggaaacagcaattaacattgcatatgcatgcagcttggtaaacaatgacaccaaacagttcatcattagttcagagacagacactattagggaggctgaagaccggattcagtaaaacagagtctgaaaagctttcacgaggaagcccgacattctttgattagcacccctgaaaggaagttggctctcattattgatggtagatgcctgatgtatgcactggacccaactcttcgtgttgatcttcttggattgagtctaagttgccactcagttgtatgctgccgagtttctccgctgcaaaaggcacaggttacaagtttagttaggaagggcgctcagaaaataactctcagcattggtgacggtgctaatgatgtgagtatgattcaagctgctcatgttgggattggcatcagtggccaagaaggaatgcaagctgttatggctagcgactttgccattgcccagtttcgttttcttactgatttgcttcttgtacatggacggtggtcttacttgagactctgcaaggttatcacatacttcttctacaagaatctgacatttacactaactcagttctggttcactttccaaactggcttttctggtcagcggttttatgatgactggtttcagtctctatataatgttatcttcacggcactacctgtaattatagttggattgtttgataaggatgttagcgcgtcactgtcaaaaaaatacccacagctttacaaggaaggaatcaggaattcattcttcaagtggagagtgattgcagtgtggggtttctttgctttctatcagtcaatagtgttcttctacttcactgcagctgcaagtcagcatggtcacggttcatctggcaagattcttggcctatgggatgttagcactatggcctttacttgtgtcgtggtaactgtgaatctccgccttctcatggcatgcaactctataacgaggtggcattacatcagtgtggctggcagtatagtggcctggtttatgtttattttcatatactctgcaataatgacgtcgtttgacagacaggaaaatgagtattttgtgatttatgttctgatgagcacctttttcttctatatgacaatcttgcttgttccgatcattgccctgtttggtgatttcctatatttatcgattcaaaggtggctattcccctacgactaccaaataattcaggagcagcacaaggacgagccccacgtgtacagcagggtgcagctacccgagaccagccacctaagcccacaggaagcgagaagctacatgatgtcgatgctccctcgggagtcatcaaagcacactggctttgccttcgactccccaggatacgagtcgttcttcgcctcgcagcaaggcgtcggcgtgccacacaagccgtgggatgtagcccggagagcaagcatgaagcagcaacgagcaggaaaatcctaatctccgccgtgtaaagttttgtatatctggtttcttgattgcaatcgcagaccacaggaattagtataggcagccctttttcgtgtttgccagtggttcacccatatgtggttttgggatgaggcatctgcc

SEQ ID NO: 220513 - DNA, 1004 bp, Zea Mays
atgcatcccatctccatccccatccatagagctgcaggcggcctgcgctgcagccaacaagctcatcagctcaccgtacctaggaggacgaccgagcagctaaggtagtagtagctagctagccagtgatggcgggctacaaagcgcagggcggggcgctcggcgtcgtcctggctgtcgccgcgctcttcgcggcggcagcgatggcgatggcggtggacgacgagcacatgtaccactggaagtgcttcaagtcgtgcacggggaactgccgcgacgaggacgcctttgacgacgtcgtcgcccgccactccgagggctcctcccacgtcgtcgtcgctgccgtctccggcggcaagtgcaaggacaggtgcctcagcgagtgcttcgaggacctgccggccctctgctaccaccagtgcgtcgccaccaactgcctctgctacccaccctttagcaacgagaaagtgatgtgcctgaagagctgctgcaacaagtgcttccaccacggcccgcctgccccgaagccgaggccgccagcgccaaagccaccgacgcccagggcgccgccaccgccaaagaagccgtgtccctgcccccccggcagcgacgaggtcgaggccagcgaaaacaactgatacgtacgatggatcggccagtcgtcgtcgtctcagaataactccatatactataccacttgacttcgcaagtgtacgtgtgtgggtacgtcggcacatcaagtaggccccactatacgacgcgacgcatatatgtacgcaacgtacttaattgctgctaccaaggaaaaggaaggaaagcaattctagctccgttgttgtaaatgatgcatgtactgaaatttatcttctatagagtgcgcagaggcacattgcgcacttagtattatgtatagcatacatcgaatgttcaagtttactgaaaaacaaatcggtgcgagtgcaaaagacatgcaatgacacggtgtcctgtttggccaaaaagag

SEQ ID NO: 220514 - DNA, 1465 bp, Zea Mays
gcttgcggacgatttcccccggtttttgtttgaatttctcgggcgctgttatgtgcggcggctagatctgcttgtcgctggtgcagtaggagtttctcgctcggttccgatcctgagaacccgaccgcgcgggtatctgtattccttgatcaacatgtcgcgggaggagaatgtttatatggccaagctggctgagcaagcagaacggtacgaggaaatggttgaatacatggagaaggtggctaagaccacagatgtgcaagagctcactgttgaggagcgtaaccttctatctgttgcctacaagaatgtgattgcggccccccgtgcctcatggcgcattatctcctccatcgagcagaaagaggagtcccgtaagaatgaggaacatgttgcacagatcaaggaataccgtggcaagattgaggctgaattgagcaacatttgtgatggtatcctaaagctgcttgacacgcaccttgtgccttcctccactgccacagagtcgaaggtgttttacctcaagatgaagggtgattatcacaggtaccttgctgagtttaagactggtgctgagaggaaggaatctgcagagagcacaatggtagcttataaggcagctcaggatattgcattggctgaactgccacctattcatcccataaggcttggacttgcacttaacttctcagttttctattacgagattcagaactctccagacaaagcttgcaatcttgccaaggaggcgtttgatgaagctatttctcagttggacatgcttggtgaggattcctacaaagatagcaacttgattatgcagctcctgagggacaacttgaccctctggacggaggacggcattgaggagggcttagaatcctctaagggcgatgctggtgagggtcagtagcctggtaaacttagattgatggttcgacgtgtttctcaagcacatcgtgttggacgcccagtgctgacaaaaggcttttgctgctccatgcattccaagcttctgccccctcgttcgcaccctctttatgttgttggctggtagtggtcagatttagtcccattggtttagttggccctgggtccatctgaactgatgtattgttactgctatggaagtcattcctttagttttgctctggcagtggattgctgttgggtcgtgttttcagtctttattggttccgatcggacgctgttgcggcaaaccacccctgtagatactcttcacatgctgaagaaaactaccagcagccgtttagcctgaataattgctaaatgataggttaccgttgaggctgattggtttttatttttttttaccctgtgacatcaagttcttgggtaactttttttaccgttgaggctcaaacaaattgttaagtgggagaattgtgaagtgggagtggtaatggatcatgatctaaatgattcttcacaattcattgaaacc

SEQ ID NO: 220515 - DNA, 1442 bp, Zea Mays
gattcgaagcagcctctccacatttgatgggggaaggcttgcctcagtttatcccttcctcagacccctggtacggggtctgtccttatcttccctagaggggaatctatagtcaatgcatcagatgtcattattttggagggcattttagtgttccatgaccagagagttcgcaatctgatggacatgaaaatttttgtagacacagatgctgacattaggcttgctcgacgaatcagacgtgatacagttgaaagaggaagagatatcagctccgtgcttgaccaatatgggaggtttgtgaagccagcgttcgatgattttgttttgccttcaaagaagtatgctgacgtgatcattcctcgaggtggtgataaccatgtagcagttgatctgattgttcaacatatccgtacaaaacttggtcagcatgacttgtgcaaaatctatccaaatgttcatgttgttcaatcaacttttcagatccgaggaatgcatactcttatccgtgatagggacatcaccacacctgactttgtattttattcagatcgattgatccgtttggtagtggagcatggtcttggacatttgccatttacagaaaagcaggttattaccccaacaggatctgtttatatgggagttgacttttgtaagaagctctgtggagtctctattgtgcgaagtggtgagagtatggagaacgcattgcgtgcttgttgtaaaggaataaaaattgggaaaattctaattcatcgtgttggagacaatggacaacagcttgtttatcacaaactgcccatggatattgctgaacgacatgttctacttttggatccggtgcttggtacaggcaactcagtagcccaagcaattgaccttcttataagaaaaggtgttcctgaggatcggatcatttttctcaatctcatctcggctcctgaagggattcagtgtatctgcaagcgatttccttcgctgaagattgttacatctgaaatcgattatggtctgaacgaggaattcagggtgatcccaggactgggagaatatggcgaccgctacttcggcacagacaattgatggatcataccactctatggctgtgtgaagatctcacttggtccctggatagggatggtatcttgcaagtaatatttaatatggaggcgtaattgtgtttaatagtcggcatgccttagtaacatgtagaaccttctgcataaagcttgaccaaggacagcgggatgctagagaaggacctgtgaacggagaacgtggtgtgtgttttgtcttgtacgggtgcagaaacattgatgttttcaaataagtgtgtttgatccaaatactttacggtgaagtcatgagattaaatctgcaaagcactttaactctgttgttctattgggtttttaattccaacctacatcaacttgctc

SEQ ID NO: 220516 - DNA, 1969 bp, Zea Mays
gtacacaagctcgcctcgcaccagaaacccgcgaatcaatcccgaatcccgatcgaccggcggcgcgggaggcgatgccggacaaggcggtggacgacgtcatggaggccgcggtgggggcccacttcagcggcctccgcctcgaggcgctgcgcctctccacctctgcgccctcttccccttcctcctcccccgccgccgcggcgcacacgcactccaacggagccgtctacgccaacggcaccaccgagcttccctctcctgccgctgcccggcagccattcgtcatcggggtttctggagggacggcgtcggggaagacgacggtgtgcgacatgatcatccagcagctgcacgaccaccgtgtcgtgctcgttaaccaggattcgttttaccgtggccttactgctgaagagtctgcacatgcacaagactataattttgatcaccctgatgcatttgatacagagcaacttctagaatgcatggggcagctgaaatgtgctcaacctgtaaatgttcctatatatgatttcaagaagcatcgacggtgttctgaaagctttagaaaggtcaatgcatcagatgtcattattttggagggcattttagtgttccatgaccagagagttcgcaatctgatggacatgaaaatttttgtagacacagatgctgacattaggcttgctcgacgaatcagacgtgatacagttgaaagaggaagagatatcagctccgtgcttgaccaatatgggaggtttgtgaagccagcgttcgatgattttgttttgccttcaaagaagtatgctgacgtgatcattcctcgaggtggtgataaccatgtagcagttgatctgattgttcaacatatccgtacaaaacttggtcagcatgacttgtgcaaaatctatccaaatgttcatgttgttcaatcaacttttcagatccgaggaatgcatactcttatccgtgatagggacatcaccacacctgactttgtattttattcagatcgattgatccgtttggtagtggagcatggtcttggacatttgccatttacagaaaagcaggttattaccccaacaggatctgtttatatgggagttgacttttgtaagaagctctgtggagtctctattgtgcgaagtggtgagagtatggagaacgcattgcgtgcttgttgtaaaggaataaaaattgggaaaattctaattcatcgtgttggagacaatggacaacagagggagtatgcttaaaatgatcgagttaatcacgatggataactattataaactttctgcatctagcttgtttatcacaaactgcccatggatattgctgaacgacatgttctacttttggatccggtgcttggtacaggcaactcagtagcccaagcaattgaccttcttataagaaaaggtgttcctgaggatcggatcatttttctcaatctcatctcggctcctgaagggattcagtgtatctgcaagcgatttccttcgctgaagattgttacatctgaaatcgattatggtctgaacgaggaattcagggtgatcccaggactgggagaatatggcgaccgctacttcggcacagacaattgatggatcataccactctatggctgtgtgaagatctcacttggtccctggatagggatggtatcttgcaagtaatatttaatatggaggcgtaattgtgtttaatagtcggcatgccttagtaacatgtagaaccttctgcataaagcttgaccaaggacagcgggatgctagagaaggacctgtgaacggagaacgtggtgtgtgttttgtcttgtacgggtgcagaaacattgatgttttcaaataagtgtgtttgatccaaatactttacggtgaagtcatgagattaaatctgcaaagcactttaactctgttgttctattgggtttttaattccaacctacatcaacttgctc

SEQ ID NO: 220517 - DNA, 1894 bp, Zea Mays
gtacacaagctcgcctcgcaccagaaacccgcgaatcaatcccgaatcccgatcgaccggcggcgcgggaggcgatgccggacaaggcggtggacgacgtcatggaggccgcggtgggggcccacttcagcggcctccgcctcgaggcgctgcgcctctccacctctgcgccctcttccccttcctcctcccccgccgccgcggcgcacacgcactccaacggagccgtctacgccaacggcaccaccgagcttccctctcctgccgctgcccggcagccattcgtcatcggggtttctggagggacggcgtcggggaagacgacggtgtgcgacatgatcatccagcagctgcacgaccaccgtgtcgtgctcgttaaccaggattcgttttaccgtggccttactgctgaagagtctgcacatgcacaagactataattttgatcaccctgatgcatttgatacagagcaacttctagaatgcatggggcagctgaaatgtgctcaacctgtaaatgttcctatatatgatttcaagaagcatcgacggtgttctgaaagctttagaaaggtcaatgcatcagatgtcattattttggagggcattttagtgttccatgaccagagagttcgcaatctgatggacatgaaaatttttgtagacacagatgctgacattaggcttgctcgacgaatcagacgtgatacagttgaaagaggaagagatatcagctccgtgcttgaccaatatgggaggtttgtgaagccagcgttcgatgattttgttttgccttcaaagaagtatgctgacgtgatcattcctcgaggtggtgataaccatgtagcagttgatctgattgttcaacatatccgtacaaaacttggtcagcatgacttgtgcaaaatctatccaaatgttcatgttgttcaatcaacttttcagatccgaggaatgcatactcttatccgtgatagggacatcaccacacctgactttgtattttattcagatcgattgatccgtttggtagtggagcatggtcttggacatttgccatttacagaaaagcaggttattaccccaacaggatctgtttatatgggagttgacttttgtaagaagctctgtggagtctctattgtgcgaagtggtgagagtatggagaacgcattgcgtgcttgttgtaaaggaataaaaattgggaaaattctaattcatcgtgttggagacaatggacaacagcttgtttatcacaaactgcccatggatattgctgaacgacatgttctacttttggatccggtgcttggtacagtagcccaagcaattgaccttcttataagaaaaggtgttcctgaggatcggatcatttttctcaatctcatctcggctcctgaagggattcagtgtatctgcaagcgatttccttcgctgaagattgttacatctgaaatcgattatggtctgaacgaggaattcagggtgatcccaggactgggagaatatggcgaccgctacttcggcacagacaattgatggatcataccactctatggctgtgtgaagatctcacttggtccctggatagggatggtatcttgcaagtaatatttaatatggaggcgtaattgtgtttaatagtcggcatgccttagtaacatgtagaaccttctgcataaagcttgaccaaggacagcgggatgctagagaaggacctgtgaacggagaacgtggtgtgtgttttgtcttgtacgggtgcagaaacattgatgttttcaaataagtgtgtttgatccaaatactttacggtgaagtcatgagattaaatctgcaaagcactttaactctgttgttctattgggtttttaattccaacctacatcaacttgctc

SEQ ID NO: 220518 - DNA, 1151 bp, Zea Mays
atgatcgatactttgcctattcggtcagctacgactgaaaggttaccggagctgctgggggcgattcagctcttggcgcttcacgggttgaatttgcctgtatttggaaagtctggtgctcttgatagccaaccggcgagctgaggtgatagattggcttggtgggttgctgccggagttcgacttgccgttggattcttcagacgaggagctgcgggagtacctcattgatggcacgggactatgctacattgcagagaaactcatgcccggcattcaggaggaaatgtggggtggtaatgcatcggatcagaggtcgaatgtgaagaaattcctctattttgttgcggagatgggtctgccaggtttcagtgtcaaggatctggaggaggtgagatttcaaatgaccgacagttcacttgagacgagtacaggagctgcatcgattgggttgtgtgtggtatattatgtcaaggtgtgcaaatatgcatacaagctggtacatgctcagtctggctcatcaacgagacatgagtgtaaaagaatggattatatagcccatggccaaacaacgaatactgctactttacaaaagatggggaagatggagaaaacaataggggaaaaagaagtgggagggttaatagggcattcaaccagcgatacctcaaggcgtgtggagcaagaatcagtggggaatgcctgaatgaacaagatacaagaagggcacagagactatgggctatggcaggtttgcgtgggccagatcccccatggctgatgttccttctctggatgcgaagtcctgtaacattcaaacaaattgagcaacaaaattctgttgaaggttcatatgcacacaaatctagccccgcgtagcatgagcatatgtgatagcatggttgagtacctgaaggcggtgtaacaagtgcatcaagaacaaatgcacgaacacctggtgtggcggaaacagattttaagtcagaaagaagtgttgatttggtagaaaaagaggggggggggggggggggagggtaaacacaggaaattgaagttatgtggttcatgccagatagaatagcacgctgactcgtgcaacggggtgtcgccacaaaaatcttgttgcacgaacagcgcctgtatctaaaagc

SEQ ID NO: 220519 - DNA, 1506 bp, Zea Mays
gcgcaatttgtgaaaacaacgcacctatcagcatgggccacgatgttcaaaaatctggtttaacagagacgagtactgtggctatagtagtttactcgtgctaacgataatttcacgcgagggagtagggacggcatggtactgcactgaccaccggccttaacttgcaagcaagaacaaaaatcaaaacccaactaaccaggagagacccagtgaagcgtagaagtcacagggacggcagggggacgaggaggacgacaggagggacagaggctgataaaatctaggacaaaagccctcgagctcacgccgatccgcctcctgcattgccttgaagcctctcgattcgggcagacccgagctgccccgcggagggctcgatctgggcccagatcgagcaggcgagcagcatttcgatccggtgcatgctcaagtcccggcggtgaggcatggggcaggggcacgtggacgagttccttgcagccaaccggcgagctgaggtgatagattggcttggtgggttgctgccggagttcgacttgccgttggattcttcagacgaggagctgcgggagtacctcattgatggcacgggactatgctacattgcagagaaactcatgcccggcattcaggaggaaatgtggggtggtaatgcatcggatcagaggtcgaatgtgaagaaattcctctattttgttgcggagatgggtctgccaggtttcagtgtcaaggatctggaggaggtgagatttcaaatgaccgacagttcacttgagacgagtacaggagctgcatcgattgggttgtgtgtggtatattatgtcaaggtgtgcaaatatgcatacaagctggtacatgctcagtctggctcatcaacgagacatgagtgtaaaagaatggattatatagcccatggccaaacaacgaatactgctactttacaaaagatggggaagatggagaaaacaataggggaaaaagaagtgggagggttaatagggcattcaaccagcgatacctcaaggcgtgtggagcaagaatcagtggggaatgcctgaatgaacaagatacaagaagggcacagagactatgggctatggcaggtttgcgtgggccagatcccccatggctgatgttccttctctggatgcgaagtcctgtaacattcaaacaaattgagcaacaaaattctgttgaaggttcatatgcacacaaatctagccccgcgtagcatgagcatatgtgatagcatggttgagtacctgaaggcggtgtaacaagtgcatcaagaacaaatgcacgaacacctggtgtggcggaaacagattttaagtcagaaagaagtgttgatttggtagaaaaagaggggggggggggggggggagggtaaacacaggaaattgaagttatgtggttcatgccagatagaatagcacgctgactcgtgcaacggggtgtcgccacaaaaatcttgttgcacgaacagcgcctgtatctaaaagc

SEQ ID NO: 220520 - DNA, 3104 bp, Zea Mays
tagtaagtagtaacagtacactattatatactgaaatctttatccagttcaggcatggtcggaatgttcaaacggcagagagcaaaatcgaccatgaccaccgcgcgcacatggctgcaacatcacagcacatggttacaccaccacttccaagtcccaaccacacaacacatcacaattcatgttgcagtcccacactgcccgacttctacagtactactacagctgtgtcgctctatgtttttataggctgtggatcgtcaaaaatccacgcagaaacgcctgacccacatggtttctccatgacttccagcaaaaaaaagggggggcagacccacatgcttttcacaaggtccgcaagtcggctgcaccatgcttcttggaggattcagaactctcatcacttttatctcttccggactatgagagctttgttagagaaagattggtcaagaacataaatagaaaagggaatattgatgacacttcatccttctctactattgttgaacagttgagcaaccaaactgaatacctttctagttttttaaaagatttgtcaacctacatgaatagcaatattattgtggtgcttcgttctctgcaactagtgagcaacacctttgcccatactctagaagagcatgacatgttgaaggttgaattggggaacaaggatgctcataacagagctcaagaatctgaagtgctttctctacaaaaagatctgagagcaatgtcatcaaaatgtatttattgcgtccaacaaattgaaattgtttttgacgatatggttgatcttggatatgcaatagacttggctacaggcagctcaagcatagggtctgaactagaggtaactgtgtctgatctgaagaatgaggataccagtgattatagtaaggtggctgatactttgcttgctacaattgacacacttaagtccaagtctgaaaaattatctaccattaaggggcttgtgataacttcattggatgacttcaaaatgaagctgaaacaagctgaagcagctgctgaaactgcttcacatgagcatcagttgtctgttgaaagggtatgcatgctggagaaagaactcaaaatattacaggatgagtgcaacaaaatggaactaaatattcaagagtataaggaaagggagggtgcattgaaggcaagggagttagagttgctatcagttgagcacactcaaatttcagcagacagaggtttaactgacaatgcaatttcaaaagatcaaacggaagctcttgttgagaagataagtaagttaaatatgctgtcaggcgagtcaaatgtgcagagggaagaggctacaagtccgcttgacaaactttttgttgtcattgatgaattcagtgcacttcaacacgaggttgagaccttaagatatgaaaatgaagatttacagttaaatattgaatcctatacccgtgaaattgaacagctaagagaggtctccagaaatagtgatctaactaatagggagttggaatccaaaggaagtgagcttcttgaggtagctgttagtatggagcgaatgattcagcggttaggatatcttggaggaaaagatgtactagaagataacaaacctgctagcacacaagctctcttatcgaagctggaaaagctaataatagcttcaagtactgaatctgggaattctaaatccataatacaggagctgggagcaaagctgcagtcaagggaaaaggcagttgatgagctatcaacaaaagtaaagatgctcgaggatttgtgccatgcacaactttctcagccagaacctagtaaagacagatcatttgaagcatcttcctcaacaattgggtcagatatgtctgatattgaagatgcgggaccagtgggcaagacaacatcagtttcatctgtttctacagctgcacatgctagaacaatgcggaaggggtcagcggatcatcttgttgtcaacattggttcagagtcagaacgattgattgctgcacaagattcagatgacaaggggcgtataaaatcgctccatacatctggcttcattccagctcagggaaagcacatcgctgatagggtcgatgccttctgggtctcggggagccaaattctgatgaaccggccacgagcaaggctagggcttatgttgtactggctggctgtgcacctatggttgatgggcagcatcttgtgacaccgcttctcaataccgagacccatctcataattgtacaatagcacgtattagcagtttcttcttccattcatacaatacatggtagatgttagaaataccatttttttcattgtcttcctcctgctgagatttgcacttgagcagtatgtgttgaatttttgcacacaagatgtaacgcgcagaaaaaataacgttgtcattctttggtatagtgaagaggtggtaattgtatttgtagatgtggtggccctgatcacctggtgggccccatcatcgtaaattcgttgtttgaaattgcgtgcgtttgaggtctgacaatgtagaggccttatgggtcgacctttgacgtatgaatagaaacgtatatagttggttacacttttcgctcctccatgaataattttcgattggaggtgactggttatacagtcacaaatctttcctccaaaaaacataaataaaggagtgaatatgtatttgttatcatgaatctgtgtagtttcataagggataaggcataaatcttcatggcatcatttgtgtttttccacacaatttgtaatgcaaaagaatgtagggtgtttcaaccaaacaacaagaaacaaaaaagatttaaatacatccttaacatactaacatttttacggtggggctgctcatttaaactggactggaaacaaaataacaccgtaaaaatgttggcttttgacaaatctgacactgaatacgccaaagaccacagttgttaccaaaagaaatgcagagttccaatctctcactctcacctttcagacaaccacaggaaccagctggtacaacttgacggtccaccttctaaataaccagaatttgctacgtaagttctgtacaacagcaggacacatccctg

SEQ ID NO: 220521 - DNA, 1025 bp, Zea Mays
ctcaaactggcccgttacgtgaatttggcggggctgccgcagggatccgagacgtggtggctgcacagcgacgtccgtgggagcgggcgagcgactgcaggcagagggtttcgtccgaaccctagtgtcctccacacgccgtcgccatggccgccgtccgcgccgccctccgcctgcagcgccagtgcctcgccgccaacccctttctcttctccgggcatggcctccgctaccgcaagcttgaggtcatcctcaccacgactattgataagctggggaaagcaggcgaggtggtcaaggtggcgcctggccacttccgcaaccaccttatgcccaagatgctcgcagtcccgaacctggacaaattcgccatactcatccgagagcagcgcaagctctatcaacgcgaagaggaggtcgcggtgaaacaagtcacggagaaagatgatgatgcacgggaagaaagaatgaagcagtaccaaacggcagcgaagcggctagataacgcactcttggtgttgaggaggttcatctcgactggaaacgagctgcgtactcctgtaacaaaagacgaaattgtttccgaggtggcgaggcagctcaacatcaacatccatccggagaacctgcatctgcactcacctttggcgtcgctcggcgaatttgagttgcccctccggttaccgcagaacataccgtgcccagaaggtaagctccagtggactctgaaggtgaagatcaggagaaaatgagcgcaggaactggggaagtttcttttgtccccccacaatctggtgtatggtaccaaaccattgttatgcaaagtttcctttgcataacccggtcccagtttagctccgaaacattttttttctgatgtataataaaagagtaaggttgcagaaagattgaatagcttctacatccttcagttcccttctttgcagcaacattgcacattgtgatggataggggtgaaaacgggtcgagaatatccgctgggtaccggatagtgcaaatagacc

SEQ ID NO: 220522 - DNA, 619 bp, Zea Mays
atggcggactgcttttatctttatgacacatttgatattggtttcattacaactgatgaatttggtaatgcggatatcttagaagcaacctatcctgctgttgcgaagagacttcatggggactggatacaggatccagcgatacctgttgttactgggttccttgggaagggctggaaatctggtgctgtaactactttaggccgaggtggtagcgacttgactgctacaaccattggtaaagccttgggactgagagaaattcaggtatggaaagatgttgatggtgtacttacttgtgatccaaatatctacccacatgcaaagactgttccatacttaacatttgaagaggccacggaacttgcttattttggtgctcagattgtactaactagcatagtgctcaagtcaaatgtcactatgttggacattgtgagcactcggatgcttggtcagtatggttttctggcaagggtatttgctatatttgaagatctatgtatatctgtggattgtgttgctaccagtgaagttagtgtttctgtgtcacttgatccatcaaagatctggagtagggaactgatacagcagttgaagagcttgagaaaatagcaat

SEQ ID NO: 220523 - DNA, 421 bp, Zea Mays
atggcggactgcttttatctttatgacacatttgatattggtttcattacaactgatgaatttggtaatgcggatatcttagaagcaacctatcctgctgttgcgaagagacttcatggggactggatacaggatccagcgatacctgttgttactgggttccttgggaagggctggaaatctggtgctgtaactactttaggccgaggtggtagcgacttgactgctacaaccattggtaaagccttgggactgagagaaattcaggtatggaaagatgttgatggtgtacttacttgtgatccaaatatctacccacatgcaaagactgttccatacttaacatttgaagaggccacggaacttgcttattttggtgctcaggacttgaaccgtgtatagtgtgagcaggctgcttctc

SEQ ID NO: 220524 - DNA, 1284 bp, Zea Mays
cagtcctccaaccccaatcctctcctttccatccacgccgctgcgcttccgatgcaaccctaaccacctcatcgccggcacgatcttccccgcccccactccccggctattgcctctgattggcggctctccgggattcacgttggtccggggtacggctcctgcgattttcacgcaatggagcaagatcagagcgtggttgtcggcagcgcggactctggtgctgcggcttttggttttgcgactggcaacccccctagcttggctgtgaccggcggaagcgccgtggcccccgacggtggagctcaggcagctgatgcctctgcgtaccaggccgagcacacggcgttgaatgggactgtcggcgatatgggtaattacccatctacaggagctgcagagaacggcgaagccgtccccaacgagacgggcgagccggttcctgagctatcgtacgaagaagccgtgctttcagcagaagaggctaggttatggagtgttgttaccgcgaattccttagattttaatgcctggaccgcacttattgaggaaacagagaaaaatgctgagaacaatattttgaagatacggaaagtgtatgattcgtttcttgcggaattccctctttgctttgggtattggaagaaatatgctgaccatgaagcgagacttgatggtgtgagtaaagttatagaggtgtatgaacgagcagttctcgcagttacttattcagtggacatttggtataactattgtcagtttgcaatttcaacatatgatgattcagatatcatacgaagactgtttgaacgtggcttggcatatgttggaacagattatcattccaatattttgtgggatgagtatattaagtatgaagagtcactggaggcttggagtcatctagctgatatatatacaagagtattggagcatcccatccagcagcttgatcggtattttaattgcctcaaggaattggcttcgaagcacagtttatcagaaatacttactgcagaagaagcctcgttgtatgttgtcacatctgagaccactgctcaagcgcctgatggtgaggcacatcctgatgatgttgataagcttggtcaaccagaaatttcgtcttcaacagacgcagaaagccttgcaaagtatgtctccatgagggaagagatgtacaggaaggctaaagaagcttgaaaattggcataactaccttgactacatcgagaaggaagaagacattaataagtggtcgttctgggttcatgtatatgataccaa

SEQ ID NO: 220525 - DNA, 2144 bp, Zea Mays
atatatccacatagcgcacacctgcttgtgaaaagttcaatcttgagtgtcgcttgtttcaaatcccacctttgcttgctccccccggctcctcctcctcgtaccaaatctagggttcccgatcgaaatcctgcgccgccgccgccgccactgccgttggcgataatgtcggccagcaccgagcccgagaaggacgccgctgccgctgccgccaccgagggcgacgagaagacggaggcgaaggacagcggctccggctgggagctgctgtactgcggcgggacgagcttcgacgccatgggtcggaaggtggtgggcggggcgcagggcaacctggtgtcgccgactcggctgcggccgctcgtgggcgttgatatccgcttcgttgcctctggatgcactgcttgccactgtgttgctttagatgctggaggcaaatgttatacatggggtcgcaacgagaagggacagctagggcatggagatactcttctgcgtaacctgccgactgttgtttctcaactatcaaaatacaaaatcatcaaagcatgtgttggaagaaaccatacagtggttgtaactgatgatggcaaatccttatctttcggtcataacaagcatggacagttagggacgggttccttaaggaatgagattgagtcatcgccagtgtcctgtatcgttgcggaagcaaccaacgttgcatgtggggctgattttactgcctggttgtcatctgtggaaggctcttctatacttacagcaggtcttccccaatatggtcaactcgggcatggaactgataatgagtacaatgctaaagaatcgtctgtgaaactgacctatgaaccccagccccgtccaagagcaatagctgcattttctgggaaaactgttgtcaaagttgcatgcggaactaaccatacagttgcagttgattccaatggctttgtttacacctggggcttcggtggatatggaaggttggggcatagagaacagaaggatgaatggcaacctcgccttgtagaagtcttccagaagcacaatgttctgcctcctaatgccattgtctcagctggttctgtgagttctgcatgcactgctggtggtggacagttgtacatgtggggaaagatgaagaatacaggcgatgattggatgtacccgaaacctgtgatggatttaagtggttggaacattcgctgcatggcttctggtaacatgcaccacattgttggtgctgatgattcttgcataagctggggtgtcgcccagaatggagagcttggttatgggcctaacgggcagaaatcatcagcaaatcccaaaaaggtggacattcttgagggcatgcatgttacaagtgtcggctgtggatttggactgtctctgattgttgtggacagagcaaatgttggtgatcgacttgctggaaatttatgatggtgacaccggtgctgaagtagagaaagtggaggtgcaagtaaccaagaaggcatctgccagcaccaactcacgtgccaacaagcgcaagaaaacgaaggatgtttctgaatctgaatccgaagaggatgatgatgatgatgaggatgaaagcggagacgatgaaaatggtggtgtagaagagtcaaagggcaggcgtggccgtaaacccgctaatagagggagaggcaggggaggcaaaaaggcgacccctgaggcaaagccatctggaaggggcagaggccgccccaagaaaaccgagagttctgctcagaaagccggaggaacctcgggcagaggaaaaagaggacggccacgcaagtgatggtccgccctacagtaatgcggcgttgaaaatcagtaacgcctgatgtgatcccattgacattgaggattcattttggtagcaatgcccgttgcactctgcccattttctcactctgattgttgcagctatccaatccaaagacattattagtctcttccccctcccccaatttccgaaatggggtttgccatcccattgtaagtctagaaatgcttaacatgcacatctgtgttcttcattgacgatgattttcttcagctttaggctattaatgaacccttgattcgagtgatttatttatcctgttcaatcacatggtccttgatgggta

SEQ ID NO: 220526 - DNA, 2040 bp, Zea Mays
atatatccacatagcgcacacctgcttgtgaaaagttcaatcttgagtgtcgcttgtttcaaatcccacctttgcttgctccccccggctcctcctcctcgtaccaaatctagggttcccgatcgaaatcctgcgccgccgccgccgccactgccgttggcgataatgtcggccagcaccgagcccgagaaggacgccgctgccgctgccgccaccgagggcgacgagaagacggaggcgaaggacagcggctccggctgggagctgctgtactgcggcgggacgagcttcgacgccatgggtcggaaggtggtgggcggggcgcagggcaacctggtgtcgccgactcggctgcggccgctcgtgggcgttgatatccgcttcgttgcctctggatgcactgcttgccactgtgttgctttagatgctggaggcaaatgttatacatggggtcgcaacgagaagggacagctagggcatggagatactcttctgcgtaacctgccgactgttgtttctcaactatcaaaatacaaaatcatcaaagcatgtgttggaagaaaccatacagtggttgtaactgatgatggcaaatccttatctttcggtcataacaagcatggacagttagggacgggttccttaaggaatgagattgagtcatcgccagtgtcctgtatcgttgcggaagcaaccaacgttgcatgtggggctgattttactgcctggttgtcatctgtggaaggctcttctatacttacagcaggtcttccccaatatggtcaactcgggcatggaactgataatgagtacaatgctaaagaatcgtctgtgaaactgacctatgaaccccagccccgtccaagagcaatagctgcattttctgggaaaactgttgtcaaagttgcatgcggaactaaccatacagttgcagttgattccaatggctttgtttacacctggggcttcggtggatatggaaggttggggcatagagaacagaaggatgaatggcaacctcgccttgtagaagtcttccagaagcacaatgttctgcctcctaatgccattgtctcagctggttctgtgagttctgcatgcactgctggtggtggacagttgtacatgtggggaaagatgaagaatacaggcgatgattggatgtacccgaaacctgtgatggatttaagtggttggaacattcgctgcatggcttctggtaacatgcaccacattgttggtgctgatgattcttgcataagctggggtgtcgcccagaatggagagcttggttatgggcctaacgggcagaaatcatcagcaaatcccaaaaaggtggacattcttgagggcatgcatgttacaagtgtcggctgtggatttggactgtctctgattgttgtggacagagcaaatgttggtgatcgacttggtcagctggaaatttatgatggtgacaccggtgctgaagtagagaaagtggaggtgcaagtaaccaagaaggcatctgccagcaccaactcacgtgccaacaagcgcaagaaaacgaaggatgtttctgaatctgaatccgaagaggatgatgatgatgatgaggatgaaagcggagacgatgaaaatggtggtgtagaagagtcaaagggcaggcgtggccgtaaacccgctaatagagggagaggcaggggaggcaaaaaggcgacccctgaggcaaagccatctggaaggggcagaggccgccccaagaaaaccgagagttctgctcagaaagccggaggaacctcgggcagaggaaaaagaggacggccacgcaagtgatggtccgccctacagtaatgcggcgttgaaaatcagtaacgcctgatgtgatcccattgacattgaggattcattttggtagcaatgcccgttgcactctgcccattttctcactctgattgttgcagctatccaatccaaagacattattagtctcttccccctcccccaatttccgaaatggggtttgccatcccattacactgatatcccagtactcccaag

SEQ ID NO: 220527 - DNA, 1406 bp, Zea Mays
gtgttgcgttccctacttgctcttttcttcctccgcttcaacctgtccccagcgccccccgcgcacacactgtctttctctgcctttctttccctagcgccgcgccggcgccgccattcgatcaggccgcttcgccggcgacagcatattccaggtcggttggttttggcacttcggaccggcggccatggcttccgacggcatcggccccagagatgtatgtgttgttggggttgcacgcaccccaatgggcggtttccttggtgccttgtctcccttgcctgctacgaaacttggctctatagtaattcaagctgctctgggtgccgggataccaaactctgttgtttgcaccactgttaacaaagtctgtgcatctggcatgaaagctactatgtttgcagcacagtcaattcaattgggtatcaatgatattgttgtggctggtggcatggaaagcatgtccaatgccccaaagtacattgctgaagctaggaaggggtctcgttttggtcatgacacacttgttgatgccatgcttaaggatgggctttgggatgtatacaatgattgtgccatgggaatgtgtgccgagctttgtgctgacaaccatgccctcacaagagaagaccaggatgcatttgctatccaaagcaacgagcgtggaattgctgctcgtgacagtggtgcttttgcatgggagattattccggttcaagttcctgttggtagaggaaaacccccaacattaattgagagagatgaaagcctggataagtttgacccagtaaaactaaagaaacttcgcccaagtttcaaggagaatggtggtacagttacagctggaaatgcttctagtataagtgatggagctgctgcattagttttagtgagtgggcagaaggctcaagagcttggccttcaagtccttgcaaggatcaaaggttatgctgatgcagctcaagctccggagctttttacaaccactccagcacttgcaataccaaaggctatcgcaaatgctggattagagtcatcccgtgttgatttctatgagattaatgaagccttttcggctgttgcgcttgcaaatcaaaaacttcttggaattccttcagaaaagattaatgttcatggaggagctgtatccttaggacatcctctcgggtgcagtggtgctcgcattttggttacccttattggtgttctcagggcgaagagtggcaagatcggagttgctggtgtctgcaacggtggaggcggagcatcagctcttgttctggagctcgcataagaaatctagaccttgtagttagcaaaagctccctgaggtcacatcaactatcctgccgcccgggatctggaactccgacagcccgatttcaaatagtttgaaagaacatcag

SEQ ID NO: 220528 - DNA, 2133 bp, Zea Mays
gcaggatcatactgtcttttggcgtttcttctccggctctttttcgtttgcctgtcggttacaaggtggaacgtcttcagaagcttctccactagattagtgtaaatagtagacttgttcaggtttagtttggttggaagaattagtttctggttcgtgttcatttctgctagcaataatggctgcgatgaacggaaaggtattgggtaaatgtggaaggaacatgaatagtctcaagagaaagcgggagaaccccgctgcatatgatgctgacatattccacaactctgaattgcatcagcaccctgtcaatgattctgctgttaggtttcatgttgataaagaccgcaaggcaaagatcgtgtgccacttcaacaagcaggttttgcagagctataagaacttcatgagtagcgcaccacctaaacgtattttgcttcgcataggtgctgtctggaaagacttcccagaaaagattgtcaaattggcacaagctgacttcagggcgaaaaaaacaatcacagaaacaggatatcagaaccagctatttttgctggattttgcccatatgacattcatagacacgaagacaggtcttcagaggccgattgcttggatcgatgaaaatggaaaccgctacttcccagaatcatttgtgcaagatcagaaaatatttatgaagaaagattttggcaacggatatcatgattacattagtgttgagtcaaatgggacacgagaaatgaatgaccagcttggaacatcagaaagttccgcagaaagttcaaacttcggttcaagtactgaagatgtttccagtcctaagagagctagagctgaaaataattccatcataaaaaaatactgtgatatgggagaagctattggagaaaatgagccatgcactttgttgcctacagcctgtaacctactaccacgccaagctaatctgggtgaggtatcacgtgcccagcgcactattgaagccgtggagaagctgttgttgcaggggatgggttcagttattgaatccaaggacattattggaatctacaggactccattattggatgaccatggacaagtccgttaccataatcacgaaaagcatgtacaggttaccagatgtcatcgtggaaacgcaaatgtccgttatgcatggcttccttgctccaaaagcactgtgcatgaaatgatgctgaatagttctttacaagttcataagccgcccattaagtgtgcagcctatggagagggcacattccttacaccagcaaatcgttctgatgcctgattacttcgtatcgcaagaagactgccagaattcatctgatctgtcactggtgttgaattctagttcacccgactgtatttcagaggagatgaacctggaggcacctccagcattgggaggtggatgtgcagcccccatgctaggagattcgatggcaaaggctccaagctcaccttggatgcctttctctatgttgtttgcagcgatctcaaccaaagtgtctcctcaaattatggacatggttattggttgctatgaagagtttaagagtaagaaaataagccgatgcgaactaataaaggagctgaggcacgtagttggtgatagagtgctaatatcgacgataatgcgtctccaagataagttgcctcctgtggagaggcgtgagggaccgggtgcatcagctgccaagatggtggcgaaaccgtgaggcgggtgtcggtcggtcggtgggcgaggaatgcagaagggaggaagcagctgactttgacaaccctgtgggaagcagcaactatgaagcctcttgtgtcagtctttgtatggcggctgatgtttcttctttctgtgtcgtatgagtatgttttttcctagtagattgtatcaggagtttttcatttcaaattgagctgcgcatgttcttttgagcctttggaatagttcgtcaacgaaaaaggctccttttacctttctgataacagtgttgtgcattgttaattaatgtgggtcatatagaataatatatgatgtatacaatgtttttgagtttggctctcgctgccagtcgtgtgtttattctgcacccgtggtaccccactaaacgttagtcgagttcattttat

SEQ ID NO: 220529 - DNA, 2634 bp, Zea Mays
tcttactgatttctgacaattttcccttagcaggatcatactgtcttttggcgtttcttctccggctctttttcgtttgcctgtcggttacaaggtggaacgtcttcagaagcttctccactagattagtgtaaatagtagacttgttcaggtttagtttggttggaagaattagtttctggttcgtgttcatttctgctagcaataatggctgcgatgaacggaaaggtattgggtaaatgtggaaggaacatgaatagtctcaagagaaagcgggagaaccccgctgcatatgatgctgacatattccacaactctgaattgcatcagcaccctgtcaatgattctgctgttaggtttcatgttgataaagaccgcaaggcaaagatcgtgtgccacttcaacaagcaggttttgcagagctataagaacttcatgagtagcgcaccacctaaacgtattttgcttcgcataggtgctgtctggaaagacttcccagaaaagattgtcaaattggcacaagctgacttcagggcgaaaaaaacaatcacagaaacaggatatcagaaccagctatttttgctggattttgcccatatgacattcatagacacgaagacaggtcttcagaggccgattgcttggatcgatgaaaatggaaaccgctacttcccagaatcatttgtgcaagatcagaaaatatttatgaagaaagattttggcaacggatatcatgattacattagtgttgagtcaaatgggacacgagaaatgaatgaccagcttggaacatcagaaagttccgcagaaagttcaaacttcggttcaagtactgaagatgtttccagtcctaagagagctagagctgaaaataattccatcataaaaaaatactgtgatatgggagaagctattggagaaaatgagccatgcactttgttgcctacagcctgtaacctactaccacgccaagctaatctgggtgaggtatcacgtgcccagcgcactattgaagccgtggagaagctgttgttgcaggggatgggttcagttattgaatccaaggacattattggaatctacaggactccattattggatgaccatggacaagtccgttaccataatcacgaaaagcatgtacaggttaccagatgtcatcgtggaaacgcaaatgtccgttatgcatggcttccttgctccaaaagcactgtgcatgaaatgatgctgaatagttctttacaagttcataagccgcccattaagtgtgcagcctatggagagggcacattccttacaccagcaaatcgttctgatgcctgtgtgaaattctctgctgttgatgaaaatggcattgtccatatgatgttgtgccgtgttataatggggaacgtagaaatagttcaccctggatctaagcagcaccaacctagtagtgactattttgatagtggagtagatgaccttaaaaacccacaacattacattgtgtgggatatgaatctgaataggcacatctatcctgagtttgtagtcaccgtcaaattgccttctaaaacaaaagattacttcgtatcgcaagaagactgccagaattcatctgatctgtcactggtgttgaattctagttcacccgactgtatttcagagacgagttccactgttggagcagcaagagtgcagtaattcagattgtgtgatttgacacaatacttgacttgtgtttgcgttattgagattataacttggagctgattatattcgctatctatgatagaaacctccaaatatgataagtttccttgtgaaaccatgctgttttagtcatgttggagttggttaaagaaccagttaacaacttccttttatgcataaaacaggagatgaacctggaggcacctccagcattgggaggtggatgtgcagcccccatgctaggagattcgatggcaaaggctccaagctcaccttggatgcctttctctatgttgtttgcagcgatctcaaccaaagtgtctcctcaaattatggacatggttattggttgctatgaagagtttaagagtaagaaaataagccgatgcgaactaataaaggagctgaggcacgtagttggtgatagagtgctaatatcgacgataatgcgtctccaagataagttgcctcctgtggagaggcgtgagggaccgggtgcatcagctgccaagatggtggcgaaaccgtgaggcgggtgtcggtcggtcggtgggcgaggaatgcagaagggaggaagcagctgactttgacaaccctgtgggaagcagcaactatgaagcctcttgtgtcagtctttgtatggcggctgatgtttcttctttctgtgtcgtatgagtatgttttttcctagtagattgtatcaggagtttttcatttcaaattgagctgcgcatgttcttttgagcctttggaatagttcgtcaacgaaaaaggctccttttacctttctgataacagtgttgtgcattgttaattaatgtgggtcatatagaataatatatgatgtatacaatgtttttgagtttggctctcgctgccagtcgtgtgtttattctgcacccgtggtaccccactaaacgttagtcgagttcattttat

SEQ ID NO: 220530 - DNA, 2172 bp, Zea Mays
cgccccccgagccgagcgttcccctcgttgccgcgggccggccggagctgccccgccgcctcgcccccaaacacccgtcccagtggtcgctccgcacgcctcgacgtctcgctgtctttgccagggcttcggcgtccgttgtggtgtcgccgcacggcgagggaggtggtggcacggcggcggggcggaagagcacggggtataggaaccggttcctggacctggcgcggctgggggccgtggcggagggcgcggcggaggccttcttccgcagcgagatccggcggcggctggccgtcactgccgcgctcatcgtgctcagccgcgtgggatgaccttggcgatttctcctcagaattgaagctttcttttttccagctggggatcagtcatcaaatttcagcatctattgtcatgcaggttctctgtcatgttcttccatcacttgaaaagctccgcaaggaaggattagatggccatgagaagttaaaaggctatatgtgtgtctagttgtctatctatcttgaaccatggtggctttctttgtggtttgcaactgtggctgcttttactgtgtcatgcttttccctgcagtattcagtatatgctgcaagttacagggtcaagcatgtaattataacaagtcttctgcttgttcttggtgcaatgtcaatgacatggatttgtgacaccattacagaatttggatttggacatggctcatctttgattatctgtgtgggaattttgactggctacacagatacactacacaagatgataactcagttttcagggaatttttcctattgttggccttacatcttgggagtagctggaatttttatgatactcaccatgggggctgtgttggtgactgaaggatgcaggaagataaagcttcagtactatggattcaaattagcatctggtgcagggaatgaaagcagcccagttacagaggttgagccatatatccccttcaacatcaatccaactggaatgcagcccttgcttacaacctcatacttactagcttttccaagtatcatggccagtatttttgcctcacccttttgggaaaacttgagggaaattttgaatccaaagacttcaactggtggtagtccctgggtttattacttgacatatgctttccttgtcttcatcttcaatatttttgatattgctaacttacccaaagagatatctgattacctgaataagatgtgtgcgagggtaccaaggataaagcctggaagagcaacagtagactatcttacaaagatacaaacatcaacacgtttctggggaggtctactgctaagcttgcttgcaacttcctctttattgcttgaccgatatctcaggcaaataaatgaagggttgtcaataggattcacatcagtcttgattattgtgggctcaattattgagcttagaagatcatatcaagcgtacaatgtgatgccagcactgagcaaagttttgaggagatatggtgcttaagagtatgtaagctgatacgttggtgatgatggcaccatccactagctcgtggtgttgcaaggtcgattggtctttagaaacagcatggatatgatgagaagtttaccgctcaagcttctgttagattaaaaggtggaaggaacatggctttacaatcacatcggactttatcgacaaggtgaactgaggaagcaacaaacatgcccaacaacatggctgtgtgtatttgttggaagtgatctaaaatcttccatgtcctaatcgccatactggatcacatagctaatctgttgggttctataaattctccaccgttcaaatgctccgaaaggaagggcctttggataagtttctctttttttccctttttttgtttgggtgtgcacacattgttggacgggctgtagttgaatgagtagagtgtacgcctcgggctgaagatgagtcggattcaacgacgaacatttttgttgtgcccgcgaatggccaatatttcgctttcatgtacaactctgatcggatggagattgcttttttttatgcgggtagttagtcaatggtgtacggcttaacagtcgcggaagcacattcacgtcgtcttcgtttaggtcacattgcagatcgaacatcgtataccaacctggctatagttcataatgggag

SEQ ID NO: 220531 - DNA, 2324 bp, Zea Mays
cgccccccgagccgagcgttcccctcgttgccgcgggccggccggaggtaggattccttcaaattcccgctgcgtgcgacggcacgccggcggtcgccgctatgtccccctctctcgtgctggtgcactcactcccgctcccttctcgccgcgcgctccccatccagctgccccgccgcctcgcccccaaacacccgtcccagtggtcgctccgcacgcctcgacgtctcgctgtctttgccagggcttcggcgtccgttgtggtgtcgccgcacggcgagggaggtggtggcacggcggcggggcggaagagcacggggtataggaaccggttcctggacctggcgcggctgggggccgtggcggagggcgcggcggaggccttcttccgcagcgagatccggcggcggctggccgtcactgccgcgctcatcgtgctcagccgcgtggggtacttcatcccgctccccgggttcgaccgccgcctcatcccagactcttacctcagcttctccgcgctccctgcagatgaccttggcgatttctcctcagaattgaagctttcttttttccagctggggatcagtcatcaaatttcagcatctattgtcatgcaggttctctgtcatgttcttccatcacttgaaaagctccgcaaggaaggattagatggccatgagaaatggtggctttctttgtggtttgcaactgtggctgcttttactgtgtcatgcttttccctgcagtattcagtatatgctgcaagttacagggtcaagcatgtaattataacaagtcttctgcttgttcttggtgcaatgtcaatgacatggatttgtgacaccattacagaatttggatttggacatggctcatctttgattatctgtgtgggaattttgactggctacacagatacactacacaagatgataactcagttttcagggaatttttcctattgttggccttacatcttgggagtagctggaatttttatgatactcaccatgggggctgtgttggtgactgaaggatgcaggaagataaagcttcagtactatggattcaaattagcatctggtgcagggaatgaaagcagcccagttacagaggttgagccatatatccccttcaacatcaatccaactggaatgcagcccttgcttacaacctcatacttactagcttttccaagtatcatggccagtatttttgcctcacccttttgggaaaacttgagggaaattttgaatccaaagacttcaactggtggtagtccctgggtttattacttgacatatgctttccttgtcttcatcttcaatatttttgatattgctaacttacccaaagagatatctgattacctgaataagatgtgtgcgagggtaccaaggataaagcctggaagagcaacagtagactatcttacaaagatacaaacatcaacacgtttctggggaggtctactgctaagcttgcttgcaacttcctctttattgcttgaccgatatctcaggcaaataaatgaagggttgtcaataggattcacatcagtcttgattattgtgggctcaattattgagcttagaagatcatatcaagcgtacaatgtgatgccagcactgagcaaagttttgaggagatatggtgcttaagagtatgtaagctgatacgttggtgatgatggcaccatccactagctcgtggtgttgcaaggtcgattggtctttagaaacagcatggatatgatgagaagtttaccgctcaagcttctgttagattaaaaggtggaaggaacatggctttacaatcacatcggactttatcgacaaggtgaactgaggaagcaacaaacatgcccaacaacatggctgtgtgtatttgttggaagtgatctaaaatcttccatgtcctaatcgccatactggatcacatagctaatctgttgggttctataaattctccaccgttcaaatgctccgaaaggaagggcctttggataagtttctctttttttccctttttttgtttgggtgtgcacacattgttggacgggctgtagttgaatgagtagagtgtacgcctcgggctgaagatgagtcggattcaacgacgaacatttttgttgtgcccgcgaatggccaatatttcgctttcatgtacaactctgatcggatggagattgcttttttttatgcgggtagttagtcaatggtgtacggcttaacagtcgcggaagcacattcacgtcgtcttcgtttaggtcacattgcagatcgaacatcgtataccaacctggctatagttcataatgggag

SEQ ID NO: 220532 - DNA, 662 bp, Zea Mays
ataatataactactactactttaatgatgggatatcaagaggagggaagaggcactgaagaatggtgcagatccacatttgtttttgcataattgctgccttagctccaccaattgtatttcatgggaaatcattaacgagaacacatggttatggtgttccacagactggcattttattcattcattgaaaggcttacctcgcttatggtgttccacagagtgacatgaaactattttcacttatgcaaaagatttgtgcattaagaatattttttatcagagttcactcgaggaatgcaagaattaggataggtagattagatcttttttattggtgtatcctgagtttcctctaataagaatcatgtgtcaccacctgagtcaattttactaaacatttttttgctaccagccttaaatacatactacaaatgctgatttaccctaaaattctacacatttactttgttttggttcacgttttacactaaaatccgtacgagccagaaacaaggcacaatcggatatgcgcgatttttatgctataattttggacatcattcgctcttatgaaacatatcaatgatttacgacaaaatttgtatatatttatgatgttttggttcacgttacgctaaaatccgctcgagtcataacctg

SEQ ID NO: 220533 - DNA, 709 bp, Zea Mays
cagttctagaatttatcactccactgactgcagcagtgcgatggaatcacagtgtaacatttccagtacccttaaaggactggatcctcaacctggatcaaagaggaaatgcccacacctcaaatccaatgaagaggatgtagagctttcggatagctttacgcgctctgtccatcttacaccaataaagcgactcaaggaaagccatgacgccagatatggagcgggggaatccgccaaaactacccatttctctaatagttcctctggtggttaccacgaggatatgaatttacacaactcaagaggttgccttcagaactccccctgtaatgttgaggatgccctgtccaaagggtttgagggttgtatttcgatgaaatgtccattttgatgtaacaaatttcgtgtcagcccagaagctatacattcccttttagcggcaaaatcatcctgtgtgtgtatctagtcattttgtgcaaaaaaaatgcagtaattgaatgcattttttttaaaatgctttaaagtgtattgatcagcatcggacctgtttttagaggcatcggtatgaagggagggctgttggttgtgtttgcttgacagcaaatccctcccattcaataccccgcactttctgaaaattgcgacttccatattcccttcctttgagctttgttaagacagtattgtattacaagatctgaatcgc

SEQ ID NO: 220534 - DNA, 1466 bp, Zea Mays
ctccctctcgtctccctctcaacttcttgccttctcgcgctcgcctccgtttcgtgtcggctcgctctaaacgtgagatcggggaggtggtggacttggggtcgttgtggtatcggcggcgagccgcgggggcctagggtttcctgccttcctggtttggatccgcgccctggcccatgggatccggaggcttcgcggccgcggtggccgcgtgcccctccgccgccgaggccttccttaagtactatggtattgtatcaggaggtacaagtgcggagtcaagacaagcattggttgagctttcactagctatagacggaattgaaggaatgagggatgtgatatttgctgatattccaaagctcattccatttattgatctggaggatatgagcctattcagttgcttctacgattttgttttcttcatctgccgtgaaaagggtcaaaagagtgtcactattcagagagctgtagcagcatggaggattgttctaagtggaaggttccgtttgcttgatcgatggtgtaacttcgttgagtaccaacgccataacatatccgaggatacttggcagcagctgctagctttcagcaggtgtgtaaatgaagatctggaaggttatgacccacgaggtgcttggcctgttctgattgatgattttgttgagcaaatgcacagggttttcaactctagcctaccctaacttctttgggactaaaaggctttgttgttgttaaagctctgcatattgtccaaggctctaatttatcactccactgactgcagcagtgcgatggaatcacagtgtaacatttccagtacccttaaaggactggatcctcaacctggatcaaagaggaaatgcccacacctcaaatccaatgaagaggatgtagagctttcggatagctttacgcgctctgtccatcttacaccaataaagcgactcaaggaaagccatgacgccagatatggagcgggggaatccgccaaaactacccatttctctaatagttcctctggtggttaccacgaggatatgaatttacacaactcaagaggttgccttcagaactccccctgtaatgttgaggatgccctgtccaaagggtttgagggttgtatttcgatgaaatgtccattttgatgtaacaaatttcgtgtcagcccagaagctatacattcccttttagcggcaaaatcatcctgtgtgtgtatctagtcattttgtgcaaaaaaaatgcagtaattgaatgcattttttttaaaatgctttaaagtgtattgatcagcatcggacctgtttttagaggcatcggtatgaagggagggctgttggttgtgtttgcttgacagcaaatccctcccattcaataccccgcactttctgaaaattgcgacttccatattcccttcctttgagctttgttaagacagtattgtattacaagatctgaatcgc

SEQ ID NO: 220535 - DNA, 682 bp, Zea Mays
cttcttgccttctcgcgctcgcctccgtttcgtgtcggctcgctctaaacgtgagatcggggaggtggtggacttggggtcgttgtggtatcggcggcgagccgcgggggcctagggtttcctgccttcctggtttggatccgcgccctggcccatgggatccggaggcttcgcggccgcggtggccgcgtgcccctccgccgccgaggccttccttaagtactatggtattgtatcaggaggtacaagtgcggagtcaagacaagcattggttgagctttcactagctatagacggaattgaaggaatgagggatgtgatatttgctgatattccaaagctcattccatttattgatctggaggatatgagcctattcagttgcttctacgattttgttttcttcatctgccgtgaaaagggtcaaaagagtgtcactattcagagagctgtagcagcatggaggattgttctaagtggaaggttccgtttgcttgatcgatggtgtaacttcgttgagtaccaacgccataacatatccgaggatacttggcagcagctgctagctttcagcaggtgtgtaaatgaagatctggaaggttatgacccacgaggtgcttggcctgttctgattgatgattttgttgagcaaatgcacaggccaagggtagcaccaattgaa

SEQ ID NO: 220536 - DNA, 1067 bp, Zea Mays
aaccgaggccacaggccaccaccattccttccttgttccttccccagctccgcaggctgctcatcgccctccctccgcgcccccgatccagatccagatccaggggcttgtcatggcatccaaacgtatcctcaaggaattaaaggacttgcaaaaggaccctccaacatcatgcagtgcaggtcctgctggtgaggatatgttccactggcaggcaaccatcatgggtcctcctgatagtccatatgctggaggtgttttcttggtgaacattcatttcccgccagactaccccttcaagcctccaaaggtatcttttaagacgaaggtcttccatccaaacatcaatagtaatggaagcatatgtcttgacattcttaaggagcagtggagccctgctttgacaatctctaaggttttgctttctatctgctccctgcttactgatcccaacccagacgaccctcttgtccctgagattgctcacatgtacaagacggatcggcctaagtacgaggcgacagcccgcagctggacccagaagtacgccatgggatgaaatgttcggcgttactggctaaatgcagacgattgtggtgttgcccatgaaactgttatcggggacgcgctaccgaccgatcagatggtcggtgcggcgaaccgatacgcgctcggaccgtggaaccgatatcgcctcgcgttgtactcggtctaaaaagaggaggtttttgttcctgaatttacaagtgtcgacatcatcaaagcgaggctgctgccttcccttcccggtaccaatggcctttcactctcatcgcacctcctctggtatctcactgcacctcgtcaactgcatcggctgtcggctggaggctggaaggtgtttcgtaaagcaagggatacttggattttgtctttcttcaagtcttcaatagcaagctcatgcgacaggtacgaggcaccgtcggtggtgaggtgacaggtgagaggtcaaggtttccagaacaaactagtacttactagttccttgtgtaagtaaacactgacgatggcgacccattggcaaacag

SEQ ID NO: 220537 - DNA, 1916 bp, Zea Mays
tagtaagtagtaacagtacactattatatactgaaatctttatccagttcaggcatggtcggaatgttcaaacggcagagagcaaaatcgaccatgaccaccgcgcgcacatggctgcaacatcacagcacatggttacaccaccacttccaagtcccaaccacacaacacatcacaattcatgttgcagtcccacactgcccgacttctacagtactactacagctgtgtcgctctatgtttttataggctgtggatcgtcaaaaatccacgcagaaacgcctgacccacatggtttctccatgacttccagcaaaaaaaagggggggcagacccacatgcttttcacaaggtccgcaagtcggctgcaccatgcttcttggaggattcagaactctcatcacttttatctcttccggactatgagagctttgttagagaaagattggtcaagaacataaatagaaaagggaatattgatgacacttcatccttctctactattgttgaacagttgagcaaccaaactgaatacctttctagttttttaaaagatttgtcaacctacatgaatagcaatattattgtggtgcttcgttctctgcaactagtgagcaacacctttgcccatactctagaagagcatgacatgttgaaggttgaattggggaacaaggatgctcataacagagctcaagaatctgaagtgctttctctacaaaaagatctgagagcaatgtcatcaaaatgtatttattgcgtccaacaaattgaaattgtttttgacgatatggttgatcttggatatgcaatagacttggctacaggcagctcaagcatagggtctgaactagaggtaactgtgtctgatctgaagaatgaggataccagtgattatagtaaggtggctgatactttgcttgctacaattgacacacttaagtccaagtctgaaaaattatctaccattaaggggcttgtgataacttcattggatgacttcaaaatgaagctgaaacaagctgaagcagctgctgaaactgcttcacatgagcatcagttgtctgttgaaagggtatgcatgctggagaaagaactcaaaatattacaggatgagtgcaacaaaatggaactaaatattcaagagtataaggaaagggagggtgcattgaaggcaagggagttagagttgctatcagttgagcacactcaaatttcagcagacagaggtttaactgacaatgcaatttcaaaagatcaaacggaagctcttgttgagaagataagtaagttaaatatgctgtcaggcgagtcaaatgtgcagagggaagaggctacaagtccgcttgacaaactttttgttgtcattgatgaattcagtgcacttcaacacgaggttgagaccttaagatatgaaaatgaagatttacagttaaatattgaatcctatacccgtgaaattgaacagctaagagaggtctccagaaatagtgatctaactaatagggagttggaatccaaaggaagtgagcttcttgaggtagctgttagtatggagcgaatgattcagcggttaggatatcttggaggaaaagatgtactagaagataacaaacctgctagcacacaagctctcttatcgaagctggaaaagctaataatagcttcaagtactgaatctgggaattctaaatccataatacaggagctgggagcaaagctgcagtcaagggaaaaggcagttgatgagctatcaacaaaagtaaagatgctcgaggatttgtgccatgcacaactttctcagccagaacctagtaaagacagatcatttgaagcatcttcctcaacaattgggtcagatatgtctgatattgaagatgcggatgttagaactagggttactgaggtaatacgag

SEQ ID NO: 220538 - DNA, 1570 bp, Zea Mays
tttcactgcgttttttccctggcgcggcccagatcaagatcttaacgaccctcacggcccagcgccaggccgccagcatccgacgcatctaaccccttccgatgcgtgtcccgatccaacggtctccgtcgtcccgtccgcgtgataaagcgccggcgcctcttctcgcgtggcctcccgaaggttctaggctcgattgaacaaattggagcggcactacactcctccacgcctccacctccagcctcccactgatctggcctctctcgaggtgagcgcgcctgaatctatggattcgatgtgaagtcccaaagggtagcttttagggagggggaatgatgagatgttggaagttcacaagttgtgtctttcttaaaggctggtaaccttaatcctagatcaatatgagaaggggctacagttacagtccttcaccaccaaggggctacaggagaagggcgcgcagtccaagtcctcatgatcattatggtggtcgtggtagggatctcccaaccagtcttctggtcaggaatctccgtcgggactgcaggccagaagacctccgtcgcccatttggacagtttggtcgagttaaagatatatatcttccaagagattattacactggggatccccgagggtttgggtttgtccagtattatgatcctgctgatgctgctgatgcgaagtactatatggatgggcaggtagttcttggtaggcaaataacagttgtttttgcagaagagaacagaaagaagcctcaagagatgagagctagggacagagtcaggggtcattcttatgatgacaggaggtattctcgctctaggtcgcctcgttattataggggccgctctccttcacgcagccaaagctactcgaggtctccacctcagaatccaagacacagacttagagagaggtcctactccggctcacctgtggacagcagatcaagaagtgggagcccttatgaggatggatatcgcaaatcatcacggagagagaggtctctttctgtcagcggatgaagcagttttacggtctagagctattgctgtgaatctgcgcatggtggcctacttgctatgtctttctgaaccatatatgttctgtctagattatcattcccagtaccagagaagtatcgtgagactgtttgctgtactttctagtcttgaggatacagaagggggtcaccgattctctcagtagatggactattgaccactagctacgccagttccactgctttgtgtatttacaggcagctttgcggtttgaataaaattgtttgcatcgtgaaagctaattggtaaaaagactgaatcatgaaacgaacgttttgcatccctgttccctgatggcatttggatacgattttttgttctttcgacgaacaatttggcaaatctgcatcttattgagctgatgagaagtgcaggttggctaaatctttgaaggtcttgttcggttctatggggttctatgcgataggagattgaggggattaaatatctttctattcaattttgaattgaaagtaatttaatcacaccaacatttt

SEQ ID NO: 220539 - DNA, 1722 bp, Zea Mays
gtcccgtccgcgtgataaagcgccggcgcctcttctcgcgtggcctcccgaaggttctaggctcgattgaacaaattggagcggcactacactcctccacgcctccacctccagcctcccactgatctggcctctctcgaggtgagcgcgcctgtaagtgatcctttctcgcagattatttttgtagttttcgatggaggcggattagctttgaactggtggatcgtgttgggcatcgtatcgtgattggttctgttctgtgaatttcgctagtttttttttctcccacagattactctgaatatgcgtgcccttaattgtgttactgttacgatttggcttcgtcgcggtagtctgttgtgatgcgcccattatttcgcgattaattgtatgaatctatggattcgatgtgaagtcccaaagggtagcttttagggagggggaatgatgagatgttggaagttcacaagttgtgtctttcttaaaggctggtaaccgtatgtgtagactgccccttgtcttttgtaatgtccttttcagttaatcctagatcaatatgagaaggggctacagttacagtccttcaccaccaaggggctacaggagaagggcgcgcagtccaagtcctcatgatcattatggtggtcgtggtagggatctcccaaccagtcttctggtcaggaatctccgtcgggactgcaggccagaagacctccgtcgcccatttggacagtttggtcgagttaaagatatatatcttccaagagattattacactggggatccccgagggtttgggtttgtccagtattatgatcctgctgatgctgctgatgcgaagtactatatggatgggcaggtagttcttggtaggcaaataacagttgtttttgcagaagagaacagaaagaagcctcaagagatgagagctagggacagagtcaggggtcattcttatgatgacaggaggtattctcgctctaggtcgcctcgttattataggggccgctctccttcacgcagccaaagctactcgaggtctccacctcagaatccaagacacagacttagagagaggtcctactccggctcacctgtggacagcagatcaagaagtgggagcccttatgaggatggatatcgcaaatcatcacggagagagaggtctctttctgtcagcggatgaagcagttttacggtctagagctattgctgtgaatctgcgcatggtggcctacttgctatgtctttctgaaccatatatgttctgtctagattatcattcccagtaccagagaagtatcgtgagactgtttgctgtactttctagtcttgaggatacagaagggggtcaccgattctctcagtagatggactattgaccactagctacgccagttccactgctttgtgtatttacaggcagctttgcggtttgaataaaattgtttgcatcgtgaaagctaattggtaaaaagactgaatcatgaaacgaacgttttgcatccctgttccctgatggcatttggatacgattttttgttctttcgacgaacaatttggcaaatctgcatcttattgagctgatgagaagtgcaggttggctaaatctttgaaggtcttgttcggttctatggggttctatgcgataggagattgaggggattaaatatctttctattcaattttgaattgaaagtaatttaatcacaccaacatttt

SEQ ID NO: 220540 - DNA, 1619 bp, Zea Mays
cgaaggttctaggctcgattgaacaaattggagcggcactacactcctccacgcctccacctccagcctcccactgatctggcctctctcgaggaatctatggattcgatgtgaagtcccaaagggtagcttttagggagggggaatgatgagatgttggaagttcacaagttgtgtctttcttaaaggctggtaaccttaatcctagatcaatatgagaaggggctacagttacagtccttcaccaccaaggggctacaggagaagggcgcgcagtccaagtcctcatgatcattatggtggtcgtggtagggatctcccaaccagtcttctggtcaggaatctccgtcgggactgcaggccagaagacctccgtcgcccatttggacagtttggtcgagttaaagatatatatcttccaagagattattacactggattattactcttgccccacctcttgaagtaacatgaaataattttttgaagacgcaacacaagcctaaaagattattgttgaagagaaggaagaaatagagaaattcaattaagtgatctgcaacttaaaagagtactcagtactgttcaagagatgggaagaaatagagttacaagtttaagagatactcacatcatgaagagtttcaagtctgaatttaaactctcatgagtgcaagggatccccgagggtttgggtttgtccagtattatgatcctgctgatgctgctgatgcgaagtactatatggatgggcaggtagttcttggtaggcaaataacagttgtttttgcagaagagaacagaaagaagcctcaagagatgagagctagggacagagtcaggggtcattcttatgatgacaggaggtattctcgctctaggtcgcctcgttattataggggccgctctccttcacgcagccaaagctactcgaggtctccacctcagaatccaagacacagacttagagagaggtcctactccggctcacctgtggacagcagatcaagaagtgggagcccttatgaggatggatatcgcaaatcatcacggagagagaggtctctttctgtcagcggatgaagcagttttacggtctagagctattgctgtgaatctgcgcatggtggcctacttgctatgtctttctgaaccatatatgttctgtctagattatcattcccagtaccagagaagtatcgtgagactgtttgctgtactttctagtcttgaggatacagaagggggtcaccgattctctcagtagatggactattgaccactagctacgccagttccactgctttgtgtatttacaggcagctttgcggtttgaataaaattgtttgcatcgtgaaagctaattggtaaaaagactgaatcatgaaacgaacgttttgcatccctgttccctgatggcatttggatacgattttttgttctttcgacgaacaatttggcaaatctgcatcttattgagctgatgagaagtgcaggttggctaaatctttgaaggtcttgttcggttctatggggttctatgcgataggagattgaggggattaaatatctttctattcaattttgaattgaaagtaatttaatcacaccaacatttt

SEQ ID NO: 220541 - DNA, 1284 bp, Zea Mays
cgcgcctgaatctatggattcgatgtgaagtcccaaagggtagcttttagggagggggaatgatgagatgttggaagttcacaagttgtgtctttcttaaaggctggtaaccatcaatatgagaaggggctacagttacagtccttcaccaccaaggggctacaggagaagggcgcgcagtccaagtcctcatgatcattatggtggtcgtggtagggatctcccaaccagtcttctggtcaggaatctccgtcgggactgcaggccagaagacctccgtcgcccatttggacagtttggtcgagttaaagatatatatcttccaagagattattacactggggatccccgagggtttgggtttgtccagtattatgatcctgctgatgctgctgatgcgaagtactatatggatgggcaggtagttcttggtaggcaaataacagttgtttttgcagaagagaacagaaagaagcctcaagagatgagagctagggacagagtcaggggtcattcttatgatgacaggaggtattctcgctctaggtcgcctcgttattataggggccgctctccttcacgcagccaaagctactcgaggtctccacctcagaatccaagacacagacttagagagaggtcctactccggctcacctgtggacagcagatcaagaagtgggagcccttatgaggatggatatcgcaaatcatcacggagagagaggtctctttctgtcagcggatgaagcagttttacggtctagagctattgctgtgaatctgcgcatggtggcctacttgctatgtctttctgaaccatatatgttctgtctagattatcattcccagtaccagagaagtatcgtgagactgtttgctgtactttctagtcttgaggatacagaagggggtcaccgattctctcagtagatggactattgaccactagctacgccagttccactgctttgtgtatttacaggcagctttgcggtttgaataaaattgtttgcatcgtgaaagctaattggtaaaaagactgaatcatgaaacgaacgttttgcatccctgttccctgatggcatttggatacgattttttgttctttcgacgaacaatttggcaaatctgcatcttattgagctgatgagaagtgcaggttggctaaatctttgaaggtcttgttcggttctatggggttctatgcgataggagattgaggggattaaatatctttctattcaattttgaattgaaagtaatttaatcacaccaacatttt

SEQ ID NO: 220542 - DNA, 1519 bp, Zea Mays
atcctttctcgcagattatttttgtagttttcgatggaggcggattagctttgaactggtggatcgtgttgggcatcgtatcgtgattggttctgttctgtgaatttcgctagtttttttttctcccacagattactctgaatatgcgtgcccttaattgtgttactgttacgatttggcttcgtcgcggtagtctgttgtgatgcgcccattatttcgcgattaattgtatgaatctatggattcgatgtgaagtcccaaagggtagcttttagggagggggaatgatgagatgttggaagttcacaagttgtgtctttcttaaaggctggtaaccttaatcctagatcaatatgagaaggggctacagttacagtccttcaccaccaaggggctacaggagaagggcgcgcagtccaagtcctcatgatcattatggtggtcgtggtagggatctcccaaccagtcttctggtcaggaatctccgtcgggactgcaggccagaagacctccgtcgcccatttggacagtttggtcgagttaaagatatatatcttccaagagattattacactggggatccccgagggtttgggtttgtccagtattatgatcctgctgatgctgctgatgcgaagtactatatggatgggcaggtagttcttggtaggcaaataacagttgtttttgcagaagagaacagaaagaagcctcaagagatgagagctagggacagagtcaggggtcattcttatgatgacaggaggtattctcgctctaggtcgcctcgttattataggggccgctctccttcacgcagccaaagctactcgaggtctccacctcagaatccaagacacagacttagagagaggtcctactccggctcacctgtggacagcagatcaagaagtgggagcccttatgaggatggatatcgcaaatcatcacggagagagaggtctctttctgtcagcggatgaagcagttttacggtctagagctattgctgtgaatctgcgcatggtggcctacttgctatgtctttctgaaccatatatgttctgtctagattatcattcccagtaccagagaagtatcgtgagactgtttgctgtactttctagtcttgaggatacagaagggggtcaccgattctctcagtagatggactattgaccactagctacgccagttccactgctttgtgtatttacaggcagctttgcggtttgaataaaattgtttgcatcgtgaaagctaattggtaaaaagactgaatcatgaaacgaacgttttgcatccctgttccctgatggcatttggatacgattttttgttctttcgacgaacaatttggcaaatctgcatcttattgagctgatgagaagtgcaggttggctaaatctttgaaggtcttgttcggttctatggggttctatgcgataggagattgaggggattaaatatctttctattcaattttgaattgaaagtaatttaatcacaccaacatttt

SEQ ID NO: 220543 - DNA, 511 bp, Zea Mays
cagggagatataggggagccgccacacctggggtgtctccacatcgctagctctccatagaatattgcctggagcacatggatgtcgatttgcgcgctagctctggtgtcgttcctgtggcgctggtggatgacaaccggtgaatgtcgcgcacatcgtggcctcatcacgggcgcttagcgactggagtagccgatgtgcatgcgatccttcgtcgaaacagatgcattgccgtcgggatgttgatcgtcgcgtgcgacgctgtggcatccaaatctaccggctgggctgaccggtccgccgctcgccggggccatgtcgctggcaagcattgcgccggcgaggaagggtctgtgcaccaccatgacactagctggggacgatgatgcgccatggaccgttggatcgattgcggagggcacatattagatctaggcgtataatccttcgggtcgttgatcgttgattcgatggctgcgatcgcgttctggttcggtgtgaggacacgtgt

SEQ ID NO: 220544 - DNA, 3631 bp, Zea Mays
aacggacggtccgatgcccatgactgcaggcatacatcgctgcgggtgaagttcggctatctgatttgccgcccgcgatacggcgaaaccctagctccacagcgccgttgcatggagtcccagcgatacaactacggcagcggcgccggcaccggcggcaaaatccgccgctaccctccctctcgcgccgtggctgcgtcaccatatgctcgaccggccaccgccccgacccacgctcctggaaccgccacggcggcggtttcgcatgagggcgggtggctgtcccggatcatagccgccggcacctcgcgattccttccctccttgttcagcttcagcacgtctcaacctcagcaagccgcgccggccccgtcgccaacgcgcgaccagctgccagtcgtcgagccgccttcgccgcttcccccacctttagtggatgatcgtccagaatgtgaagaaaacggtggagtggctgccaataatttgtgtactgaaaatcctcaaagttgtaccaaggaagaggaagaaaacatgctaagaaattctgatgaccatggtggaacggctcttgaagaattattgaagcagagaactttcacgaggagtgagtttgaatatttggccaatttgttatggtctaaaactattggagcaaattcactgaagctagaagatggtaacgtcaggaaaatgattgtttatgacaaagaaaatgcctcggaatactccaacttacctcttaatttttccactacaacattcagcgctgatgatcaagttgccacgcctgcagaaattgcaaaagcttatatgggtttaaaatcttccaagggttcccctctacgccttagattgcacgatccctcctctatgcctatcacatctatggaagttagtatgtcacaaaaagctaagcctcccacaatcccacttgcccaaggctcaagattgcatacttccaaaacttctgattgtcttgaaagcaactacacaacaccgaatggagtaatctgcaaaatgtcatcatctccttatttcaagagtggtgtgtcttcaaaggagctatttggttctgtatcttcacattaccagacctcaaatagtgttcatacttttggcagacaggttttgaagaggaagagtactgtcagcaatgagtttgtatctgctggtccgatacgcagaattcatcaaagatacaacagaacatcaccactgttggaaacacagctgggttatcgtagataccctgtgggctatggaagcaaactcgaaggttctgagcaattggcacggactcaaaaacgccggtgtctggataaagttggtgatgccagtctcggtagcgtagaggacaaaactaatgtgaactatcctggtcaggtgccagagaagtcagctgagatggcaactaagatactgaagcagcttgacacattagtaccttcacagaaggaaaacacatcagaaacaaagcagaaacatgagagtgccatatatttcgaggaagatgtttctcgacaaaagaaagtacaagcagagagagatcttttggaaccttctccatcagaagtacctgatggtattgcatcgaacaaatcaatctcacaaattaccttgaacaaggaaaagcctccagccttttcttccagaggtaatgctcccaatctggtattatctgatgaaattggacgaagcaaaatgtccactccaggaaatggcttcaccttccctgccccgactgtcaacaatgcctactcacagggccctccaacacctacattgacatctcctatactaacagttgaaaagcagccttcagtattctgcagtgcttcagtcacttctgcacaaagtgaccctaggatttcaaaatcagttttgggaggaccagttacacagaaattagaaagcaagttaaatggagataatcaacgagtgccttccaagaattctggacaagttgcatctttcacaagtaatcctgtatttaaggttgatggccctgggcatgcgtcaaactctgttctctcagctgtacaatcttataatacatcaactggctcagtttcatttcaaagtgctggctcttctaccatctccactaacttaacttcaaacattacacagagctgttcaactggaggcagtttcactttctccaatactcgttttggtagtttatcggcaacctcaaatatgtttgcagcaaaatctttagcgttgtcttgtacagcaagccccggtgcttctttgggtttccctccagttcatactgcaagttctccagctgctcaccgcaaatctgaagcagcaaatagcagtatcagttttagttccatgcagcagtttggcattgcaggttcttccacagtgcaggacaaatccaaggcagtagacagcagtaccccttttggctttccccagaagtttgacaccgtgagttccgcttcagaggatatgtccaaggcagactctcctgagccgacatttttttctgggaatcataatgtgcaatcagaaaattgcagttccctgttcacacagagtccaggaaataatttgagttccaaatcttcagaaaatttgaactctggaagctcgcatagttttgcagattcaccagttggttcagcaacaatgtgctctagcccttcgaattcaaactctctgttttcttgggctgctggctcaggtgcaagaactgctccaccatcttcccctgctacaagctcatcttttgcttttagttccagtccagcattttcagcacaaccagtattcgccagcaaattgactacacctgcttcactttcatatggctcaccaaatactggccctgctacatcaccattcagctcaatgccaagcgctgtattttcattcacgtcagctactccttcaataccaaatccatcacccacaacaccaatatttggtgaccctactgtacagatgaatggagggaacatagttattgacaggaatgggtccccttcccctgcaacttcgccatttggcttgccaagcagctctccatcgactccaactttcagtacgcctgcaactcagtttgcttctagtacatcaggctcacctggagtttttgaaattggcaagtatagtcaagcttcttcaggtgggttctcaatgggccctagtggtggcaacgacaaatcaaacagaagaattgtcagagttaagagaaggaaatgaaataccaatatttttcaagttgctctgagcatttataagactaaggcaatcagcacgtagaactttttgtttcacatcatttgtctgcggtggcaatgagaatgagatgccattcttaaattgatgatcacaattctggcacagtagcagcaatggaactagccttttcgcgatacggtcgcccatgacattttgttgtacggtttgtcacaacaatgctataatgaaatatataggtacttctccaacttgtattaaacatgttcagcgatcaagctgccctttttttgtgcaattggatcctgaaactaaatttcatcctaataataataatttaggcacgccaattattattattgattatgcaggtgagatttatgtactatatttttttactgtggggagcgagtcaaat

SEQ ID NO: 220545 - DNA, 2836 bp, Zea Mays
gccaatccaagccgttcgcgcgcgatccagtgagcgctccgataaattttgaccattccattgtcttcacaccctctcagtctctcagtgctgatacttctctccactctcctctttctttccctgtcccgacagagttcgaggaagctggggtgggcctgatgcttctccttctcttgcagtctagcgtccattccacttcgcaagggcttttctttctgttttaagtaaaacggatccagcaacgcaccagttcctgaaacagaaacgtgatgatggattcagtaagcatgaagctgttagcttttgtgttccttctgttgcgatgccagcgggcatcgcttgctcttgctgtcgacttccaagtcgaagcattggttgaaatgaggacgcaacttggtgacaaacgtggtgtccttagtgattggaaggataatcaaatgagcccctgctactgggccaatgttaattgccaagataacaaagtcacaacaatgtaagttcagcccattcatctcaactttctacactttgaactgaattactgccaaaaaggtagaaaattcacattatgccattatggtcattgaacagaaggaaatcttcaattctaacagttgactatgtccaaagtgattaaaccccaccatttgtaaaggagaagagatttcgtttgaattgaatagtttcatgctctattttttcctagtttgcctactattataagcttgtgatgctgtgtacttgactacttgtgttcacaaaactatttgcttagtttctcattatgagtttgcagaattttgagctcgtcagggttaacaggatccttatcacccagcattgcaaagctaacaactttacagcagctgatactggataacaacaacattactggagggattcctccggagtttggaaacctatcaggtttgacaattctaaaccttggaagaaataatttaaatgggtcaataccggactcccttggacaactttctaaactccaaaatctgtaagtcagccattactcatattatcatgactgataaaataaatctgagtgggtgatgactgataacttgtacagggatctaagccataattatttgaccggaaatatcccaagctctttctcaaatcttctgtcattgagtgatattaatctggcatataataatataagaggtgcaatcccacaacatctacttcaggtggcccaatacaactatgcaggcaaccacttgaattgtggccaaaatttatctgcatgtgaacgaggcagcacattgacaggtggatccaaaaatttcaagctaaacgtggttattggaagcattgctggagcagtcacattttctgtaactgtagttctagttttgctatggtggcaaagaatgcgttaccggcctgaaatcttcattgacgtgtcaggtcagaatgatcatatgcttgagtttgggcaaataaagcggttctcatggcgggagcttcagattgcaaccagcaatttcagtgaacagaatgttcttggcaagggtggttttggtaaggtgtataaaggagttcttccaggtccaaacagtataaagattgcagtgaaacgactactgaacgtggacagtcgtgatggggaaatggctttcctcagagaagttgaattgataagcattgctgtacacaagaacatattaaggttgataggattctgtacaacaccaacagagaggcttttggtctaccctttcatggagaatcttagtgttgcttcccgtttaagagatataaaactaaacgaaccagcattagattggtctacaagaatgcgaattgctcttggcgctgcctgtggtttggagtaccttcatgagcactgcaatcccaagatcatccaccgtgatgtcaaggctgcaaatgtcctgcttgatgggaactttgaagcagtggtaggagattttgggctggcgaagatggtagacatagggaggaatacagtaacaacaggggttcgtggaactatgggccacgtagctcctgagtacataaagacaggaaggccatcagtgaagacagatatctttggttatggtgtcatgctgttagagattgtgacaggagagcgtgcaattgcattccatcctgaccgtatagaagaagcaggcgagatcctgctcactgatcaggtcaagctatggatggaagaagggcgactactcgacctagtggatcgcaatctaggtggcgtctacaaccttgaagagctggagaaggttacccagatagcacttctctgcactcacatggatcctgaacaacgccctacaatgtctgaggtggtgcagatgctggaaggagagattgtcccagcagagcggtgggaggagtggcagctggctgagctccaacgacgacaacagcatgagatgaggcaacagggcaaactattcaacttcagtgaagagtctcaaaacatccaggaagccattgagttgtcagctggcagatgagctgtcataagaaagtgacatgattttcacttgttccttaaatagaaaggctataagagaaatattgactattaggaatagtctataaggtcctggactcctggtgtaatatcttgcacaagtaactccgtccatatgctgttaatacaacgataggaccacacctagctcagaccatgtgtatatcaagaatagactgttctacattttaattgcattctgtattactggataactctgaaattctctgttgtgtgtgtgtagaacttgaagccttgaattcaaactttagcttaaaagccaaaaatttcggcagtaatataatgaga

SEQ ID NO: 220546 - DNA, 2232 bp, Zea Mays
tcagtctctcagtgctgatacttctctccactctcctctttctttccctgtcccgacagagttcgaggaagctggggtgggcctgatgcttctccttctcttgcagtctagcgtccattccacttcgcaagggcttttctttctgttttaagtaaaacggatccagcaacgcaccagttcctgaaacagaaacgtgatgatggattcagtaagcatgaagctgttagcttttgtgttccttctgttgcgatgccagcgggcatcgcttgctcttgctgtcgacttccaagaattttgagctcgtcagggttaacaggatccttatcacccagcattgcaaagctaacaactttacagcagctgatactggataacaacaacattactggagggattcctccggagtttggaaacctatcaggtttgacaattctaaaccttggaagaaataatttaaatgggtcaataccggactcccttggacaactttctaaactccaaaatctggatctaagccataattatttgaccggaaatatcccaagctctttctcaaatcttctgtcattgagtgatattaatctggcatataataatataagaggtgcaatcccacaacatctacttcaggtggcccaatacaactatgcaggcaaccacttgaattgtggccaaaatttatctgcatgtgaacgaggcagcacattgacagctaaacgtggttattggaagcattgctggagcagtcacattttctgtaactgtagttctagttttgctatggtggcaaagaatgcgttaccggcctgaaatcttcattgacgtgtcaggtcagaatgatcatatgcttgagtttgggcaaataaagcggttctcatggcgggagcttcagattgcaaccagcaatttcagtgaacagaatgttcttggcaagggtggttttggtaaggtgtataaaggagttcttccaggtccaaacagtataaagattgcagtgaaacgactactgaacgtggacagtcgtgatggggaaatggctttcctcagagaagttgaattgataagcattgctgtacacaagaacatattaaggttgataggattctgtacaacaccaacagagaggcttttggtctaccctttcatggagaatcttagtgttgcttcccgtttaagagatataaaactaaacgaaccagcattagattggtctacaagaatgcgaattgctcttggcgctgcctgtggtttggagtaccttcatgagcactgcaatcccaagatcatccaccgtgatgtcaaggctgcaaatgtcctgcttgatgggaactttgaagcagtggtaggagattttgggctggcgaagatggtagacatagggaggaatacagtaacaacaggggttcgtggaactatgggccacgtagctcctgagtacataaagacaggaaggccatcagtgaagacagatatctttggttatggtgtcatgctgttagagattgtgacaggagagcgtgcaattgcattccatcctgaccgtatagaagaagcaggcgagatcctgctcactgatcaggtcaagctatggatggaagaagggcgactactcgacctagtggatcgcaatctaggtggcgtctacaaccttgaagagctggagaaggttacccagatagcacttctctgcactcacatggatcctgaacaacgccctacaatgtctgaggtggtgcagatgctggaaggagagattgtcccagcagagcggtgggaggagtggcagctggctgagctccaacgacgacaacagcatgagatgaggcaacagggcaaactattcaacttcagtgaagagtctcaaaacatccaggaagccattgagttgtcagctggcagatgagctgtcataagaaagtgacatgattttcacttgttccttaaatagaaaggctataagagaaatattgactattaggaatagtctataaggtcctggactcctggtgtaatatcttgcacaagtaactccgtccatatgctgttaatacaacgataggaccacacctagctcagaccatgtgtatatcaagaatagactgttctacattttaattgcattctgtattactggataactctgaaattctctgttgtgtgtgtgtagaacttgaagccttgaattcaaactttagcttaaaagccaaaaatttcggcagtaatataatgaga

SEQ ID NO: 220547 - DNA, 2244 bp, Zea Mays
tcagtctctcagtgctgatacttctctccactctcctctttctttccctgtcccgacagagttcgaggaagctggggtgggcctgatgcttctccttctcttgcagtctagcgtccattccacttcgcaagggcttttctttctgttttaagtaaaacggatccagcaacgcaccagttcctgaaacagaaacgtgatgatggattcagtaagcatgaagctgttagcttttgtgttccttctgttgcgatgccagcgggcatcgcttgctcttgctgtcgacttccaagaattttgagctcgtcagggttaacaggatccttatcacccagcattgcaaagctaacaactttacagcagctgatactggataacaacaacattactggagggattcctccggagtttggaaacctatcaggtttgacaattctaaaccttggaagaaataatttaaatgggtcaataccggactcccttggacaactttctaaactccaaaatctggatctaagccataattatttgaccggaaatatcccaagctctttctcaaatcttctgtcattgagtgatattaatctggcatataataatataagaggtgcaatcccacaacatctacttcaggtggcccaatacaagcaaccacttgaattgtggccaaaatttatctgcatgtgaacgaggcagcacattgacaggtggatccaaaaatttcaagctaaacgtggttattggaagcattgctggagcagtcacattttctgtaactgtagttctagttttgctatggtggcaaagaatgcgttaccggcctgaaatcttcattgacgtgtcaggtcagaatgatcatatgcttgagtttgggcaaataaagcggttctcatggcgggagcttcagattgcaaccagcaatttcagtgaacagaatgttcttggcaagggtggttttggtaaggtgtataaaggagttcttccaggtccaaacagtataaagattgcagtgaaacgactactgaacgtggacagtcgtgatggggaaatggctttcctcagagaagttgaattgataagcattgctgtacacaagaacatattaaggttgataggattctgtacaacaccaacagagaggcttttggtctaccctttcatggagaatcttagtgttgcttcccgtttaagagatataaaactaaacgaaccagcattagattggtctacaagaatgcgaattgctcttggcgctgcctgtggtttggagtaccttcatgagcactgcaatcccaagatcatccaccgtgatgtcaaggctgcaaatgtcctgcttgatgggaactttgaagcagtggtaggagattttgggctggcgaagatggtagacatagggaggaatacagtaacaacaggggttcgtggaactatgggccacgtagctcctgagtacataaagacaggaaggccatcagtgaagacagatatctttggttatggtgtcatgctgttagagattgtgacaggagagcgtgcaattgcattccatcctgaccgtatagaagaagcaggcgagatcctgctcactgatcaggtcaagctatggatggaagaagggcgactactcgacctagtggatcgcaatctaggtggcgtctacaaccttgaagagctggagaaggttacccagatagcacttctctgcactcacatggatcctgaacaacgccctacaatgtctgaggtggtgcagatgctggaaggagagattgtcccagcagagcggtgggaggagtggcagctggctgagctccaacgacgacaacagcatgagatgaggcaacagggcaaactattcaacttcagtgaagagtctcaaaacatccaggaagccattgagttgtcagctggcagatgagctgtcataagaaagtgacatgattttcacttgttccttaaatagaaaggctataagagaaatattgactattaggaatagtctataaggtcctggactcctggtgtaatatcttgcacaagtaactccgtccatatgctgttaatacaacgataggaccacacctagctcagaccatgtgtatatcaagaatagactgttctacattttaattgcattctgtattactggataactctgaaattctctgttgtgtgtgtgtagaacttgaagccttgaattcaaactttagcttaaaagccaaaaatttcggcagtaatataatgaga

SEQ ID NO: 220548 - DNA, 971 bp, Zea Mays
gggaccttccggatacagacgatataaaactaaacgaaccagcattagattggtctacaagaatgcgaattgctcttggcgctgcctgtggtttggagtaccttcatgagcactgcaatcccaagatcatccaccgtgatgtcaaggctgcaaatgtcctgcttgatgggaactttgaagcagtggtaggagattttgggctggcgaagatggtagacatagggaggaatacagtaacaacaggggttcgtggaactatgggccacgtagctcctgagtacataaagacaggaaggccatcagtgaagacagatatctttggttatggtgtcatgctgttagagattgtgacaggagagcgtgcaattgcattccatcctgaccgtatagaagaagcaggcgagatcctgctcactgatcaggtcaagctatggatggaagaagggcgactactcgacctagtggatcgcaatctagatgctggaaggagagattgtcccagcagagcggtgggaggagtggcagctggctgagctccaacgacgacaacagcatgagatgaggcaacagggcaaactattcaacttcagtgaagagtctcaaaacatccaggaagccattgagttgtcagctggcagatgagctgtcataagaaagtgacatgattttcacttgttccttaaatagaaaggctataagagaaatattgactattaggaatagtctataaggtcctggactcctggtgtaatatcttgcacaagtaactccgtccatatgctgttaatacaacgataggaccacacctagctcagaccatgtgtatatcaagaatagactgttctacattttaattgcattctgtattactggataactctgaaattctctgttgtgtgtgtgtagaacttgaagccttgaattcaaactttagcttaaaagccaaaaatttcggcagtaatataatgaga

SEQ ID NO: 220549 - DNA, 883 bp, Zea Mays
cgggctcccatcgaactcgaaccctctctacgccgactcgtctcttctcccctaatcctccttccccgatccagtcccgcagcaacgccgagggagagcgaggagagacagatacagatcgcgcgctgagatgtcgtcggactcctcgtcgtgggcgcgcgccctggtgcagatctcgccctacaccttctccgccatcggcatcgctgtctccatcggcgtctcggtcctcggcgcggcatggggtatcttcatcacggggagcagcctcatcggggctgccatcaaggcgcccaggatcacatctaagaacctcatcagacaaagcttgaaagtgtgccaacatcccaaatgtacgatccggagtctcttcgagctggctatgcgatctttgcatctggtcttatcgttggcttcgctaatcttgtttgcggggtatgtgtggggataatcggaagcagctgtgcactgtctgatgctcagaactcatcactctttgtaaagattttggtgattgagatcttcggcagcgctctgggactgttcggagtcattgtgggcatcattatgtcatctcaggcgacatggccagcaaaagcttgatccttaccgttagtgctctgtatattattcggatggaatgtatcggaatatgcatgcggtccaacggactttccctgttcttttttcttttgcatcttttcggcaaaacacgaaatgttgcaagcgttgcgctaccgattgtagagttgctattccaaatgccggagcgttccaatgtgttacgatatcttgtaggtgctattgcttttgtaagacatttggcaattggcgtattaaataaatgcttgaactgaataagattagaattatttttttgtca

SEQ ID NO: 220550 - DNA, 1255 bp, Zea Mays
ggaggagtagctcagaacctcagatagctcggggagcgaaagagagagagaccgacgcgcatcctcatcctccccgcctcaaactcgcgtcgcggggacgtgtccgttcacacgagtattctgcgtagccacgtcgccggtgtgcggtagcggtagcggtagcggtagcagccagggcccagggctgcttctcgccccttccaaaatcccgagcttttccccggtttcgacccttcgttttcctccgcttcctcctctgctccactgcttcaggaataggtgcctcaggaatataggtagacggagaaaaaaaaacacagagagagagagagacggaggggaggcatcgaaattccgaatccccacctcgccgctcccaccaccaccgcggattgcgtcccgttcgattgcgcaggagtttctgttccaggatgagcaccgagtcaggagagctgctcgggatcgaccccgtcgacctccggttcccattcgagttaaataagcagatctcctgcacgctgcagctgacgaacaagacagacaagcaggtcgcgttcaaggtaaaacgaatcctttcctgcgcgttcccgggcaggagaagccagccacgcgaaacaaaatggtaccgtacccgtagtggactgagcttgtgcgacaccgcccgactgtaggtcaagacaacgagccccaaaaagtactgtgttcggccaaacaacggcatggtggcgccccggtccaaagctgacgttgttggtaatttagtgcctcgcatgattgtcatggcatagctgccctttatttccacatcttatacccaccgtgaatcgttggattttcagtcacaatgcaagcgcagcgggacgcgccaccggacatgcattgcaaggacaaattccttgtgcagagcgccatcgtggccaaggagaccatgccgaaggaagtcactggagacatgtttaccaaagattcaggcaatatagtggatgaagtgaagttgaaggtagtttatacagcgccatcgtcctctcaaagcgagggatttgaggatggtaatctcggcagtttgagttatcaagaggaaacaaaagaacccaaagaatcagaaaaaataatctctgagccatttgctttgatttcgaaactgatggaggagaagaattctgctgttgagctgaacaacaagcttcgacaagaattggttcacatgatccctccatccacctttataaagtgtatttttatctgaacataatcc

SEQ ID NO: 220551 - DNA, 844 bp, Zea Mays
ctgacgtttcacaatgcaagcgcagcgggacgcgccaccggacatgcattgcaaggacaaattccttgtgcagagcgccatcgtggccaaggagaccatgccgaaggaagtcactggagacatgtttaccaaagattcaggcaatatagtggatgaagtgaagttgaaggtagtttatacagcgccatcgtcctctcaaagcgagggatttgaggatggtaatctcggcagtttgagttatcaagaggaaacaaaagaacccaaagaatcagaaaaaataatctctgagccatttgctttgatttcgaaactgatggaggagaagaattctgctgttgagctgaacaacaagcttcgacaagaattggaccttctgaggcgagacatcagcaggcagcatggtggtttctcattagttttagtactggtggttgctattctgggaatactgctagggttcctcatgaagagatgagcgcatgtaatgacttatcttgtctggcttttctgaactaaacaaaattgtatgtgctctgtgtgcgcttgttgttgtacaagtcagtggtctgtttatcataggatctgatgcctattgtaattttctgattcatattataaactttagccaatcaataagtcatagttaccaacaccagctgttatcatcttgcaagcgacttgaggtcttgaactgtagccgttcggtttgtgattgtgagagatttttttgactaattgttggcatcattttgcacatatgaacagaatgaaactgtggtttgtgatatatgttggatgctttgtggattgcgtggagcagtgttttctattttgttcattgtta

SEQ ID NO: 220552 - DNA, 415 bp, Zea Mays
gcgtgctcgtcgcgcggacgcgcagcagcccatcagctgctccaagttctcctcttgtccaaaactgcttctctcgcgcagcagagcaaccgcgccaggcttcttctccaggtccgcgtgtgagaatcgcagcctctgttcatctcccaaatttcaaaccatctcctaccaacgtcgcgaagacctgggatccatggcgcccttgcagcagaccagccggtcttggcaccccaacccctgcggctcccctgccatccgtgtcccctgcgttctagggtggtcgtcccgcgttgttgccgtcgagattgcgatctgttcccgagcttcgaggaatcgacggacaagcttcagcgaccaagagatcgaactcttcgagttctacgaggctgaagattctgagcatctgtttggtgaa

SEQ ID NO: 220553 - DNA, 918 bp, Zea Mays
aagagcgcggcaacaccgcgcatatacatggaatgagaagggctcagctacagccaagcgaataaatatactgtgaattaaccctaacctaaccgaagcgtccgcctcccacacacgggactccggccgcgagaacccgcgactaagccaggacgcgggacgccacagccaccggcctcagcatccgcctaggacgaataacccttctaggctgccgccgccgccgtccttagctcatattgttgccggcgaagagcgccccagatccgcccctgctatggagtcggcggtgaacccgaaggcgtacccgctggctgatgcgcagctgacgataggtatcatcgatatcatccagcaggccgccaactacaagcagctcaagaagggagctaacgaagcgacgaagaccctgaacagggggatatcggagttcgtagtgatggcggcggacacggagccgctcgagatcctcctccacctccccttgctagctgaggataagaacgtgccatatgtatttgttccatcgaaacaagctcttggccgtgcttgtggtgtgacaaggcctgtcattgcttgctcagtgaccagcaatgagggtagccagctgaaacaacagatacagggtctcaagggtgatgggcctcagcgacacattttttcagaggcttggactggtgatggtgtcttgtttactagattttacgtctttccaaactatgtttgaacactgttaggtcgaccatacttgaattgtgcttatatatttgactgtcatgtattctgaagatgcatctgcattctggtgccttggtttatgttgagattctgaccatcattgtaacggttgattactatgagtttgagaattggatcgattggatggttgcaatttccatgtgaccaggacagataaaa

SEQ ID NO: 220554 - DNA, 1678 bp, Zea Mays
cagagtgatggcgaggagaagagacggtgtacagacgagtgcgccagacggtgtctgcgtaggcgaacggataggagacatgacaatgagaaggtgtcagacaggtcctggtcctgttttggctgcaaggagtcctggtttgggcaacgttgacaatctccatgagagttcaagcttatctaggagctgggatttgaacagacagattgatgatgaccgtgatgtactcatagaatgtagagatgtccataagtcatttggagagaaacaagtattaagaggtgttagtttcaagacatggtgaagcagttgggataattggaccttcagggacgggaaaatcaactatattgaaggttatggctgggctgcttgctccggacaagggtgatgtaatcatttgtggaaagaaaaggcatggtttagttagcgatgaggatatagagggtctccgcattggtttggtctttcaaagtgctgcactttttgattctctcacagttcgtgaaaatgttggattccttttgtaagggaacatgcctgccagaaggtcatttttcagtaattgcttctgttcagctttcatctttgatacatccatcctttgctttagatatgaaaattcaagcttacccgaggaccgcattggtaaattggtgacagaaactttggctgcagtaggactaaagggtgttgaagatcgtatgccatccgagttgtctggtggaatgaaaaagcgtgttgctctagcacgttcgataatatttgatgatacaaaggatgtagtggagccagaggtccttttatatgatgaacctacagctgggctcgacccgattgcatcaactgtcgtggaagaccttatacgttctgtgcatatgactggacgggatgcccttggcaagccaggaaaaatagcttcctatgttgttgtgacccatcagcatagcacaataagaagagctgttgataggttgctatttcttcatgaggggaaggttgtttgggaaggaatgacacatgagttcacaacatcagctaatccaattgttcaacagtttgcatctggtagtttggatggacccataaaatatttttgaagacccaacccagtagtgaatgaagcataggtgttttgttacaccctcttaaagatcatcccaacaaaatctagagcatcaagaatccaacaatatctggagcatcaagaatccgaaatggggggtctatggcagttgggagaaggaaacacatttggtttgtcattgtttcattgagtttaacaggcatctgcagcagtatcattcggtcacgtcaccttctatgcgcataattgtggtaccagcttgtcaaataagcattagttttctatacaccattctttgagggaaactgtgcgagcgatccaagataaactacatcattcgtcaggaaaactgagctatcatgccaaaaacaaaaaaaaatactaaacacccttcttttagtcatttataaacgagactgatgtaaatgtttactgtaactgttgcttatggtatagcagcgtcgattcctcagtattctcagataattttatttatacgtttgtctgaactgaagatggtagcattagtgcacactctatttgcgcgcactggttgatttgacattgacaagtctctttagttacctgctg

SEQ ID NO: 220555 - DNA, 1617 bp, Zea Mays
gcttaacagtatcagaagggtccgtgtcctggaaataggataggagacatgacaatgagaaggtgtcagacaggtcctggtcctgttttggctgcaaggagtcctggtttgggcaacgttgacaatctccatgagagttcaagcttatctaggagctgggatttgaacagacagattgatgatgaccgtgatgtactcatagaatgtagagatgtccataagtcatttggagagaaacaagtattaagaggtgttagtttcaagacatggtgaagcagttgggataattggaccttcagggacgggaaaatcaactatattgaagggtgatgtaatcatttgtggaaagaaaaggcatggtttagttagcgatgaggatatagagggtctccgcattggtttggtctttcaaagtgctgcactttttgattctctcacagttcgtgaaaatgttggattccttttgtaagggaacatgcctgccagaaggtcatttttcagtaattgcttctgttcagctttcatctttgatacatccatcctttgctttagatatgaaaattcaagcttacccgaggaccgcattggtaaattggtgacagaaactttggctgcagtaggactaaagggtgttgaagatcgtatgccatccgagttgtctggtggaatgaaaaagcgtgttgctctagcacgttcgataatatttgatgatacaaaggatgtagtggagccagaggtccttttatatgatgaacctacagctgggctcgacccgattgcatcaactgtcgtggaagaccttatacgttctgtgcatatgactggacgggatgcccttggcaagccaggaaaaatagcttcctatgttgttgtgacccatcagcatagcacaataagaagagctgttgataggttgctatttcttcatgaggggaaggttgtttgggaaggaatgacacatgagttcacaacatcagctaatccaattgttcaacagtttgcatctggtagtttggatggacccataaaatatttttgaagacccaacccagtagtgaatgaagcataggtgttttgttacaccctcttaaagatcatcccaacaaaatctagagcatcaagaatccaacaatatctggagcatcaagaatccgaaatggggggtctatggcagttgggagaaggaaacacatttggtttgtcattgtttcattgagtttaacaggcatctgcagcagtatcattcggtcacgtcaccttctatgcgcataattgtggtaccagcttgtcaaataagcattagttttctatacaccattctttgagggaaactgtgcgagcgatccaagataaactacatcattcgtcaggaaaactgagctatcatgccaaaaacaaaaaaaaatactaaacacccttcttttagtcatttataaacgagactgatgtaaatgtttactgtaactgttgcttatggtatagcagcgtcgattcctcagtattctcagataattttatttatacgtttgtctgaactgaagatggtagcattagtgcacactctatttgcgcgcactggttgatttgacattgacaagtctctttagttacctgctg

SEQ ID NO: 220556 - DNA, 1132 bp, Zea Mays
gtacgggtagctgccttcgcttcgcttccataccactccactccgctgctccgctcgctcagccccctcgagcgtgcagcgcggcggcgatgcccgagctcgcggcggaccacgggccgcgggggcgcaggcggaggcagcgcgggagcgggtgatgcaggaggcggcgacggcgaccgggtgccgccgttcatgggcaacaaccgcgaccacaacccgcgggagctgcgctcctgggcgcgccgcacggggttccacccctcggccttcttctcgggggagtccaactcctccttcgcctcctccgccgcgccgcaggccccgccgccgccgccgcctcccccggtctcctcgcgtcgcccgccgccggcacgggagcgggaacccgaaccggacacggaggacgaccttgttcccgcgccgccactggaattagagcgcggcgggcccgcccccgtccgcggacgcggcggacgcccgcgccgccgcatcgacctccgcggcgagctcgtgatcccaccgggcttcggccgcgaggaggcggaaccggacgcgggaaaggggcgcgcgcgcggggacgccaggaggaggaacttcggcgtcgagatggatcagacgccggccaatgcgggccggaacgggaacggagcgctcgcggacgcggagtcgaggaagaagtccgaggaggcggaggcggacgcgaagcggaaggcggaggaggccgaggcgaggaggaagaaggaggaggaggagagggacgccgagctggctgcgtactaccaggaacagtgggcgaacgaggatgagggagctgccgacgctgccgcggccgagacggccccgctgtatgaggcgtcgggactacggtgcggtgtaaccgataacccagggtgggaaattcaagcacataatgagggaactacagggggctatacttgttggttcagtgttccagataatattaggatacactggtcttatgtcactgtttctgaggttaataaatccagtagtggtggcaccaactattgctgcagtgggtttggcattttttagttatggtttccctcaggctggcagctgtgtagaaatcagcatgcccctcattctgttggttcttctgtgcactttg

SEQ ID NO: 220557 - DNA, 2050 bp, Zea Mays
atcagtttcaccgctgggtcagccatggccgccacatccatcaaggtcgcgcacctcacaaccctcgcgctcttctctccgactccaaaccccttcggtccgaagtccagcaaacacagagctagagccccaccacccatctccatctccatggatccggccctcgtggaccctgcccacctgcaggcccttatgctcgcctgcggccactcttgcacgctccgcctctcgccggcgctatcagtttccgccgttgagccggtcgacctcagcaagctccggactgcccttgcgcacagcttcgtcgtcgtatctgtcttctgcggtgctaggttcttcacacatgacagggaaagggagggggagggacagagattcttgggcttggagatcggtctcgatcttcagggtgagcggcgccttgtcggattcgggcgcgccgtctccgacctcgggctcaccgcatccgtccatgacattgtggtaatgttctctttcgcagtgaatttgcccgtggtagcgaaccctgattgtgtgggtagaaactattaactgtgtgaaaccttatttttctattctgttcttgttaacctcattggcattaacacattttccatctgtcatttcttgcaaaagaattgatcttttttttttggaatctgtgaagagacattgctactgggctagaggaagtgtttatttgattgaataccatggaacattaacaaaaacaagggcaaggttgtttcggttagcagattgtggattgtggcttttaggttgttacaatctgcaagatgaaacaaagcagccataagattctattggtccacaggccagattataaaggtccaacaatcttcttccacatttgcaagacaaacaaatagggcctaagaacacatagccttgtagaaataacagtggttttgtcctaaacttacaatgtaatgcctattgattggtaagcaagtttggaagaataagcttctgcattactgtacttctttctgtgcttttgcattaatagtgtgttatcttgtacaaattaaccaacagtaagtaaacttcttgtgtatttctattgaaagtttctatgtagcattaagtgcaacttggcaagtttgttttgaattaattgtattggaattttgggcattagagcaatcacaacccagaaactactaagtgatttccatagctgccacctcactaagaaatcactcatagaagctataagtttcaacgctaatttttttttgttgtggtgtcgtaataaatctggatgtgacgacgcggcaagtgagctgtgtgtgggcttcacagatggaaactggatgctcatctccaacgctaaaacagtggttttttgtgtcttcgttgcgcgtgtagatctgatttctcaaggaggaaaccatttttccctctttctcattaattttcttgctatgtcaccaaattgcttgtggcagctaaataatgctatagaaactagatgatgtggattgtggagggtgccaaatgcagtagtctagctttgatattttatacttctgttccaaaacaggaaaaaaaaaacttatagatatgtcacatgtgttcatataactagtttcagtgacttacaggtacatccattactacagaggagaggaattggccaaaagatagtgaacaaaattacaagggtacttcatagcagaggtatatatgacatctctgcgttatgtacagcaaaggagaggcccttttttgaagcttgtggatttggtgatgatatgatgggttcaacaacaatgttgtatactagaaaaacacagaaatagagttcattaaaaagttctcaattggtataatgttatttgttgatatgataactcatctgttggtcttcactgctgatgtttcaaagcattactctcagaaaaggttgatcttcacagctgatgtttgaaatcattttactcagaaaaaggggggtgggttatgagatgtagcagttatctcaatgtgcgcacctattgggaaaaataatcacaatggagtcgtg

SEQ ID NO: 220558 - DNA, 1328 bp, Zea Mays
cattaatcagtttcaccgctgggtcagccatggccgccacatccatcaaggtcgcgcacctcacaaccctcgcgctcttctctccgactccaaaccccttcggtccgaagtccagcaaacacagagctagagccccaccacccatctccatctccatggatccggccctcgtggaccctgcccacctgcaggcccttatgctcgcctgcggccactcttgcacgctccgcctctcgccggcgctatcagtttccgccgttgagccggtcgacctcagcaagctccggactgcccttgcgcacagcttcgtcgtcgtatctgtcttctgcggtgctaggttcttcacacatgacagggaaagggagggggagggacagagattcttgggcttggagatcggtctcgatcttcagggtgagcggcgccttgtcggattcgggcgcgccgtctccgacctcgggctcaccgcatccgtccatgacattgtggtacatccattactacagaggagaggaattggccaaaagatagtgaacaaaattacaaggtaacttgctgattttacaataaaaatatcgcacattatgttcccactacagaaaccatggttgctgcctacaggaactgagtgtttcttctaaccataatgtgttcgactcaaatgatcttttattttgaatcaagtatcatagagaaaagatgaatatatgcagttttaaatgctttaatgataagtaaaattacttgttatagagggcaaaactagtaccaaaggctctcacataagttgaggcttgaggaagggataaaccgtggcaagcatgtcctccgcaaatgtggagaagctactttgaacccacgatcttataatccgtgataaattgttttctgtaatccgtgataaattgttttctggtagaaagttatgcttgatccaatagttcattgctggaaaatatctgcagggtacttcatagcagaggtatatatgacatctctgcgttatgtacagcaaaggagaggcccttttttgaagcttgtggatttggtgatgatatgatgggttcaacaacaatgttgtatactagaaaaacacagaaatagagttcattaaaaagttctcaattggtataatgttatttgttgatatgataactcatctgttggtcttcactgctgatgtttcaaagcattactctcagaaaaggttgatcttcacagctgatgtttgaaatcattttactcagaaaaaggggggtgggttatgagatgtagcagttatctcaatgtgcgcacctattgggaaaaataatcacaatggagtcgtg

SEQ ID NO: 220559 - DNA, 855 bp, Zea Mays
gtcattaatcagtttcaccgctgggtcagccatggccgccacatccatcaaggtcgcgcacctcacaaccctcgcgctcttctctccgactccaaaccccttcggtccgaagtccagcaaacacagagctagagccccaccacccatctccatctccatggatccggccctcgtggaccctgcccacctgcaggcccttatgctcgcctgcggccactcttgcacgctccgcctctcgccggcgctatcagtttccgccgttgagccggtcgacctcagcaagctccggactgcccttgcgcacagcttcgtcgtcgtatctgtcttctgcggtgctaggttcttcacacatgacagggaaagggagggggagggacagagattcttgggcttggagatcggtctcgatcttcagggtgagcggcgccttgtcggattcgggcgcgccgtctccgacctcgggctcaccgcatccgtccatgacattgtggtacatccattactacagaggagaggaattggccaaaagatagtgaacaaaattacaaggcccttttttgaagcttgtggatttggtgatgatatgatgggttcaacaacaatgttgtatactagaaaaacacagaaatagagttcattaaaaagttctcaattggtataatgttatttgttgatatgataactcatctgttggtcttcactgctgatgtttcaaagcattactctcagaaaaggttgatcttcacagctgatgtttgaaatcattttactcagaaaaaggggggtgggttatgagatgtagcagttatctcaatgtgcgcacctattgggaaaaataatcacaatggagtcgtg

SEQ ID NO: 220560 - DNA, 930 bp, Zea Mays
ctaccctggtcattaatcagtttcaccgctgggtcagccatggccgccacatccatcaaggtcgcgcacctcacaaccctcgcgctcttctctccgactccaaaccccttcggtccgaagtccagcaaacacagagctagagccccaccacccatctccatctccatggatccggccctcgtggaccctgcccacctgcaggcccttatgctcgcctgcggccactcttgcacgctccgcctctcgccggcgctatcagtttccgccgttgagccggtcgacctcagcaagctccggactgcccttgcgcacagcttcgtcgtcgtatctgtcttctgcggtgctaggttcttcacacatgacagggaaagggagggggagggacagagattcttgggcttggagatcggtctcgatcttcagggtgagcggcgccttgtcggattcgggcgcgccgtctccgacctcgggctcaccgcatccgtccatgacattgtgtgacttacaggtacatccattactacagaggagaggaattggccaaaagatagtgaacaaaattacaagggtacttcatagcagaggtatatatgacatctctgcgttatgtacagcaaaggagaggcccttttttgaagcttgtggatttggtgatgatatgatgggttcaacaacaatgttgtatactagaaaaacacagaaatagagttcattaaaaagttctcaattggtataatgttatttgttgatatgataactcatctgttggtcttcactgctgatgtttcaaagcattactctcagaaaaggttgatcttcacagctgatgtttgaaatcattttactcagaaaaaggggggtgggttatgagatgtagcagttatctcaatgtgcgcacctattgggaaaaataatcacaatggagtcgtg

SEQ ID NO: 220561 - DNA, 962 bp, Zea Mays
atcagtttcaccgctgggtcagccatggccgccacatccatcaaggtcgcgcacctcacaaccctcgcgctcttctctccgactccaaaccccttcggtccgaagtccagcaaacacagagctagagccccaccacccatctccatctccatggatccggccctcgtggaccctgcccacctgcaggcccttatgctcgcctgcggccactcttgcacgctccgcctctcgccggcgctatcagtttccgccgttgagccggtcgacctcagcaagctccggactgcccttgcgcacagcttcgtcgtcgtatctgtcttctgcggtgctaggttcttcacacatgacagggaaagggagggggagggacagagattcttgggcttggagatcggtctcgatcttcagggtgagcggcgccttgtcggattcgggcgcgccgtctccgacctcgggctcaccgcatccgtccatgacattgtgtgacttacaggtacatccattactacagaggagaggaattggccaaaagatagtgaacaaaattacaaggtaacttgctgattttacaataaaaatatcgcacattatgttcccactacagaaaccatggttgctgcctacaggaactgagtgtttcttctaaccataatgtgttcgactcaaatgatcttttattttgaatcaagtatcatagagaaaagatgaatatatgcagttttaaatgctttaatgataagtaaaattacttgttatagagggcaaaactagtaccaaaggctctcacataagttgaggcttgaggaagggataaaccgtggcaagcatgtcctccgcaaatgtggagaagctactttgaacccacgatcttataatccgtgataaattgttttctgtaatccgtgataaattgttttctggtagaaagttatgcttgatccaatagttcattgctggaaaat

SEQ ID NO: 220562 - DNA, 3429 bp, Zea Mays
gccagtcaccggcgtgtgggagagaagagagagagaccacctcctccgctctctctctcttactctgactcgcccgctccggttcgccgctccgccatcgccggcgatcactccactccggcaacgccgcgtctccgacgatcccaccgacgccgggccccgcgaccccattcctccgattgcctcctcacgtcttgcggttctcccccggcgagggtacgtgctcttgcccagatccgccccgcctccccgcgccccgccacgcgcgccgatcggcaagctgcgtaggcttcgctaccgctgctgcgcgagcgagcgtcgcagccgtcgatccgcgcgcccgccatggacgacttccagggcctgctggcccgcgacttcggcctccgcccgcaggggaaggccgcgcccatgtcggccgcccgctcctcgagtccctccggatccgcctggaccaataccagatccgccgtggggtccgccgctccctccgcgccctcctacgacgagctcttcgggtccgccccgccgccgccgcccaaggccacgccgtcgctcgataacatcttcaactcgttcaaggagcccgcttccaccgcgccgccgcctaagccgaagcactcttccgcgccggtgttcgacaagccggtctacgatgatgacctgctcggtggatttggtaagagctcacaggtgagggaagaggtggatgacaagaggaaaccagaggcacctacggctgtggcggctactgggttcgattatttgatcccaagctttggcgggagaagctccccgcggcaaagggatgctattggtgcaaaacaaaagaaagtttccatgtcgacatctaagcaatcagctagcttaagcgaccccttcgttgttctcgaaacaacttcatcctcagcccatccattcgcagatcccttggatgaatccggtaaagctgcaaaatatcaagggaaaaaccgtgaaagtactagcgttgggagcagtctgtttgaggattcaagcactttcaaccaggctccaaaatttgaacctttttttaccccagaggtggacaatggatcgaaagataggaatgagtcaagcagagcccaaaactcaaaccctgtacaggatttttctaaaagaaactcctcccaacaaccttctgttgaggattttgaaaatatctttcctaagtcacagtctgccagatattctgatgtccatgttgacattggctcagagaaatatagtgggaatggtataaatgatcagtcacctagatctgatgaatccgaagatgagatatggcttacagcttctgagattcccctcttcacacagccaactagtgccccaccaccttcaaggccaccgccacctcttgcagttaagcaaaaacatggatcaagatcaacaagaaaagatgaacatctgcggcggtctaggaaaaacaatgaccatcaaaggagtttctcaaatcaggctggtgtttctacagtagatggactagaagattttaccatgggtaagtctcagaatgtgcatacgtttaatgaggaagaatttgagagaagtacggcagcagcggctatgaaagaggctatggataaagctgaggcaaagttcaaacatgccaaggaagtacgagagagagagcgtgatgcaaagcttagaaatagagaacaacaggaacgagataatgtaataaggtcgtatgcccaggatcgtgaggacaaagagagaaatgaaagactagaacaagaaagagagatgaagcaaaaagaggaaaaggaaagagagcaacgaagacttgaagaggagagagaacttgagcgacatagagaaagagaaagagctaggcaagcagtggagagggctacaaaggaggcacgagaaagggcagcttctgaagctcgtgcaaaagcagagagggaggcacggaaacgttcagaacgtgctgctgtgcaaagagcccaacaggaagcacgtgagagggcagcagcggatgctaaagatcgagcagagagggctactgcagaagcaaacgaaagggctgctactgaagctaaggagaaagctgctagtcaagcgagggatagggctgcagcagaaaaagctgctgtggagagagctcagcaagaagtgaggaagagagctgaacgagcagcagtggaaagggctgctgctgaggctcgggaaagacaggctgctgctgctgcagctgcaagagaaaaaacaagcaaaccagatgatctagaatccttatttggtatgggtgcccgagctaatagtgctccgaagcaaagggctccaactgtggattctatgtttgattctcaaacgcaaaatagagggacttccacttcgacatcaatgaaaaaggcatcatcaacagcaaatgttgctgatgacttgtctgcattatttggaggagctcctacgtcatcaaatgaatttcaagaagttgatggggagagcgaagaaagaagacgtgctaggttggaacggcatcaaagaactcgtgaacgagcggcaaaggctttggctgagaagaatgaacgtgacatgcagcaacaaagggaccaggctgagagacataggcttgcggaaacactggacttcgagattaagcgctgggctgctggaaaagaaggttctttggccagaatgtggatggcaacctgtatcccttaccgatttgatcactgctgctgctgttaaaaaagtgtacagaaaagcaacgttgtgtatccatcctgacaaggtgcagcaaaagggtgcaaatctccaacagaaatatatcgctgagaaggtttttgatctccttaaggaggcgtggaacaaattcaactctgaagagctcttctaaacagcctcatgactgaacatagcatgacccatcagggtctgcacaaggtactctgggaaggaactcacaagctggagcagcctgaggttggtcgggggggaaggggaaccatgaagcgaccaagcgaaacctgaactatggttataatcacagttgttttgtttcactcccccaattttctttcccaactatctgttgattggatgacaactcacagcgacatgtggcagctgcccaagctgaacctcatccagtaggtgcacattagtgccctgttttgtactgtttgtcctcggctgtatgtaccgtcagagctgaggcttctgaggtcagcgttgtgattttggattaggtacagggcttatttaccatggagagaatgaaaacaatagagatgacccataataatagattgattgattagagagatctatctatatttttatataaatatataggggagatttcgtggcttatgaaaacagaaccaaacgagatatttccttatctctgtaaccgtatataagggctggccggctatatctattatgtacatatctcac

SEQ ID NO: 220563 - DNA, 3595 bp, Zea Mays
tatgatatcgctcgcgcccttcgggcccgctcgccagtcaccggcgtgtgggagagaagagagagagaccacctcctccgctctctctctcttactctgactcgcccgctccggttcgccgctccgccatcgccggcgatcactccactccggcaacgccgcgtctccgacgatcccaccgacgccgggccccgcgaccccattcctccgattgcctcctcacgtcttgcggttctcccccggcgagggtacgtgctcttgcccagatccgccccgcctccccgcgccccgccacgcgcgccgatcggcaagctgcgtaggcttcgctaccgctgctgcgcgagcgagcgtcgcagccgtcgatccgcgcgcccgccatggacgacttccagggcctgctggcccgcgacttcggcctccgcccgcaggggaaggccgcgcccatgtcggccgcccgctcctcgagtccctccggatccgcctggaccaataccagatccgccgtggggtccgccgctccctccgcgccctcctacgacgagctcttcgggtccgccccgccgccgccgcccaaggccacgccgtcgctcgataacatcttcaactcgttcaaggagcccgcttccaccgcgccgccgcctaagccgaagcactcttccgcgccggtgttcgacaagccggtctacgatgatgacatcttcatcggggtccctggggttaagagctcctcggtgccctatgacgatgtgttcggtggaagccagagccgcgaggcgccccccgcattcgatgacctgctcggtggatttggtaagagctcacaggtgagggaagaggtggatgacaagaggaaaccagaggcacctacggctgtggcggctactgggttcgattatttgatcccaagctttggcgggagaagctccccgcggcaaagggatgctattggtgcaaaacaaaagaaagtttccatgtcgacatctaagcaatcagctagcttaagcgaccccttcgttgttctcgaaacaacttcatcctcagcccatccattcgcagatcccttggatgaatccggtaaagctgcaaaatatcaagggaaaaaccgtgaaagtactagcgttgggagcagtctgtttgaggattcaagcactttcaaccaggctccaaaatttgaacctttttttaccccagaggtggacaatggatcgaaagataggaatgagtcaagcagagcccaaaactcaaaccctgtacaggatttttctaaaagaaactcctcccaacaaccttctgttgaggattttgaaaatatctttcctaagtcacagtctgccagatattctgatgtccatgttgacattggctcagagaaatatagtgggaatggtataaatgatcagtcacctagatctgatgaatccgaagatgagatatggcttacagcttctgagattcccctcttcacacagccaactagtgccccaccaccttcaaggccaccgccacctcttgcagttaagcaaaaacatggatcaagatcaacaagaaaagatgaacatctgcggcggtctaggaaaaacaatgaccatcaaaggagtttctcaaatcaggctggtgtttctacagtagatggactagaagattttaccatgggtaagtctcagaatgtgcatacgtttaatgaggaagaatttgagagaagtacggcagcagcggctatgaaagaggctatggataaagctgaggcaaagttcaaacatgccaaggaagtacgagagagagagcgtgatgcaaagcttagaaatagagaacaacaggaacgagataatgtaataaggtcgtatgcccaggatcgtgaggacaaagagagaaatgaaagactagaacaagaaagagagatgaagcaaaaagaggaaaaggaaagagagcaacgaagacttgaagaggagagagaacttgagcgacatagagaaagagaaagagctaggcaagcagtggagagggctacaaaggaggcacgagaaagggcagcttctgaagctcgtgcaaaagcagagagggaggcacggaaacgttcagaacgtgctgctgtgcaaagagcccaacaggaagcacgtgagagggcagcagcggatgctaaagatcgagcagagagggctactgcagaagcaaacgaaagggctgctactgaagctaaggagaaagctgctagtcaagcgagggatagggctgcagcagaaaaagctgctgtggagagagctcagcaagaagtgaggaagagagctgaacgagcagcagtggaaagggctgctgctgaggctcgggaaagacaggctgctgctgctgcagctgcaagagaaaaaacaagcaaaccagatgatctagaatccttatttggtatgggtgcccgagctaatagtgctccgaagcaaagggctccaactgtggattctatgtttgattctcaaacgcaaaatagagggacttccacttcgacatcaatgaaaaaggcatcatcaacagcaaatgttgctgatgacttgtctgcattatttggaggagctcctacgtcatcaaatgaatttcaagaagttgatggggagagcgaagaaagaagacgtgctaggttggaacggcatcaaagaactcgtgaacgagcggcaaaggctttggctgagaagaatgaacgtgacatgcagcaacaaagggaccaggctgagagacataggcttgcggaaacactggacttcgagattaagcgctgggctgctggaaaagaaggcaatttgcgtgcattgctatcaactttacaatatgttctttggccagaatgtggatggcaacctgtatcccttaccgatttgatcactgctgctgctgttaaaaaagtgtacagaaaagcaacgttgtgtatccatcctgacaaggtgcagcaaaagggtgcaaatctccaacagaaatatatcgctgagaaggtttttgatctccttaaggaggcgtggaacaaattcaactctgaagagctcttctaaacagcctcatgactgaacatagcatgacccatcagggtctgcacaaggtactctgggaaggaactcacaagctggagcagcctgaggttggtcgggggggaaggggaaccatgaagcgaccaagcgaaacctgaactatggttataatcacagttgttttgtttcactcccccaattttctttcccaactatctgttgattggatgacaactcacagcgacatgtggcagctgcccaagctgaacctcatccagtaggtgcacattagtgccctgttttgtactgtttgtcctcggctgtatgtaccgtcagagctgaggcttctgaggtcagcgttgtgattttggattaggtacagggcttatttaccatggagagaatgaaaacaatagagatgacccataataatagattgattgattagagagatctatctatatttttatataaatatataggggagatttcgtggcttatgaaaacagaaccaaacgagatatttccttatctctgtaaccgtatataagggctggccggctatatctattatgtacatatctcac

SEQ ID NO: 220564 - DNA, 3229 bp, Zea Mays
gccagtcaccggcgtgtgggagagaagagagagagaccacctcctccgctctctctctcttactctgactcgcccgctccggttcgccgctccgccatcgccggcgatcactccactccggcaacgccgcgtctccgacgatcccaccgacgccgggccccgcgaccccattcctccgattgcctcctcacgtcttgcggttctcccccggcgagggtacgtgctcttgcccagatccgccccgcctccccgcgccccgccacgcgcgccgatcggcaagctgcgtaggcttcgctaccgctgctgcgcgagcgagcgtcgcagccgtcgatccgcgcgcccgccatggacgacttccagggcctgctggcccgcgacttcggcctccgcccgcaggggaaggccgcgcccatgtcggccgcccgctcctcgagtccctccggatccgcctggaccaataccagatccgccgtggggtccgccgctccctccgcgccctcctacgacgagctcttcgggtccgccccgccgccgccgcccaaggccacgccgtcgctcgataacatcttcaactcgttcaaggagcccgcttccaccgcgccgccgcctaagccgaagcactcttccgcgccggtgttcgacaagccggtctacgatgatgacatcttcatcggggtccctggggttaagagctcctcggtgccctatgacgatgtgttcggtggaagccagagccgcgaggcgccccccgcattcgatgacctgctcggtggatttggtaagagctcacaggtgagggaagaggtggatgacaagaggaaaccagaggcacctacggctgtggcggctactgggttcgattatttgatcccaagctttggcgggagaagctccccgcggcaaagggatgctattggtgcaaaacaaaagaaagtttccatgtcgacatctaagcaatcagctagcttaagcgaccccttcgttgttctcgaaacaacttcatcctcagcccatccattcgcagatcccttggatgaatccggtaaagctgcaaaatatcaagggaaaaaccgtgaaagtactagcgttgggagcagtctgtttgaggattcaagcactttcaaccaggctccaaaatttgaacctttttttaccccagaggtggacaatggatcgaaagataggaatgagtcaagcagagcccaaaactcaaaccctgtacaggatttttctaaaagaaactcctcccaacaaccttctgttgaggattttgaaaatatctttcctaagtcacagtctgccagatattctgatgtccatgttgacattggctcagagaaatatagtgggaatggtataaatgatcagtcacctagatctgatgaatccgaagatgagatatggcttacagcttctgagattcccctcttcacacagccaactagtgccccaccaccttcaaggccaccgccacctcttgcagttaagcaaaaacatggatcaagatcaacaagaaaagatgaacatctgcggcggtctaggaaaaacaatgaccatcaaaggagtttctcaaatcaggctggtgtttctacagtagatggactagaagattttaccatgggtaagtctcagaatgtgcatacgtttaatgaggaagaatttgagagaagtacggcagcagcggctatgaaagaggctatggataaagctgaggcaaagttcaaacatgccaaggaagtacgagagagagagcgtgatgcaaagcttagaaatagagaacaacaggaacgagataatgtaataaggtcgtatgcccaggatcgtgaggacaaagagagaaatgaaagactagaacaagaaagagagatgaagcaaaaagaggaaaaggaaagagagcaacgaagacttgaagaggagagagaacttgagcgacatagagaaagagaaagagctaggcaagcagtggagagggctacaaaggaggcacgagaaagggcagcttctgaagctcgtgcaaaagcagagagggaggcacggaaacgttcagaacgtgctgctgtgcaaagagcccaacaggaagcacgtgagagggcagcagcggatgctaaagatcgagcagagagggctactgcagaagcaaacgaaagggctgctactgaagctaaggagaaagctgctagtcaagcgagggatagggctgcagcagaaaaagctgctgtggagagagctcagcaagaagtgaggaagagagctgaacgagcagcagtggaaagggctgctgctgaggctcgggaaagacaggctgctgctgctgcagctgcaagagaaaaaacaagcaaaccagatgatctagaatccttatttggtatgggtgcccgagctaatagtgctccgaagcaaagggctccaactgtggattctatgtttgattctcaaacgcaaaatagagggacttccacttcgacatcaatgaaaaaggcatcatcaacagcaaatgttgctgatgacttgtctgcattatttggaggagctcctacgtcatcaaatgaatttcaagaagttgatggggagagcgaagaaagaagacgtgctaggttggaacggcatcaaagaactcgtgaacgagcggcaaaggctttggctgagaagaatgaacgtgacatgcagcaacaaagggaccaggctgagagacataggcttgcggaaacactggacttcgagattaagcgctgggctgctggaaaagaaggcaatttgcgtgcattgctatcaactttacaatatgttctttggccagaatgtggatggcaacctgtatcccttaccgatttgatcactgctgctgctgttaaaaaagtgtacagaaaagcaacgttgtgtatccatcctgacaaggtgcagcaaaagggtgcaaatctccaacagaaatatatcgctgagaaggtttttgatctccttaagttgaaatatccaactaagagcatctacaagagtttccaaaacccacttttgatctagattttttgtcaagattgaaaaaaaaactgctctccaaccactccctgtctcaactcccaatctttccgcacttggaaaaaccgacctcgctgcatggatatgtacgcgtgcataacttcaccccaatccgaaggtggaaagaggtgggaaagaataagtatgacagggtttctgatgcaaatatggaagacagaaggtatagaagtggttg

SEQ ID NO: 220565 - DNA, 3358 bp, Zea Mays
gccagtcaccggcgtgtgggagagaagagagagagaccacctcctccgctctctctctcttactctgactcgcccgctccggttcgccgctccgccatcgccggcgatcactccactccggcaacgccgcgtctccgacgatcccaccgacgccgggccccgcgaccccattcctccgattgcctcctcacgtcttgcggttctcccccggcgagggtacgtgctcttgcccagatccgccccgcctccccgcgccccgccacgcgcgccgatcggcaagctgcgtaggcttcgctaccgctgctgcgcgagcgagcgtcgcagccgtcgatccgcgcgcccgccatggacgacttccagggcctgctggcccgcgacttcggcctccgcccgcaggggaaggccgcgcccatgtcggccgcccgctcctcgagtccctccggatccgcctggaccaataccagatccgccgtggggtccgccgctccctccgcgccctcctacgacgagctcttcgggtccgccccgccgccgccgcccaaggccacgccgtcgctcgataacatcttcaactcgttcaaggagcccgcttccaccgcgccgccgcctaagccgaagcactcttccgcgccggtgttcgacaagccggtctacgatgatgacatcttcatcggggtccctggggttaagagctcctcggtgccctatgacgatgtgttcggtggaagccagagccgcgaggcgccccccgcattcgatgacctgctcggtggatttggtaagagctcacaggtgagggaagaggtggatgacaagaggaaaccagaggcacctacggctgtggcggctactgggttcgattatttgatcccaagctttggcgggagaagctccccgcggcaaagggatgctattggtgcaaaacaaaagaaagtttccatgtcgacatctaagcaatcagctagcttaagcgaccccttcgttgttctcgaaacaacttcatcctcagcccatccattcgcagatcccttggatgaatccggtaaagctgcaaaatatcaagggaaaaaccgtgaaagtactagcgttgggagcagtctgtttgaggattcaagcactttcaaccaggctccaaaatttgaacctttttttaccccagaggtggacaatggatcgaaagataggaatgagtcaagcagagcccaaaactcaaaccctgtacaggatttttctaaaagaaactcctcccaacaaccttctgttgaggattttgaaaatatctttcctaagtcacagtctgccagatattctgatgtccatgttgacattggctcagagaaatatagtgggaatggtataaatgatcagtcacctagatctgatgaatccgaagatgagatatggcttacagcttctgagattcccctcttcacacagccaactagtgccccaccaccttcaaggccaccgccacctcttgcagttaagcaaaaacatggatcaagatcaacaagaaaagatgaacatctgcggcggtctaggaaaaacaatgaccatcaaaggagtttctcaaatcaggctggtgtttctacagtagatggactagaagattttaccatgggtaagtctcagaatgtgcatacgtttaatgaggaagaatttgagagaagtacggcagcagcggctatgaaagaggctatggataaagctgaggcaaagttcaaacatgccaaggaagtacgagagagagagcgtgatgcaaagcttagaaatagagaacaacaggaacgagataatgtaataaggtcgtatgcccaggatcgtgaggacaaagagagaaatgaaagactagaacaagaaagagagatgaagcaaaaagaggaaaaggaaagagagcaacgaagacttgaagaggagagagaacttgagcgacatagagaaagagaaagagctaggcaagcagtggagagggctacaaaggaggcacgagaaagggcagcttctgaagctcgtgcaaaagcagagagggaggcacggaaacgttcagaacgtgctgctgtgcaaagagcccaacaggaagcacgtgagagggcagcagcggatgctaaagatcgagcagagagggctactgcagaagcaaacgaaagggctgctactgaagctaaggagaaagctgctagtcaagcgagggatagggctgcagcagaaaaagctgctgtggagagagctcagcaagaagtgaggaagagagctgaacgagcagcagtggaaagggctgctgctgaggctcgggaaagacaggctgctgctgctgcagctgcaagagaaaaaacaagcaaaccagatgatctagaatccttatttggtatgggtgcccgagctaatagtgctccgaagcaaagggctccaactgtggattctatgtttgattctcaaacgcaaaatagagggacttccacttcgacatcaatgaaaaaggcatcatcaacagcaaatgttgctgatgacttgtctgcattatttggaggagctcctacgtcatcaaatgaatttcaagaagttgatggggagagcgaagaaagaagacgtgctaggttggaacggcatcaaagaactcgtgaacgagcggcaaaggctttggctgagaagaatgaacgtgacatgcagcaacaaagggaccaggctgagagacataggcttgcggaaacactggacttcgagattaagcgctgggctgctggaaaagaaggcaatttgcgtgcattgctatcaactttacaatatgttctttggccagaatgtggatggcaacctgtatcccttaccgatttgatcactgctgctgctgttaaaaaagtgtacagaaaagcaacgttgtgtatccatcctgacaaggtgcagcaaaagggtgcaaatctccaacagaaatatatcgctgagaaggtttttgatctccttaaggtgtgtattgccctcaaaacatttgttgcagcttactgcttacatgccaacatggtttcaagacagcaaaaacttctctttttctgacatcaagaaaacatatgagctagataggtgtcacctgttttgctgaacacaggtcttttcacatttactgttgagcttctcttaatatttccaattattgcatgcgtggtccatggaagcaaagttggggtcggggtgccagtgcctggatgatacatggaaagtactgagcgtttatagtttgatgttatctttggcacatgccagaacagaatgtttattgcaacaatcattgtgtcagcttggaccaccatctggtgcctgggaagtacctgcctacattcagatcaatgctaatcttgataataac

SEQ ID NO: 220566 - DNA, 1009 bp, Zea Mays
caacgccacccgagccttcccgtcccgaaaccaaagttcccgtggtcgtcccacactcccacccctaccaacgctctgcgccaacgaacgcgtccgcaagtcaaaccaggcccggagccaccagcaaccaaccgagcgcatggaggccgcggcggcgaccgcgctcccgttcgcggcggccgtccccactgcctggagggtgcgcgcgagcccgcggacgcggcggcgctccgtggcggcgaagctggagcgcgggctcggcaagggggttcccaccaccaactacgtggtgccgctcgacaaggccaccgggatgacgcgcccgctcgtcgagatcctgcgggacctcaacaagcgcgtccccgacaagatcatcgaccccgacactaacaccgtcaactggtaccatgccaacagaatgcttagcttttacgcaccaggttggtgtggagaagttcgtgatgttatctattctgagaatggaactgtaaccgtggtatatcgagtgatacttaaaggaactgatggagagagatgccacgggcacagcacagttacatgaggggcgcagggaagatgctgttgcagccgcagaggaagctgcattctgcaaagcctgcgcacggttcggttttggcctgtacctgtaccaccaggatgattctcattacgacgaccacttccattgaggctcagtctgcaaaagagctgttcataagctgcaacatgcgttggatatgcctctcgaaaaacttcgcatctagaatcaatttttgctctttgcgtagtatcatactcataacacaaagaagtgaacctatgtagatgctattcgaaaccttctttttattaatattagaattcttattaatattattgtataattatttttttaatgtatatgtgtcggacacaatctattgattgatctatattctggcagtctactatatcatagtctctatcactagtatttataataactcaggagaagttttgttgaaatttt

SEQ ID NO: 220567 - DNA, 2032 bp, Zea Mays
atgaaggggcggctgctgctgctgctgtgggcgtgggcggccgccacatgggtgtccgtcagcgccgtgactcgcctcggcagaggcgtcgccggagagcagccgctgtccaggatcgccgtcgagagggtggtcctcgccgtcaacgacgcggcgtacgtcaaggcgtcccctctggttctcgggcacaagggcgagaacagtgagtgggcggacgtggagttcttccacccgaacccgtccgacgacgactggatcggcgtcttctctcccgcaaatttcagtgatgcgatctgtgaggctgagaatacgggtaccccagtgctgtgcactgcacctatcaagtaccagtttgcaaacttcgaaaacgatggctataacaagactggaaagggctacctcaagcttcagttgatcaaccagagggaagatttctcattcgcgcttttctcaggtggtctctcaaagcccaagctgatttctgtctccaacaaggtagcctttgctaatccaaaggcaccagtgtacccgcgtttggcgcaagggaagtcttggaatgaaatgacagtcacctggacaagcggctacgatattacagaagcagttccttttgttgagtggggtgagaaaggaggtcgacgacttcttgctccagctggaacattaacatttgaccgaaatagcatgtgtggtatacttacaggcttggccataggctgatgaatgggacccgcgtctggagcaagtcatacagcttcaaagcgtcgccttaccctgggcaagattctttgcagcgagttgtcgtatttggggacatgggaaaggcagaggctgatggttcgaacgagttcagcgacttccagcccggttcgttgaatactacttaccagatcatcagggacctcgaagacatcgacatggtggtccacattggggacatctgctacgcggatggctacttgtctcagtgggatcagttcactgcacagatcgaaccgattgcttcaagggtgccatacatgattgcggtaaccatgagagggattggcctggcactggttcattctacgggaaccttgactccggtggagagtgcggcgtccctgcccaaactgtgttctacactccagctgagaaccgtgcaaaattctggtacgcgacggactacggcatgttcaggttctgcatcgcaaacacggaagaggactggaggccggggaccgagcagtacaagttcatcgagcaatgcctgtcgtcggtcgacaggcagaagcagccgtggctcatcttcctcgcgcaccgcgttctcggctactcctcctgcacctactacgaatcggagggcacgttcgaggagcccatggggcgggaagcgctgcaggagctctggcagaagtacaaggtggacatcgccttctatggccacgtccacagctacgaaaggacatgcccggtctaccagtctcagtgcgtcgtcgatggatccgaccactacagcggcccgttccaggcgacgacgcacgtcgttgtcggcggcgcaggagccagcattctcgattctgagttcaccacctcgaagatccagtggagccacttcaccgacttcgaccacgggttcgtcaagctcacggccctcaaccattcctccctgctgttcgagtacaagaagagccgcgacggcaacgtgtatgaccatttcacaatctcacgcgactaccgggacatcctcgcttgctccatcgacaactgcccccggagcacactggcttcctgaagtcccacagtagttgcagaccagaaattttagttcgtagcttttctgtactgcaccgaccaataaatgaggccttttcttttttaataatatataattatatgcatgcactattttcttgtacctatagtcataaatgttagaagccaatttcgatagcaatttaatctaggaaaaaattaagcatgggagatcaagagatagaaaacttatcgtcatcatatgcataactctagaagttatgatggaaaactttcg

SEQ ID NO: 220568 - DNA, 2016 bp, Zea Mays
atgaaggggcggctgctgctgctgctgtgggcgtgggcggccgccacatgggtgtccgtcagcgccgtgactcgcctcggcagaggcgtcgccggagagcagccgctgtccaggatcgccgtcgagagggtggtcctcgccgtcaacgacgcggcgtacgtcaaggcgtcccctctggttctcgggcacaagggcgagaacagtgagtgggcggacgtggagttcttccacccgaacccgtccgacgacgactggatcggcgtcttctctcccgcaaatttcagtgatgcgatctgtgaggctgagaatacgggtaccccagtgctgtgcactgcacctatcaagtaccagtttgcaaacttcgaaaacgatggctataacaagactggaaagggctacctcaagcttcagttgatcaaccagagggaagatttctcattcgcgcttttctcaggtggtctctcaaagcccaagctgatttctgtctccaacaaggtagcctttgctaatccaaaggcaccagtgtacccgcgtttggcgcaagggaagtcttggaatgaaatgacagtcacctggacaagcggctacgatattacagaagcagttccttttgttgagtggggtgagaaaggaggtcgacgacttcttgctccagctggaacattaacatttgaccgaaatagcatgtgtggtatacttacaggcttggccataggctgatgaatgggacccgcgtctggagcaagtcatacagcttcaaagcgtcgccttaccctgggcaagattctttgcagcgagttgtcgtatttggggacatgggaaaggcagaggctgatggttcgaacgagttcagcgacttccagcccggttcgttgaatactacttaccagatcatcagggacctcgaagacatcgacatggtggtccacattggggacatctgctacgcggatggctacttgtctcagtgggatcagttcactgcacagatcgaaccgattgcttcaaggcggtaaccatgagagggattggcctggcactggttcattctacgggaaccttgactccggtggagagtgcggcgtccctgcccaaactgtgttctacactccagctgagaaccgtgcaaaattctggtacgcgacggactacggcatgttcaggttctgcatcgcaaacacggaagaggactggaggccggggaccgagcagtacaagttcatcgagcaatgcctgtcgtcggtcgacaggcagaagcagccgtggctcatcttcctcgcgcaccgcgttctcggctactcctcctgcacctactacgaatcggagggcacgttcgaggagcccatggggcgggaagcgctgcaggagctctggcagaagtacaaggtggacatcgccttctatggccacgtccacagctacgaaaggacatgcccggtctaccagtctcagtgcgtcgtcgatggatccgaccactacagcggcccgttccaggcgacgacgcacgtcgttgtcggcggcgcaggagccagcattctcgattctgagttcaccacctcgaagatccagtggagccacttcaccgacttcgaccacgggttcgtcaagctcacggccctcaaccattcctccctgctgttcgagtacaagaagagccgcgacggcaacgtgtatgaccatttcacaatctcacgcgactaccgggacatcctcgcttgctccatcgacaactgcccccggagcacactggcttcctgaagtcccacagtagttgcagaccagaaattttagttcgtagcttttctgtactgcaccgaccaataaatgaggccttttcttttttaataatatataattatatgcatgcactattttcttgtacctatagtcataaatgttagaagccaatttcgatagcaatttaatctaggaaaaaattaagcatgggagatcaagagatagaaaacttatcgtcatcatatgcataactctagaagttatgatggaaaactttcg

SEQ ID NO: 220569 - DNA, 1742 bp, Zea Mays
aaattataatttaggagggtcattctaacgtcgtcttatatcagataaaatggttttcgcgtacccattagttcatgagcgctcttagttcattaccatatgtactcgtgttggtgcgttcgccccgtagcagccgtcgggcttctctgccttgtacttgcgatcgagtccagacctgcggagatagatctactagtcgaccgatccggatccttcccttccgtctcacgctgcttgctcgggacgggaaccggaggtggggttgcgatggcgctgcagtacgtggaggcgcagcggcagttgcgcccggacctctccgactggtacgcctccctcgccgacctctaccagcggaagctatggcaccagctcaccctcaagctcgaccaattcttacagctccagaccggagacactatcattcagctctacaacaatttcattgtcgactttgagaccaagattaatctgctcaaacttgcccattttgcggtgataacttctcgccagtaccctgataaggatgctgcaattactttcttagagggggtgatcacaaagctgcgtgagacaagggagtcacggatcaatgaaccaattctctatgtgaagatgcaaattgcagctattaatcttgagaaaggaaacaaaaaagagtgcaagaatttgttggaagatgggaaaaccactctggatagtatgactgatgtcgatcccacagttcatgctagcttttactggatatcatctcaataccacaaggcctgccaagaatttgcagagttctataagaatgctcttctctatctggcctacacaactgtggagtctctatctgagtcattcaagctagacttggcttttgatctatctctagcagccttgctgggtgataacatttacaactttggggagttgttagctcacccgattatcaatagtcttattggaactaaggtggagtgggtttatcatatgttacaagcattcaacagcggcaaccttgccctctaccaagaactttgcagggttcacaatgctgctcttactgcacaaccagctttggtgcagaatgagcggaagctgcttgagaaaatcaatattctttgtctgatggagataatctttagtcggccatctgaagatagaactattccattaagtgttattgctgagcggactaagctttcaatcagtgacgtggaatgtcttcttatgaagagcctctcggttcatcttattgagggaataattgatgaagtggacagtacagttcacgtatcatgggtccagcctagagtgcttggaattccacaggttaaggctttgcgcgaccgcctggatgcctgggttggaaaggtgcataccacattgctttcagttgaggcggaaacacctgatcttgttgctgtgtaatttcacagctgttacacttccgcgagaggcttggtcagcaaggtcccatttgcaaaatgacatggatggttagaactgcacgcagtgtcacggagacgggaccaatggattgaaaatttcatactagtagggtgttactagtagaacacgatgcaggagaatcttgctggaacatgagttgtgcctgatgtttgcatgttgcactgcgataagacgtggatcatcattaacatattagctgtttttcagtgcacatggctcttaccgatcgctaatgttggtcatctgttaaatctgttaaagctactgcatgaactataccaggg

SEQ ID NO: 220570 - DNA, 1599 bp, Zea Mays
atgttcctatacggagcaacaccgacaggcgggggccattttccagtccagttcctattcctccacaatattcagttccgctggatcaacggacgtgaactcaccctcctgcgagaacaagccgctggcctcgacaaccttcctctgcgggatgtggctgatcttgagccggtcgtcatcggtcagctcccagtcgaatatctcgaggttctgcttcagcctctccctgttgtagctcttgacgatgcacgtcactccctgctcatgtatccatcgcagcgccacctgtgccacggtcttccccctcgccctggctatctccgcgagcacctccgagtcgagcacggcgttgccccgcccgtcccagttctgccctcccagcggcgagtaggcggcgacgtggacgccccggtcggcgcagtacgcccgcagcgtccgctgctgccacgccgggttcagctccacctggttcaccgcgggcgggaccgcggcgatggccaggaccttgtccaggtgcctggtggtgaagttgctgacgccgatcgccctggcgaggcccagccgctggcactcctccatggcgcgccacacgcccgccacgtccagcggcaccgcgtcctccttcctgttcgggaacttgggcggcccgccggccggcctgaggcacaccggccagtggatcagggacggcagcacgaggtccgcgtgggtctgcgaacaccacagcttggacgtgacgaagagctcctcccgggacctcaggaggccgcgccgcagcgcctcggccacggcgtcgccgagcggcttctcggtgccgtacaggaaggccgtgtcgaagtggcggaaccccacctcgatggccgccagcacggcgtccctgacggcctcgtgcaccacggggaacgacgccgtgcccatgcccaccatcggcatcggctttccgttgcccgaccgcagggtcacctccggcaccgccgccgccgtcgtccccgtggatgccatgctgatgcggtcaagtatggcgcgctgcagttggaggtgcgtctagtctaggtgtgcggtgcggaacagggagggacaggggtgcgcgagccagagccttgagcccgtgctggtatgtggacaggcgacgtgtgagctctcggtacttcatcgcgttggcattcagcagatgggacccgacggggacttttaccatcggagtagtgttttgacgtcaccagttacgcttccacaggtgataacagtgtgcgtttaatttggagctcttgccgtggcttgctttgtctgcgcaaaagaaaaccagcgtttggtgaaagggagaacattttggatcttcccgaggtttccagggcttgacaacccctccacgaggatgaaatcggccacacaattgccggacgaccgcaagacaaagcttgggcctagacggcttcgtatgcccttttttttcttcttcttcttcaagtaacgatgctcgtagatcataatgccaactacagcaacgccgtgcataaagacatgtataacaccgttttgtaacgtagatgtactgtcttcaaaaagaagtttaaaataggaaacaaaataattgagtga

SEQ ID NO: 220571 - DNA, 1054 bp, Zea Mays
ttcctccctctcctctctctctgtctgagccgagggctttggcgctcccccccccccccccccccccctctctctctctctctctctcgcacgggcccgcctgcctatcccactgcccggtccaccgccgcaaactctgcccgcccgcgcgcgccccaccccgccgatcgcggtgagcccggactccgccgccgccgcttcgctctaccctgaccagccctagatctgtgcgggatccgccgccatgttctggcgcatgaccggcctctccgcggcctcgcccgtggatacaattctggacaaggagaactttacattggaagagcttcttgatgaggatgaaatcattcaggagtgcaaagcgctgaatacccgactcataaatttcttgcgagataaggcccaagtgtcgcaattacttcgttacattgtggaagaagttcctgaggattcagagaagaaacaatctttcaagtttccttttatcgcttgtgagatttttgcttgtgaaattgacattattttgagaaccttggtagaggatgttgagttaatggatttgcttttttcatttataaaacctgaccatccgcatagcacactgttagctggttacttcagtaaggtggttatatgtttgatgcttcgaaagactgctcctcttatgaattatgttcaggagcatccagatattgttgtccagcttgtcgacctcattggtatcacatcaataatggaggtgttggtgagattgattggtgctgatgaaaccatatacttgaatttcgcggatacattgcattggttagagaatacatatgtactggaaatgattgtggataaatttagctcatcagactctcctgaagtgcatgcaaatgctgctgaaattctttctgcggtaactcgatgcgcccctcctgctcttgctgcaaaaatatgcagtccaaggtgtgaggagatcttgggcaaaaggaaacccataggcaagatctcctcaaagatggaaacccccaatcaggatcctatactaagggcccgtttggcagcatga

SEQ ID NO: 220572 - DNA, 1511 bp, Zea Mays
atgggcatggtgagctgcctcaagctttctgtcgctgtgctgcggttaagggtgccatatatgtgttgcggatgccagtggttgcacttcttatggatgaggaaaagaaacattttgtaggcgctagattggtatctggtcaggatattttatgccaacaattgataattgatccgtcttataagactatcttggatgtcccatttgatggttcagattctcattttccaagaaaagttgtgagaggggtatgcataattagcaagtccgtgaaacagggatcatcaaatgttctggttattttccctccaaaatcactagaagagcagcaagttacagctgttcgacttcttcagttgagcagcaatctcgcagtatgccctcctgggatgtttatgtcatatctgtctactccctgtaccgatgtctcagtcggaaagcaatgcataaaaaaagcaatagatgctctttacagtcctcaggcttcagatggttcagaagaccatcttgagacagccagtgaaagcaccgaggatgtgaagccaacactaatctggagttgtgtgtatgttcaagagatcacacagggaacagctggtcctttattgtcatgccctatgcccgatgaatacctggactacagaaacatactgggatcaacaaaaaagttattcgcaagtatctatgctgatgaagagttcttgcctaaaaagtcagctcctgtatatgccaatgatgactctgattctgcagagtaaaaccatctttctagagggctttatcatttggttggagaacgccgtcagcccgtcactgaaattccgagggcaaaagagcgtcgcaaggggagcctgtggggcttgatgagcagttgtgctggatttccaatgtacaggtgcccactggctggccatacattgcattggtagggaacagttggagggagacatgctcggtgcaaatggccttgtatggattggcaaacattgttgtacgcaagatcacagcaaatacgggatacaaaatgctgaacgctcgatttggtcccccaatttgaacgacagagtgtagaagggtattctgaagacttactagttaagtggctgagggctgatttagcgacgagggaaataaaggtgatccatgaggaaaatagcaatgaaattcctcccccgtgtggccatgtctccatgtggtcattaaaccagccctgaatgtatttttggtcggccaaagcggtgtgtatagtatctttctttgtttttggttgtttcaggtgaggttttagtcttcagctcgcagaattgggcgatattattacccggcctatagtattttttttcttctcgcaaccattttttgtttgttgatgagttctgagagtgcattgtttagttttctacaagaacaatcgtaggacgacacgggaacatgggactcactgctgaaggtcggaaggataagcttcttatcttgcccaaccagattccacgtcactatgtcagtcacgg

SEQ ID NO: 220573 - DNA, 1454 bp, Zea Mays
gttaagggtgccatatatgtgttgcggatgccagtggttgcacttcttatggatgagaaacattttgtaggcgctagattggtatctggtcaggatattttatgccaacaattgataattgatccgtcttataagactatcttggatgtcccatttgatggttcagattctcattttccaagaaaagttgtgagaggggtatgcataattagcaagtccgtgaaacagggatcatcaaatgttctggttattttccctccaaaatcactagaagagcagcaagttacagctgttcgacttcttcagttgagcagcaatctcgcagtatgccctcctgggatgtttatgtcatatctgtctactccctgtaccgatgtctcagtcggaaagcaatgcataaaaaaagcaatagatgctctttacagtcctcaggcttcagatggttcagaagaccatcttgagacagccagtgaaagcaccgaggatgtgaagccaacactaatctggagttgtgtgtatgttcaagagatcacacagctggtcctttattgtcatgccctatgcccgatgaatacctggactacagaaacatactgggatcaacaaaaaagttattcgcaagtatctatgctgatgaagagttcttgcctaaaaagtcagctcctgtatatgccaatgatgactctgattctgcagagtaaaaccatctttctagagggctttatcatttggttggagaacgccgtcagcccgtcactgaaattccgagggcaaaagagcgtcgcaaggggagcctgtggggcttgatgagcagttgtgctggatttccaatgtacaggtgcccactggctggccatacattgcattggtagggaacagttggagggagacatgctcggtgcaaatggccttgtatggattggcaaacattgttgtacgcaagatcacagcaaatacgggatacaaaatgctgaacgctcgatttggtcccccaatttgaacgacagagtgtagaagggtattctgaagacttactagttaagtggctgagggctgatttagcgacgagggaaataaaggtgatccatgaggaaaatagcaatgaaattcctcccccgtgtggccatgtctccatgtggtcattaaaccagccctgaatgtatttttggtcggccaaagcggtgtgtatagtatctttctttgtttttggttgtttcaggtgaggttttagtcttcagctcgcagaattgggcgatattattacccggcctatagtattttttttcttctcgcaaccattttttgtttgttgatgagttctgagagtgcattgtttagttttctacaagaacaatcgtaggacgacacgggaacatgggactcactgctgaaggtcggaaggataagcttcttatcttgcccaaccagattccacgtcactatgtcagtcacgg

SEQ ID NO: 220574 - DNA, 491 bp, Zea Mays
cgcctcagctctgatggcataggagaagtggcggactttgttgaaggagctgaacgtggacgtctggaggattattagacaatagacacgccaagtgaaagtggctttaagattttgtcaaggagaggaagctacataacatggaggacttgctttgatgttctgcttaggttctatttgggactgatctaactttaaaaaattaatttggtggagctggcatagcaggttattaggtttattaggtgatccagaaaatcctagacctgcagaacctttagaaaatatcttgataagtcattttatttatattttagattaaaaatatatttaaatttatattataaactacaaccccaagctaaagttggaacatggagcaatcataaacacccctttaattcttgagggttggattttttttggatgtttgtctctagctttcttgccactgtgttgtgcttccctgataccgaggaggaacacacgtt

SEQ ID NO: 220575 - DNA, 1261 bp, Zea Mays
gccttgtctaccgttcaagcccaaacgaaaaaaaaaacaaaaaaaaactcaaaccatagcttcgtaaaccctcgccgccgccgccgccgccgccgccgatgacatcggaggagcacccctcgtctgcgtcctcggacggcagcaccaccatcggctccgacgaacatcttgacccctcgccatcaccttcgacgtccttcgactctcctcctgaatccgacgactccgccgcctcctcgctgctctcagacggctcttcagagtccgagcccatcattttcaagaaaccccgcccacccgtgcgctcgtggccggcctccgacgagatcgcgatcctcgagaccgtcgcgtcgcaccggcagaagcacgggcgacttcccctggcagacgacctcgccgccgcggtgcggggccgcctcagcgtgggggaccgcctcagcgccgcgcagatcaccaggcggctgtgcgcgctccgcaaccggtacgacaacaccgttatccgcctcaaacgcggcacgatcccggcgaaggacagcgacgtcaccatctacaggctctccaagctcatctgggagggcacgcgcagggggaggatagagaagaagacccgtgtgcccgacgcgcgcaatgacccaagagggttcgacgatctggccgagctgtacccttgcctctccgcggaggtggaggcgaagctgaagaggcagcggatggcggagaccagggcgagcggaaagcttgaccggctgaggtcgagagtcgccaatgcgcttcagggatttaacaagtgaaatgaagtggcggactttgttgaaggagctgaacgtggacgtctggaggattattagacaatagacacgccaagtgaaagtggctttaagattttgtcaaggagaggaagctacataacatggaggacttgctttgatgttctgcttaggttctatttgggactgatctaactttaaaaaattaatttggtggagctggcatagcaggttattaggtttattaggtgatccagaaaatcctagacctgcagaacctttagaaaatatcttgataagtcattttatttatattttagattaaaaatatatttaaatttatattataaactacaaccccaagctaaagttggaacatggagcaatcataaacacccctttaattcttgagggttggattttttttggatgtttgtctctagctttcttgccactgtgttgtgcttccctgataccgaggaggaacacacgtt

SEQ ID NO: 220576 - DNA, 1043 bp, Zea Mays
ggcgacgcaatacctggctggctggctccctgctagccctgggccctggcgacctgcttctgcttgcgtgcctggaaggctggaactcagctcaaccacctctttggctctatccccgtttggctcaagcagctgcccagccttgtctaccgttcaagcccaaacgaaaaaaaaaacaaaaaaaaactcaaaccatagcttcgtaaaccctcgccgccgccgccgccgccgccgccgatgacatcggaggagcacccctcgtctgcgtcctcggacggcagcaccaccatcggctccgacgaacatcttgacccctcgccatcaccttcgacgtccttcgactctcctcctgaatccgacgactccgccgcctcctcgctgctctcagacggctcttcagagtccgagcccatcattttcaagaaaccccgcccacccgtgcgctcgtggccggcctccgacgagatcgcgatcctcgagaccgtcgcgtcgcaccggcagaagcacgggcgacttcccctggcagacgacctcgccgccgcggtgcggggccgcctcagcgtgggggaccgcctcagcgccgcgcagatcaccaggcggctgtgcgcgctccgcaaccggtacgacaacaccgttatccgcctcaaacgcggcacgatcccggcgaaggacagcgacgtcaccatctacaggctctccaagctcatctgggagggcacgcgcagggggaggatagagaagaagacccgtgtgcccgacgcgcgcaatgacccaagagggttcgacgatctggccgagctgtacccttgcctctccgcggaggtggaggcgattggtgcgaggtgcggctacggggcgctgaagagggcattcgggcgcatcggtgacgacacggcggcgcggctggaggcgaagctgaagaggcagcggatggcggagaccagggcgagcggaaagcttgaccggctgaggtcgagagtcgccaatgcgcttcagggatttaacaagtgaaatggaatagctcaaagtatgatgatcagtag

SEQ ID NO: 220577 - DNA, 3911 bp, Zea Mays
gtcagtctgactgaggtccccgggtccgcgcagcaccagtgccccaccccatttccgcctacggcactacggcagtcggcagcagacggaccagaggctctagcacagtgccgcctcccacctcctgtcgtctcggtctcgctttaaaatcccgcgacgccgtggtcgctcgcctcttttggagcaggccatgtgaagcctctgaccccccgataccttccccttcctcccgtgctgctgctgcaggacagcgcggcgttcgccacacgcggcggcgaagcttcgcgagatccgtgcgcgatgtcgtcgcggccgtcgtcgtcgtcctcgcggcggagtagctcgccgttctccgcggggcaccgccgcccgcccaccgcgtcctcctcctcctcgagctcgtacttcagctccggccgcctcattccgcgctcgtcctcgtcctccgtcagctccagcttctacggcggcgggggtgggggcagcacgaggtccaccaccccgagccgccgcagctcatctgtagcaccggcactgccgccgtcgccagtgccgttcccgagcgcggacgagctcgtcatcgaagacacctcccgatccggcgacagcatctccgtcaccatccgcttccgaccgctcagcgagcgcgagttccagcgcggcgacgagatctcgtggtatccagatggggaccggcttgtgcggtgcgattacaacccgccaacggcttatgcttatgatagagtttttgggccttcgacaagcaccgaggctgtctatgatgttgcagcccgccctgttgtaaaaggtgctatggagggcataaacgggacagtttttgcctatggcgtcacaagtagtgggaagacccacacaatgcatggtgaccagaattgtcctggaataatcccactagccatcaaggatgtcttcagcatgatccaagatagtcctggaagagaatttttgcttcgtgtgtcgtaccttgaaatctataacgaggttataaatgatctacttgatcctactggccaaaatttgcgtgtgcgggaggatgcacaggggaacctatgtagaaggaataaaagaagaagtagttctgtcaccaggacacgctctttcatttattgcagccggtgaagaacatcggcatgttggctctaacaacttcaacttatttagcagccgaagtcatactattttcacattgatgattgaaagcagcgcccgtggtgatgagtatgatggggccatgtattcacagcttaatttgattgatctagctggttctgagagctccaagacagagactacagggttaagaagaagggaagggtcatatattaataagagcctcttaactcttggaacagtcattggaaagctcagtgaagggagggcaacacatataccctatcgtgattctaagttgacccgtctactacagtcatcattgagtggccatggtcatgtctcactaatttgcacaattactccagcatcaagtaacatggaagaaacacataatacattgaagtttgcaagcagagcaaaacgtgttgaaatttacgcctctcgcaaccggataattgatgagaaatcattgatcaagaagtatcagaaagaaatatcctctctaaagcaagaactcgatcagctaaggagaggaatgattggtggtgccagccgggaagaaattttgagtttacgtcagcagttggaggcgggtcaggtcaagatgcagtctcgtctggaggaggaagaggaggcgaaagctgctctaatgagcaggatacaacgtttgaccaagttaatacttgtttccaccaaaaacaatattcctgccttgacagatgggcatcagagtcacaattctctcagtgagcaagataagttaatcacttcacaagatagttctacacttgtccaaactgagggcaccacaaaagaccccctatcatccgctttgccagactccttagatgagatcaatcagttaagatctggcaccggtgaacaatcttcagttaccggttctgcaacagattcaatgcaggtgggattcacggcatcagatcatatggatctactgattgaacaaattaagatgcttgctggggaggtcgcatttggtaccagttcactgaaaagactaatcgaacagtccatagatgatcctgaagcaacaaaggaccaaatcgagaatttagagcgtgaaatccagcaaaagaggagacatatgcgagccctggaaaaacaaatcatggaaagtggcgaggcatcagttgctaatgcatccatgatggatatgcagcagactatcacgaaactaacagcgcagtgcagtgagaaggctttcgacttagagttaaagtcagctgataatcgtgtactccaggagcagctacatcagaagaatttggaaatctacgatttacaagaaaaagttcttcgcgttgagcaacaactctcagcaaaagtggatatatcccctgagaaggaaactgattgtgcacagcaggagactattgatttgaaatctaaacttcagtccaaggaagctgaaatcgaaaagctgaaatatgagcatctgaaaatttctgaggaacattgcgatttaatcaaccagaaccataaattaagtgaggaagctgcatatgcaaaagaattggcttcttcggctgccgtcgaactcaagaatttggctgaagaagttacaaagctatctgtgctaaatgcaaagcaggcgaaggagttattagttgctcaggagatggcacattcaagggttcatggtagaaagggtcgtacagctagtaggggtagggatgaggttgggacatggagcctcgatttggaggacatgaaaatggagctacaggccagaagacagagggaggctgctttggaagctgctttggcagagaaggagcttctcgaagaagagtacaagaaaaagtttgacgaggcaaagaaaaaggaactatctctggagaatgatctagcaggcatgtgggttcttgttgctaagttgaaaagaggggctttaggcatatctgatttgaatgttgacgaccgaactgttaacctagctgatataactaacagcacaaaggagaacaaaggtggaaagaattttgctctagttgagaagcaagcatcagaagattctgtgaagtcactgagttcagaagaacatacaagtccggagtttgaaccacttcttgttcgtctgaaggctaaaattcaggagatgaaggaaaaggacattgatcccctgaccgataaagatgggaactcacatgtctgcaaagtttgtttcgaatctgcagccgctgcagtattgcttccttgccggcatttctgcttgtgcaagccttgctcgcttgcctgctcggagtgccctctgtgccgcacaagaatcgcagacaggataatcaccttcacgtgagctgcgttctagcttcaggtcattctgaagcacacatcctcttgtaaaatcttcaatggtatatgtttctctttttccttagcaaagaaggtgccttttatgttccttctgtgttgtatcgccattctttgggttccccttcccctatagcttcacgccttcaccttacgttctttgttgtatcgaggagttacaaatgatgacttctcgctctgcaaatatgtatagatacgcaactcgacgctgtaacacattttgattctctactcctgaagaaaagcagcgaacgacatgatgacgtgtgtatactgtgctcctagtcgtccctgttagcatggaaggctatattctataattgctgagctacgcccctataattatagatgatggccttcacttttattatcatggttgattagttgcctacatttaatcttccatatacataaactctctctat

SEQ ID NO: 220578 - DNA, 2849 bp, Zea Mays
aaggaataaaagaagaagtagttctgtcaccaggacacgctctttcatttattgcagccggtgaagatgattgaaagcagcgcccgtggtgatgagtatgatggggccatgtattcacagcttaatttgattgatctagctggttctgagagctccaagacagagactacagggttaagaagaagggaagggtcatatattaataagagcctcttaactcttggaacagtcattggaaagctcagtgaagggagggcaacacatataccctatcgtgattctaagttgacccgtctactacagtcatcattgagtggccatggtcatgtctcactaatttgcacaattactccagcatcaagtaacatggaagaaacacataatacattgaagtttgcaagcagagcaaaacgtgttgaaatttacgcctctcgcaaccgggtaaatagttaggcatacaaaactgatttcctgcaccactattatagaaaatgaaatgaaagacataatgatcttgactgcccagataattgatgagaaatcattgatcaagaagtatcagaaagaaatatcctctctaaagcaagaactcgatcagctaaggagaggaatgattggtggtgccagccgggaagaaattttgagtttacgtcagcagttggaggcgggtcaggtcaagatgcagtctcgtctggaggaggaagaggaggcgaaagctgctctaatgagcaggatacaacgtttgaccaagttaatacttgtttccaccaaaaacaatattcctgccttgacagatgggcatcagagtcacaattctctcagtgagcaagatttaatcacttcacaagatagttctacacttgtccaaactgagggcaccacaaaagaccccctatcatccgctttgccagactccttagatgagatcaatcagttaagatctggcaccggtgaacaatcttcagttaccggttctgcaacagattcaatgcaggtgggattcacggcatcagatcatatggatctactgattgaacaaattaagatgcttgctggggaggtcgcatttggtaccagttcactgaaaagactaatcgaacagtccatagatgatcctgaagcaacaaaggaccaaatcgagaatttagagcgtgaaatccagcaaaagaggagacatatgcgagccctggaaaaacaaatcatggaaagtggcgaggcatcagttgctaatgcatccatgatggatatgcagcagactatcacgaaactaacagcgcagtgcagtgagaaggctttcgacttagagttaaagtcagctgataatcgtgtactccaggagcagctacatcagaagaatttggaaatctacgatttacaagaaaaagttcttcgcgttgagcaacaactctcagcaaaagtggatatatcccctgagaaggaaactgattgtgcacagcaggagactattgatttgaaatctaaacttcagtccaaggaagctgaaatcgaaaagctgaaatatgagcatctgaaaatttctgaggaacattgcgatttaatcaaccagaaccataaattaagtgaggaagctgcatatgcaaaagaattggcttcttcggctgccgtcgaactcaagaatttggctgaagaagttacaaagctatctgtgctaaatgcaaagcaggcgaaggagttattagttgctcaggagatggcacattcaagggttcatggtagaaagggtcgtacagctagtaggggtagggatgaggttgggacatggagcctcgatttggaggacatgaaaatggagctacaggccagaagacagagggaggctgctttggaagctgctttggcagagaaggagcttctcgaagaagagtacaagaaaaagtttgacgaggcaaagaaaaaggaactatctctggagaatgatctagcaggcatgtgggttcttgttgctaagttgaaaagaggggctttaggcatatctgatttgaatgttgacgaccgaactgttaacctagctgatataactaacagcacaaaggagaacaaaggtggaaagaattttgctctagttgagaagcaagcatcagaagattctgtgaagtcactgagttcagaagaacatacaagtccggagtttgaaccacttcttgttcgtctgaaggctaaaattcaggagatgaaggaaaaggacattgatcccctgaccgataaagatgggaactcacatgtctgcaaagtttgtttcgaatctgcagccgctgcagtattgcttccttgccggcatttctgcttgtgcaagccttgctcgcttgcctgctcggagtgccctctgtgccgcacaagaatcgcagacaggataatcaccttcacgtgagctgcgttctagcttcaggtcattctgaagcacacatcctcttgtaaaatcttcaatggtatatgtttctctttttccttagcaaagaaggtgccttttatgttccttctgtgttgtatcgccattctttgggttccccttcccctatagcttcacgccttcaccttacgttctttgttgtatcgaggagttacaaatgatgacttctcgctctgcaaatatgtatagatacgcaactcgacgctgtaacacattttgattctctactcctgaagaaaagcagcgaacgacatgatgacgtgtgtatactgtgctcctagtcgtccctgttagcatggaaggctatattctataattgctgagctacgcccctataattatagatgatggccttcacttttattatcatggttgattagttgcctacatttaatcttccatatacataaactctctctat

SEQ ID NO: 220579 - DNA, 2048 bp, Zea Mays
ggcgggtcaggtcaagatgcagtctcgtctggaggaggaagaggaggcgaaagctgctctaatgagcaggatacaacgtttgaccaagttaatacttgtttccaccaaaaacaatattcctgccttgacagatgggcatcagagtcacaattctctcagtgagcaagataagttaatcacttcacaagatagttctacacttgtccaaactgagggcaccacaaaagaccccctatcatccgctttgccagactccttagatgagatcaatcagttaagatctggcaccggtgaacaatcttcagttaccggttctgcaacagattcaatgcagatcgagaatttagagcgtgaaatccagcaaaagaggagacatatgcgagccctggaaaaacaaatcatggaaagtggcgaggcatcagttgctaatgcatccatgatggatatgcagcagactatcacgaaactaacagcgcagtgcagtgagaaggctttcgacttagagttaaagtcagctgataatcgtgtactccaggagcagctacatcagaagaatttggaaatctacgatttacaagaaaaagttcttcgcgttgagcaacaactctcagcaaaagtggatatatcccctgagaaggaaactgattgtgcacagcaggagactattgatttgaaatctaaacttcagtccaaggaagctgaaatcgaaaagctgaaatatgagcatctgaaaatttctgaggaacattgcgatttaatcaaccagaaccataaattaagtgaggaagctgcatatgcaaaagaattggcttcttcggctgccgtcgaactcaagaatttggctgaagaagttacaaagctatctgtgctaaatgcaaagcaggcgaaggagttattagttgctcaggagatggcacattcaagggttcatggtagaaagggtcgtacagctagtaggggtagggatgaggttgggacatggagcctcgatttggaggacatgaaaatggagctacaggccagaagacagagggaggctgctttggaagctgctttggcagagaaggagcttctcgaagaagagtacaagaaaaagtttgacgaggcaaagaaaaaggaactatctctggagaatgatctagcaggcatgtgggttcttgttgctaagttgaaaagaggggctttaggcatatctgatttgaatgttgacgaccgaactgttaacctagctgatataactaacagcacaaaggagaacaaaggtggaaagaattttgctctagttgagaagcaagcatcagaagattctgtgaagtcactgagttcagaagaacatacaagtccggagtttgaaccacttcttgttcgtctgaaggctaaaattcaggagatgaaggaaaaggacattgatcccctgaccgataaagatgggaactcacatgtctgcaaagtttgtttcgaatctgcagccgctgcagtattgcttccttgccggcatttctgcttgtgcaagccttgctcgcttgcctgctcggagtgccctctgtgccgcacaagaatcgcagacaggataatcaccttcacgtgagctgcgttctagcttcaggtcattctgaagcacacatcctcttgtaaaatcttcaatggtatatgtttctctttttccttagcaaagaaggtgccttttatgttccttctgtgttgtatcgccattctttgggttccccttcccctatagcttcacgccttcaccttacgttctttgttgtatcgaggagttacaaatgatgacttctcgctctgcaaatatgtatagatacgcaactcgacgctgtaacacattttgattctctactcctgaagaaaagcagcgaacgacatgatgacgtgtgtatactgtgctcctagtcgtccctgttagcatggaaggctatattctataattgctgagctacgcccctataattatagatgatggccttcacttttattatcatggttgattagttgcctacatttaatcttccatatacataaactctctctat

SEQ ID NO: 220580 - DNA, 1745 bp, Zea Mays
agtccgaagcatagaagcagcaagctgacatatcgagaatttagagcgtgaaatccagcaaaagaggagacatatgcgagccctggaaaaacaaatcatggaaagtggcgaggcatcagttgctaatgcatccatgatggatatgcagcagactatcacgaaactaacagcgcagtgcagtgagaaggctttcgacttagagttaaagtcagctgataatcgtgtactccaggagcagctacatcagaagaatttggaaatctacgatttacaagaaaaagttcttcgcgttgagcaacaactctcagcaaaagtggatatatcccctgagaaggaaactgattgtgcacagcaggagactattgatttgaaatctaaacttcagtccaaggaagctgaaatcgaaaagctgaaatatgagcatctgaaaatttctgaggaacattgcgatttaatcaaccagaaccataaattaagtgaggaagctgcatatgcaaaagaattggcttcttcggctgccgtcgaactcaagaatttggctgaagaagttacaaagctatctgtgctaaatgcaaagcaggcgaaggagttattagttgctcaggagatggcacattcaagggttcatggtagaaagggtcgtacagctagtaggggtagggatgaggttgggacatggagcctcgatttggaggacatgaaaatggagctacaggccagaagacagagggaggctgctttggaagctgctttggcagagaaggagcttctcgaagaagagtacaagaaaaagtttgacgaggcaaagaaaaaggaactatctctggagaatgatctagcaggcatgtgggttcttgttgctaagttgaaaagaggggctttaggcatatctgatttgaatgttgacgaccgaactgttaacctagctgatataactaacagcacaaaggagaacaaaggtggaaagaattttgctctagttgagaagcaagcatcagaagattctgtgaagtcactgagttcagaagaacatacaagtccggagtttgaaccacttcttgttcgtctgaaggctaaaattcaggagatgaaggaaaaggacattgatcccctgaccgataaagatgggaactcacatgtctgcaaagtttgtttcgaatctgcagccgctgcagtattgcttccttgccggcatttctgcttgtgcaagccttgctcgcttgcctgctcggagtgccctctgtgccgcacaagaatcgcagacaggataatcaccttcacgtgagctgcgttctagcttcaggtcattctgaagcacacatcctcttgtaaaatcttcaatggtatatgtttctctttttccttagcaaagaaggtgccttttatgttccttctgtgttgtatcgccattctttgggttccccttcccctatagcttcacgccttcaccttacgttctttgttgtatcgaggagttacaaatgatgacttctcgctctgcaaatatgtatagatacgcaactcgacgctgtaacacattttgattctctactcctgaagaaaagcagcgaacgacatgatgacgtgtgtatactgtgctcctagtcgtccctgttagcatggaaggctatattctataattgctgagctacgcccctataattatagatgatggccttcacttttattatcatggttgattagttgcctacatttaatcttccatatacataaactctctctat

SEQ ID NO: 220581 - DNA, 1615 bp, Zea Mays
agttaccatccattggtgtggacgtgtggtggactggtggttgcgttgcgttgcgttgcttcgagttggaggttggagttggagtgggccgcgtgcgagaggatctgagcggataggccatggagtggagtgattagcggttgctgggtcaggagaaggcggcgtgtgttttgatcctactcgcgtttgaggggccccgatttcgagcgggtgttcagttttggtgccggatttcgagcgggtgtttagttttggttttggggacaatggttttggactgcctgatattcgattcataggttggtcaaacgctttggagtagagatttttttcccggaaaacaagagccatttttctagttgtgctactcgtcaatcaatccatggaagctgaactctggaagaagaaactttcctaattagacccggatttcgagtcggcagatccaagggaacgccgaattttgcctgatttcttcgcaatttttggtccgatcaagaggctcctagccttttttttttcctcgcgagaagcaagggggtctcccttttcttctttcgctatgtccatggctttgagccgcttcacgcaatggctgtggccggggggcgccgcggcgcgggtggacacccacgagcaccccagtggggggctaacgagctcctccttccctgacttcccctccgggttccgggagcccgacaccgtcacgttctacaccggccgccagcgcgcgcgcccgaggagggtcaggaatcgccgccgcagccgcggggaggcccgtgtcgaccgggagtacgacatggtcatcgtcccgtccgacggcggtggctgcctgtctggctccgactccgacgactccgactggtccatcggctggctcgagccacaggcgccggagcttcagacggacggcgaccccgagaactgcttcgccgtcctcgttccgtgttaccgccacggccgccaggagcagcagccacggaggcaggagggcaggtttcttggcgccggcgccctcaccgatggtggtccctctgatggaaagaattttgtagagcagtggctttcttctttccagaactaatatcgtcagacctctcctaagctaccctgtaaatagtatcactctgttttagttctactacgtttgtcctagtcgcacaacgtatcgatgaaggaagacatgaaaaagaaatctaaaaagaaaaagaaaaaaaagaggagcagtagaattttgatttctgaagcagcaccaattggatatgtccttcctgagggtcccaggttattctactcttgccaagcaaggcgaaagctgagctgcacaaactgcgcgccgtcgagaatgattttgccgtcctgatatgtgctgagtgctaacacgtagagatgaactgctattccattgttaatttgtcccatttgcttggcgacctcggattctactgcctgtacagtgttcttgcagtgtatatagtcttgcgcaggactactgcagttgcgcgatttttcagtgtgtgttggtacgtgtgtcgtattcttgtacatggaactgaatttctgatgaatgaatctatctggtgtatataatttttgtgacaatcaccagtac

SEQ ID NO: 220582 - DNA, 2634 bp, Zea Mays
tcagccctaggaaaatttctgccccagagtccctgacttgcacctaatgcaccatccacagcaccccataggctgttatcaccatcagcttcatcagtctattgtacccattcatagtgccaccaaacctaccggcaagtgtgacagtgtctggccacctcccaaacttccatccagggtcctgtgaccttgcctgctcttcggatcagttgcttgtgcacgaagctcaggagacagcgctgcaatggccttctcagcaagtgccgaagaatctgcagcggccaacgatgtcgacgcaggctcggtgctgtcagcaacagaggatgcaggggctccaccaaccacatgagactcaggaaagatcacctcaacgttatcagcaccacggcggctaccatggatctctgtacagatcaaaggaagggcaaaacaaccactttttggcaccacttaactcatacagagttacagaccatcggcagtcggcactcagcaccacttaactcattcagatgaagagcagaccagaaaacaggagagaaaagagggaaacttggggcgggggaccttcacttgaggagctcatgttgtggttgccttgccggagaacaggagccatcatcggtcaactggaataggatcagctgtcgactctggagcaggagaggagaggagaggtggagaggagatcaagagccgcagccaccggtcttggaacaggggcatcggtttgtatccagtgtaacaggggcgtcggcatagtgtgccttttcggctactgtagctgggccaaaaatagaggcccataaaaaaatctggctggtcgaattgctccttaattggacgatttaattgatcaagtcaacgactagtcggacgaccaaaggatctgatcaaggcgtcctcctagtcgaggacttgctggcgaccaggctgactaatcgcgattaaccagacgatttcaaaacaatgaccactctgccatgcagccaatgtatttgggttactgctatgacgttgttactaacaataacaattttgcaattaatttcggatacacatatttgtgataatcataagcagatgtgtattaatttatggtctcatctttacttctcttgttcataatttagcaaattagcttatctatatatatggacttgcacaccaatgttgttcttctattcaattgtgcactgcactgcatgctcctcctttgcatattacattcttttgttcattgtttttagtttatcttatatatttgtgaagcactaatagcatgtgtgtttccatttattgtgttcattttgttacattctgtcactgcaaacaggtcactacttttcctttttcttctgtaaaatgtaactggttgcttatccctgtggttccactctcactttgcaggcgacaattagaaagtaatagctcacatggagatgatggttcagaccgcctggttgggaagggtgatctgagactgaaactcatgaggaaaggcttgttgccgaggagcaatggtagtgcagaacagaatgacatagatctccgtgaaaagctttctcgaaaccataagttaccaaattatgattctagaggtcatgctgcagaatcaagggctagttatgatatgagagatgagcctccagagttaagttccagatattcttcgagggaggatgtcctagggtcgaggcactcttctgttgtaagtcgagttccttatgcaagaagtgtggatgatttgttaaagttggattattcaagaaaatcctacccgtcatggacagatgatggtttgaggcacagatcacctgaaaggatgttaaaagttcggagcgatatgtatccacggatagcttatgatcagattaggcccatgccaccccttaggtctgctggttcctcgagacctcaaagttttattacaagagatgctcctgacacgtcaaggagccaaccatatgctggcaaatccaccatttctattgatacagtacagaggactaatggaatcactccatctactgcagctctgcctaaggcccctgttatggatgaagccccgcttacagttactggattgctgaactcgttgggtcttgagaagtggatttgtctgcattgaggcaaatgggagagagcgacctcaaagacatgggggtaccaatgggcccgaggaagaagattctccttgcagttggccctcagtccaaataacgccaaagatgagcaaacagggtgtgggtctaagaacatttgttggcaaccgaaaatattggtgtaagaactccagatataagatattgtatacccaattatccatagtggcggtcttaatccacccttttgttgccgatgacgtttcgtgccgtagttgacatgtaagtctgttcggtcagctgttaatccaggttctatcgttctcggtctgtccggtgcctgccttactgtttttttctttttctttttttaaacagcctgccttactgttattattgcttcgaaatgggacgatacgccatatgcttggtgtacccattgatagttggcttgggaattgatgatccattcagttcttgtgtcagaaatcacaaggcgacgatactttacataagatcttattgctct

SEQ ID NO: 220583 - DNA, 1347 bp, Zea Mays
atcagagcagattctcccgcaagagagaacagggccgatgatctggtagaggttgtcaaaaggagggctatgtctgatgatattaatgacggtgaattgcctttgttggggaaaaagcgatctgtgagggataggttaggaagtaatgtgtctgattctgatttttatgaaagccagcagagaaacaaacggcgacaattagaaagtaatagctcacatggagatgatggttcagaccgcctggttgggaagggtgatctgagactgaaactcatgaggaaaggcttgttgccgaggagcaatggtagtgcagaacagaatgacatagatctccgtgaaaagctttctcgaaaccataagttaccaaattatgattctagaggtcatgctgcagaatcaagggctagttatgatatgagagatgagcctccagagttaagttccagatattcttcgagggaggatgtcctagggtcgaggcactcttctgttgtaagtcgagttccttatgcaagaagtgtggatgatttgttaaagttggattattcaagaaaatcctacccgtcatggacagatgatggtttgaggcacagatcacctgaaaggatgttaaaagttcggagcgatatgtatccacggatagcttatgatcagattaggcccatgccaccccttaggtctgctggttcctcgagacctcaaagttttattacaagagatgctcctgacacgtcaaggagccaaccatatgctggcaaatccaccatttctattgatacagtacagaggactaatggaatcactccatctactgcagctctgcctaaggcccctgttatggatgaagccccgcttacagttactggattgctgaactcgttgggtcttgagaagtatgttgttctctttcaggctgaggaggtggatttgtctgcattgaggcaaatgggagagagcgacctcaaagacatgggggtaccaatgggcccgaggaagaagattctccttgcagttggccctcagtccaaataacgccaaagatgagcaaacagggtgtgggtctaagaacatttgttggcaaccgaaaatattggtgtaagaactccagatataagatattgtatacccaattatccatagtggcggtcttaatccacccttttgttgccgatgacgtttcgtgccgtagttgacatcctgccttactgttattattgcttcgaaatgggacgatacgccatatgcttggtgtacccattgatagttggcttgggaattgatgatccattcagttcttgtgtcagaaatcacaaggcgacgatactttacataagatcttattgctct

SEQ ID NO: 220584 - DNA, 1497 bp, Zea Mays
ttccgttccgtccccggcgccggtaaacgacgtctcactttcaacgcacatccccaatcttcattcccctgaaaccctagccgctccgtccggtcgcgccactcccttcgcctctctaaggttccggcggaagccgtcctctgcgtgactgcgtcggctgcggtggagatggcttcctcgtcggcgtcttcgaggcaccaggttgtcaaaaggagggctatgtctgatgatattaatgacggtgaattgcctttgttggggaaaaagcgatctgtgagggataggttaggaagtaatgtgtctgattctgatttttatgaaagccagcagagaaacaaacggcgacaattagaaagtaatagctcacatggagatgatggttcagaccgcctggttgggaagggtgatctgagactgaaactcatgaggaaaggcttgttgccgaggagcaatggtagtgcagaacagaatgacatagatctccgtgaaaagctttctcgaaaccataagttaccaaattatgattctagaggtcatgctgcagaatcaagggctagttatgatatgagagatgagcctccagagttaagttccagatattcttcgagggaggatgtcctagggtcgaggcactcttctgttgtaagtcgagttccttatgcaagaagtgtggatgatttgttaaagttggattattcaagaaaatcctacccgtcatggacagatgatggtttgaggcacagatcacctgaaaggatgttaaaagttcggagcgatatgtatccacggatagcttatgatcagattaggcccatgccaccccttaggtctgctggttcctcgagacctcaaagttttattacaagagatgctcctgacacgtcaaggagccaaccatatgctggcaaatccaccatttctattgatacagtacagaggactaatggaatcactccatctactgcagctctgcctaaggcccctgttatggatgaagccccgcttacagttactggattgctgaactcgttgggtcttgagaagtatgttgttctctttcaggctgaggaggtggatttgtctgcattgaggcaaatgggagagagcgacctcaaagacatgggggtaccaatgggcccgaggaagaagattctccttgcagttggccctcagtccaaataacgccaaagatgagcaaacagggtgtgggtctaagaacatttgttggcaaccgaaaatattggtgtaagaactccagatataagatattgtatacccaattatccatagtggcggtcttaatccacccttttgttgccgatgacgtttcgtgccgtagttgacatcctgccttactgttattattgcttcgaaatgggacgatacgccatatgcttggtgtacccattgatagttggcttgggaattgatgatccattcagttcttgtgtcagaaatcacaaggcgacgatactttacataagatcttattgctct

SEQ ID NO: 220585 - DNA, 1360 bp, Zea Mays
cacgcacctgcgtctgtgtgcagcgaccagcgacgcaacaacttccgttccgtccccggcgccggttgtcaaaaggagggctatgtctgatgatattaatgacggtgaattgcctttgttggggaaaaagcgatctgtgagggataggttaggaagtaatgtgtctgattctgatttttatgaaagccagcagagaaacaaacggcgacaattagaaagtaatagctcacatggagatgatggttcagaccgcctggttgggaagggtgatctgagactgaaactcatgaggaaaggcttgttgccgaggagcaatggtagtgcagaacagaatgacatagatctccgtgaaaagctttctcgaaaccataagttaccaaattatgattctagaggtcatgctgcagaatcaagggctagttatgatatgagagatgagcctccagagttaagttccagatattcttcgagggaggatgtcctagggtcgaggcactcttctgttgtaagtcgagttccttatgcaagaagtgtggatgatttgttaaagttggattattcaagaaaatcctacccgtcatggacagatgatggtttgaggcacagatcacctgaaaggatgttaaaagttcggagcgatatgtatccacggatagcttatgatcagattaggcccatgccaccccttaggtctgctggttcctcgagacctcaaagttttattacaagagatgctcctgacacgtcaaggagccaaccatatgctggcaaatccaccatttctattgatacagtacagaggactaatggaatcactccatctactgcagctctgcctaaggcccctgttatggatgaagccccgcttacagttactggattgctgaactcgttgggtcttgagaagtatgttgttctctttcaggctgaggaggtggatttgtctgcattgaggcaaatgggagagagcgacctcaaagacatgggggtaccaatgggcccgaggaagaagattctccttgcagttggccctcagtccaaataacgccaaagatgagcaaacagggtgtgggtctaagaacatttgttggcaaccgaaaatattggtgtaagaactccagatataagatattgtatacccaattatccatagtggcggtcttaatccacccttttgttgccgatgacgtttcgtgccgtagttgacatcctgccttactgttattattgcttcgaaatgggacgatacgccatatgcttggtgtacccattgatagttggcttgggaattgatgatccattcagttcttgtgtcagaaatcacaaggcgacgatactttacataagatcttattgctct

SEQ ID NO: 220586 - DNA, 1433 bp, Zea Mays
cccgcacgcacctgcgtctgtgtgcagcgaccagcgacgcaacaacttccgttccgtccccggcgccggtaaacgacgtctcactttcaacgcacatccccaatcttcattcccctgaaaccctagccgctccgtccggtcgcgccactcccttcgcctctctaaggttccggcggaagccgtcctctgcgtgactgcgtcggctgcggtggagatggcttcctcgtcggcgtcttcgaggcaccaggtcaccatcaccctcggccgcagcggtcaggcgacaattagaaagtaatagctcacatggagatgatggttcagaccgcctggttgggaagggtgatctgagactgaaactcatgaggaaaggcttgttgccgaggagcaatggtagtgcagaacagaatgacatagatctccgtgaaaagctttctcgaaaccataagttaccaaattatgattctagaggtcatgctgcagaatcaagggctagttatgatatgagagatgagcctccagagttaagttccagatattcttcgagggaggatgtcctagggtcgaggcactcttctgttgtaagtcgagttccttatgcaagaagtgtggatgatttgttaaagttggattattcaagaaaatcctacccgtcatggacagatgatggtttgaggcacagatcacctgaaaggatgttaaaagttcggagcgatatgtatccacggatagcttatgatcagattaggcccatgccaccccttaggtctgctggttcctcgagacctcaaagttttattacaagagatgctcctgacacgtcaaggagccaaccatatgctggcaaatccaccatttctattgatacagtacagaggactaatggaatcactccatctactgcagctctgcctaaggcccctgttatggatgaagccccgcttacagttactggattgctgaactcgttgggtcttgagaagtatgttgttctctttcaggctgaggaggtggatttgtctgcattgaggcaaatgggagagagcgacctcaaagacatgggggtaccaatgggcccgaggaagaagattctccttgcagttggccctcagtccaaataacgccaaagatgagcaaacagggtgtgggtctaagaacatttgttggcaaccgaaaatattggtgtaagaactccagatataagatattgtatacccaattatccatagtggcggtcttaatccacccttttgttgccgatgacgtttcgtgccgtagttgacatcctgccttactgttattattgcttcgaaatgggacgatacgccatatgcttggtgtacccattgatagttggcttgggaattgatgatccattcagttcttgtgtcagaaatcacaaggcgacgatactttacataagatcttattgctct

SEQ ID NO: 220587 - DNA, 1303 bp, Zea Mays
cccgcacgcacctgcgtctgtgtgcagcgaccagcgacgcaacaacttccgttccgtccccggcgccggttccggcggaagccgtcctctgcgtgactgcgtcggctgcggtggagatggcttcctcgtcggcgtcttcgaggcaccaggtcaccatcaccctcggccgcagcggtcaggttgtcaaaaggagggctatgtctgatgatattaatgacggtgaattgcctttgttggggaaaaagcgatctgtgagggataggttaggaagtaatgtgtctgattctgatttttatgaaagccagcagagaaacaaacggcgacaattagaaagtaatagctcacatggagatgatggttcagaccgcctggttgggaagggtgatctgagactgaaactcatgaggaaaggcttgttgccgaggagcaatgaatcaagggctagttatgatatgagagatgagcctccagagttaagttccagatattcttcgagggaggatgtcctagggtcgaggcactcttctgttatgatggtttgaggcacagatcacctgaaaggatgttaaaagttcggagcgatatgtatccacggatagcttatgatcagattaggcccatgccaccccttaggtctgctggttcctcgagacctcaaagttttattacaagagatgctcctgacacgtcaaggagccaaccatatgctggcaaatccaccatttctattgatacagtacagaggactaatggaatcactccatctactgcagctctgcctaaggcccctgttatggatgaagccccgcttacagttactggattgctgaactcgttgggtcttgagaagtatgttgttctctttcaggctgaggaggtggatttgtctgcattgaggcaaatgggagagagcgacctcaaagacatgggggtaccaatgggcccgaggaagaagattctccttgcagttggccctcagtccaaataacgccaaagatgagcaaacagggtgtgggtctaagaacatttgttggcaaccgaaaatattggtgtaagaactccagatataagatattgtatacccaattatccatagtggcggtcttaatccacccttttgttgccgatgacgtttcgtgccgtagttgacatcctgccttactgttattattgcttcgaaatgggacgatacgccatatgcttggtgtacccattgatagttggcttgggaattgatgatccattcagttcttgtgtcagaaatcacaaggcgacgatactttacataagatcttattgctct

SEQ ID NO: 220588 - DNA, 2043 bp, Zea Mays
cccgcacgcacctgcgtctgtgtgcagcgaccagcgacgcaacaacttccgttccgtccccggcgccggtaaacgacgtctcactttcaacgcacatccccaatcttcattcccctgaaaccctagccgctccgtccggtcgcgccactcccttcgcctctctaaggttccggcggaagccgtcctctgcgtgactgcgtcggctgcggtggagatggcttcctcgtcggcgtcttcgaggcaccaggtcaccatcaccctcggccgcagcggtcaggttgtcaaaaggagggctatgtctgatgatattaatgacggtgaattgcctttgttggggaaaaagcgatctgtgagggataggttaggaagtaatgtgtctgattctgatttttatgaaagccagcagagaaacaaacggtatatttcttggatctgctatttccattgtttgtataggcttcaaagttttgaactacatttgtaatatacaaaggattctttccacatcattaggcacagggtttgttcctctatggtaattcacccccaattatgaaccgtggcttcagcttcatcacaatgttttaatgacacaaaactaaatgctttttatagtttatacactaatgtcaactctttcactctcaatgtttacaggtcggacgatcagctggtcggtccagggaaccgaccaggcgacaattagaaagtaatagctcacatggagatgatggttcaggtgatgataaaccttaacttgtcaattctctagggcttgaactgaagatatctggcactacttactctgttgaattggcgtgcaaaatatttgaagaccgcctggttgggaagggtgatctgagactgaaactcatgaggaaaggcttgttgccgaggagcaatggtagtgcagaacagaatgacatagatctccgtgaaaagctttctcgaaaccataagttaccaaattatgattctagaggtcatgctgcagaatcaagggctagttatgatatgagagatgagcctccagagttaagttccagatattcttcgagggaggatgtcctagggtcgaggcactcttctgttgtaagtcgagttccttatgcaagaagtgtggatgatttgttaaagttggattattcaagaaaatcctacccgtcatggacagatgatggtttgaggcacagatcacctgaaaggatgttaaaagttcggagcgatatgtatccacggatagcttatgatcagattaggcccatgccaccccttaggtctgctggttcctcgagacctcaaagttttattacaagagatgctcctgacacgtcaaggagccaaccatatgctggcaaatccaccatttctattgatacagtacagaggactaatggaatcactccatctactgcagctctgcctaaggcccctgttatggatgaagccccgcttacagttactggattgctgaactcgttgggtcttgagaagtatgttgttctctttcaggctgaggaggtggatttgtctgcattgaggcaaatgggagagagcgacctcaaagacatgggggtaccaatgggcccgaggaagaagattctccttgcagttggccctcagtccaaataacgccaaagatgagcaaacagggtgtgggtctaagaacatttgttggcaaccgaaaatattggtgtaagaactccagatataagatattgtatacccaattatccatagtggcggtcttaatccacccttttgttgccgatgacgtttcgtgccgtagttgacatgtaagtctgttcggtcagctgttaatccaggttctatcgttctcggtctgtccggtgcctgccttactgtttttttctttttctttttttaaacagcctgccttactgttattattgcttcgaaatgggacgatacgccatatgcttggtgtacccattgatagttggcttgggaattgatgatccattcagttcttgtgtcagaaatcacaaggcgacgatactttacataagatcttattgctct

SEQ ID NO: 220589 - DNA, 1038 bp, Zea Mays
cccgcacgcacctgcgtctgtgtgcagcgaccagcgacgcaacaacttccgttccgtccccggcgccggtaaacgacgtctcactttcaacgcacatccccaatcttcattcccctgaaaccctagccgctccgtccggtcgcgccactcccttcgcctctctaaggttccggcggaagccgtcctctgcgtgactgcgtcggctgcggtggagatggcttcctcgtcggcgtcttcgaggcaccaggtcaccatcaccctcggccgcagcggtcaggttgtcaaaaggagggctatgtctgatgatattaatgacggtgaattgcctttgttggggaaaaagcgatctgtgagggataggttaggaagtaatgtgtctgattctgatttttatgaaagccagcagagaaacaaacggtatatttcttggatctgctatttccattgtttgtataggcttcaaagttttgaactacatttgtaatatacaaaggattctttccacatcattaggcacagggtttgttcctctatggtaattcacccccaattatgaaccgtggcttcagcttcatcacaatgttttaatgacacaaaactaaatgctttttatagtttatacactaatgtcaactctttcactctcaatgtttacaggtcggacgatcagctggtcggtccagggaaccgaccaggtgactaatcgtgattaggttggcccgggtcgccctgtatatttcaggagctatatataacaacaacaacaacctaataatatataattatataggtactacactgctatgaaggcaaatgggtagtaatactgtaataggcaaatctgaaacttaatattgatgcaaagttcatactaaaactgaaagtagataaatttcttatgacctattgacctcatctaaagttctaaacattcaaacaagcaaactcacagttattagagtgtagagacctagagcagaagatcattgtccaactgaaaggcatcagcagcagctccccctccaactgattcagatt

SEQ ID NO: 220590 - DNA, 603 bp, Zea Mays
gtttatgtgcgcacgctacttcgctaaagtgcggcccatcgggcccttcatcgaacatttggatgagccagcacaattgcttccttgcttgtggcagctagccagcttccctgccctaatcaactaatcgagatttcctcttagcggcgtgagggattgacagactgctgactacgggagccgggagggggcatcgtgcgccgtgcgcggtggcgaaggaagagcgaagcggcggaggccgagctgctacggcgctgactggccgggtcgcacggctacgccgctactcgacgcttgctgcggcttgtgggaagctggagaagaaagtttgtcgcctgtacagctgtcggagaagaaagctcgtgcttggcggcttgctatgggccgcgattgagaggagatctgaaaatggagaaaaggtgcgagctgcaatcaaagttaaggcattagtcatcatttgcttcacctcttctggacaggctgcaaggttgctctgacataacgaggaagtccctcttcatggtcggagaaattgggggcaatgactacaacctacctcttcaatcgagtgccatttgaaaagggtgttctggacaaagaaag

SEQ ID NO: 220591 - DNA, 657 bp, Zea Mays
aaatttgtttatgtgcgcacgctacttcgctaaagtgcggcccatcgggcccttcatcgaacatttggatgagccagcacaattgcttccttgcttgtggcagctagccagcttccctgccctaatcaactaatcgagatttcctcttagcggcgtgagggattgacagactgctgactacgggagccgggagggggcatcgtgcgccgtgcgcggtggcgaaggaagagcgaagcggcggaggccgagctgctacggcgctgactggccgggtcgcacggctacgccgctactcgacgcttgctgcggcttgtgggaagctggagaagaaagtttgtcgcctgtacagctgtcggagaagaaagctcgtgcttggcggcttgctatgggccgcgattgagaggagatctgaaaatggagaaaaggtgaacatttttagcaagagctattggaaaaagaaacaaattgtataagtgcgagctgcaatcaaagttaaggcattagtcatcatttgcttcacctcttctggacaggctgcaaggttgctctgacataacgaggaagtccctcttcatggtcggagaaattgggggcaatgactacaacctacctcttcaatcgagtgccatttgaaaagggtgttctggacaaagaaag

SEQ ID NO: 220592 - DNA, 591 bp, Zea Mays
caaatttgtttatgtgcgcacgctacttcgctaaagtgcggcccatcgggcccttcatcgaacatttggatgagccagcacaattgcttccttgcttgtggcagctagccagcttccctgccctaatcaactaatcgagatttcctcttagcggcgtgagggattgacagactgctgactacgggagccgggagggggcatcgtgcgccgtgcgcggtggcgaaggaagagcgaagcggcggaggccgagctgctacggcgctgactggccgggtcgcacggctacgccgctactcgacgcttgctgcggcttgtgggaagctggagaagaaagtttgtcgcctgtacagctgtcggagaagaaagctcgtgcttggcggcttgctatgggccgcgattgagaggaggtgcgagctgcaatcaaagttaaggcattagtcatcatttgcttcacctcttctggacaggctgcaaggttgctctgacataacgaggaagtccctcttcatggtcggagaaattgggggcaatgactacaacctacctcttcaatcgagtgccatttgaaaagggtgttctggacaaagaaag

SEQ ID NO: 220593 - DNA, 696 bp, Zea Mays
gtttatgtgcgcacgctacttcgctaaagtgcggcccatcgggcccttcatcgaacatttggatgagccagcacaattgcttccttgcttgtggcagctagccagcttccctgccctaatcaactaatcgagatttcctcttagcggcgtgagggattgacagactgctgactacgggagccgggagggggcatcgtgcgccgtgcgcggtggcgaaggaagagcgaagcggcggaggccgagctgctacggcgctgactggccgggtcgcacggctacgccgctactcgacgcttgctgcggcttgtgggaagctggagaagaaagtttgtcgcctgtacagctgtcggagaagaaagctcgtgcttggcggcttgctatgggccgcgattgagaggagatctgaaaatggagaaaaggtgaacatttttagcaagagctattggaaaaagaaacaaattgtataagttagtgctcctcggatgcaattgatgatattacaatgccatgttgaaactagcaatgcaatttgtgcgagctgcaatcaaagttaaggcattagtcatcatttgcttcacctcttctggacaggctgcaaggttgctctgacataacgaggaagtccctcttcatggtcggagaaattgggggcaatgactacaacctacctcttcaatcgagtgccatttgaaaagg

SEQ ID NO: 220594 - DNA, 310 bp, Zea Mays
ccgcccctctgggagcggcaagcggcgtgagggattgacagactgctgactacgggagccgggagggggcatcgtgcgccgtgcgcggtggcgaaggaagagcgaagcggcggaggccgagctgctacggcgctgactggccgggtcgcacggctacgccgctactcgacgcttgctgcggcttgtgggaagctggagaagaaagtttgtcgcctgtacagctgtcggagaagaaagctcgtgcttggcggcttgctatgggccgcgattgagaggagacaatccgtcttttttattgcttatggcgttg

SEQ ID NO: 220595 - DNA, 1051 bp, Zea Mays
gtttatgtgcgcacgctacttcgctaaagtgcggcccatcgggcccttcatcgaacatttggatgagccagcacaattgcttccttgcttgtggcagctagccagcttccctgccctaatcaactaatcgagatttcctcttagcggcgtgagggattgacagactgctgactacgggagccgggagggggcatcgtgcgccgtgcgcggtggcgaaggaagagcgaagcggcggaggccgagctgctacggcgctgactggccgggtcgcacggctacgccgctactcgacgcttgctgcggcttgtgggaagctggagaagaaagtttgtcgcctgtacagctgtcggagaagaaagctcgtgcttggcggcttgctatgggccgcgattgagaggagatctgaaaatggagaaaaggtgaacatttttagcaagagctattggaaaaagaaacaaattgtataagttagtgctcctcggatgcaattgatgatattacaatgccatgttgaaactagcaatgcaatttgtaatcttacttatgctatttaatgttgttctttatatatttaagcactagccacttggttatgtcaaacaattaatactttgatattttgagtaatgaataacatcatcttatgatctattttttgttgcgtgtgttatgatttagtttactagttgtgtaatatgtatgttcaattatatgttatatattttatatgctatgaaacaacttctatgtgatactataatcaattatatatgtctaaaggctactaaaataggctttaggctattatcttttttacactagtaaaatttcgaatacccattctctaaatcctgggcccgcccctgtctataggctaccaaatctaagaaattgattagttctgaactaatgcacttcgaccggagcatttttacacttattgcttactaatgggttcgagctgcaaagcctgactgttaggaactgaaagtggatttgctttacctttttgcacttgtttgttctgcaagactgatattttgagttccaa

SEQ ID NO: 220596 - DNA, 1274 bp, Zea Mays
aggtgatgcgggcgcaccggatcatggagcgcgtgcaggaggaacaacgctgctagtacggcgtcaaggagccgaggcaggtgctcgccgtcaccccgacctactcacgcgcattctaggcgctccacctcatcggcctcctccactcactccgtcggaatccttgcgcatactggcacgacagaccaactacggctcagcgaggaggacaagcagaatatgcctcttccagtccatggccctgcttgcaactcctcagggcatctgattggatggcacacgttcaactcattgcccttctctgggaagacggccacagttgttggtgaagcagcccctgttctgcccagggatttggagtgggctggttttgtgttgaactcgaggatgctgtggaaggaggctgacggtaagcctgactgggtgaaggatcttgatgctgtgggcgagaatggcgaggagattgagaacccacttactctgttgaatgatccgtcctctgttgagccactgggcaactatgggaagaaggtcctactgtggtggctttgtgttgaagcacgggctgatagcaagtttcctgaagggttcatactcctgactccagcagatatcggattgctaattcatacgaagatagattcatatctggccttgaacctgaaaatgttgataaggttctgccagaagctccagaagagttggtatgttagttggcctggcggtatgtatctctataagtttctgtcgttgtttctcacttcaaagctgatattcatgaggccttatcgtctgaaagaagaaatggtcatccaaagatcatccaccgcgacattaaggcatctaacattcttcttgacttcaaatttgaagctaaggtcgctgactttggacttgcaaagtgcactactgataataacacccatgtttcgacaagagtaatgggcacctttgggtatttggcacctgagtatgcaacatctggcaagctcacagaaaaatccgatgtattttctttcggagtcatgcttcttgagcttattactgggcagcgaccaattgacacaacccaattagcaatgcttgctataagcacatatgtacttccatttgcatgttgtataatactaataccaattgcaaaattatagttatttttctacccttgttagttaataagcatatttctggtcaataggttgtattcttattcttgtaaccgtgttaattaatgttatggacttgtagtctcgtattaccttgtgaatatatct

SEQ ID NO: 220597 - DNA, 1692 bp, Zea Mays
atcgaacatcggagagatgcgcgcgggcggcggcgcgcctccccgacacgcaccactctccccgaccgcctccgccactgccacgctagtacccgcttctgtcgccatgcccacgccgcgcctcgtacacctccgccacctcctctcattccgctccgcccttccccgcccgctgggtcccaaccaaagccacccgctccccgggtcggttcacccgtcccttctcctcccccgtgccatggctggtgtcgcatacgcaggtctggcgacggggtcggcggaatacgaggaggtgctcgggtgcctcgcgtcgctgataacgcagaaggtgcgcgcggacaccggcaaccgcggcaaccagtgggagctcatgtccaagtacgtccagatactggaactggaggaatccatcgcgcagttgaaagtggttcacgttgctgggaccaaagggaagggttcaacatgcacatttgctgagtcaatccttcgatcatgtggtttccacactgggctcttcacttcaccacatttgatggatgtccgcgagcgatttcggcttgatgggctggacatttcagaagaaaagtttattaggtatttctggtggtgctggaagacactgaaggacaagactggtgatggtgtaccgatgccggcctactttaggtggatgtcgtagtgctcgaggttggtttgggagggaagtatgatgcaacaaatgtggtcagagcacctgtagtttgtggaataacatcccttgggtatgatcatatggaaattcttggaaacacacttggagaaattactagagagaaggctgggatactgaagaaaggagttccagcgtatacagttccacagccagaagaggcaatgtctgtactgatgaagcgagctactgaattgggtgtttctcttcaagttgtccaccctttggacccacagaaattagaggatcaacctcttggactccatggtgagcaccaatacatgaatgcaggtcttgcaattgcattggctaatacctggcttgagaggcaaggccatttgaacagattacatgtcaaacattctggtaccttgccagatcagttcatcaaagggctgtcgagtgcttgtctgcaaggtcgaggacagattattccaaattcacaagtgaactcagaaaatgatcgtgattcttcattggttttctatttggatggggcacatagctcagaaagcatggaaatgtgtgcaagatggtttgcccacgctacaaatagtgatggaatacagccaggtccttcggagcagcctcacactgatagggattccaggaagtttctccttttcaattgcatgactgtaagagatcctcagagattgctcccacgtcttctagatacatgtgctcaaaatggtctccactttgagcatgccttatttgtgccaaaccaatcacagtacaacaagcttggatcccttgcatccccaccttcagagcgtgaacaaattgatttgtcatggcagttgtcgcttcaaaaggtgtggggaaacctgcctcatcacaataaaggtctaaatgatgtaaactctagcggagctacctcggtttttgaatctcttccattggcaattaaatggctaagggaaactgctcaacaaaatcaatcgattcagtttcaggtttagctctcaacctcatggact

SEQ ID NO: 220598 - DNA, 1443 bp, Zea Mays
tgctcgctagctgatctgcctgtgcagtagtagtagcaagagcatcaaggacttccaggcgctgctacaccagggctacagccggacgacgacgacggcgtcggcgtcgtcgtcgtcgcccacgccactactccctcttgcgccgccaacccggccgtgcccgcgctcggccaacaagccgaagatgctcatcttcatccgcaagcagaaccgggtgctgctgaacctgccgcaggtggtgacggcgtgccggcgggcggggttcgcgccgcacgtgatgaacctgcggcggcagaccccgctggccgcgatccacgcggcgctggcgtcggcggacgccatggtggcggtgcacggcgcggccgtcacccacttcctcttcatgcgcccgggctccgtgctcctgcagatcgtgcccgtgggcctcgactgggcggccgacgccttctacggcaagcccgcgcagcagctcggcctcgactacctcgagtacagggtggcgcccgaggagagctcgctggccgccgagtacgggctcaacagcaccgtggtgcggaccccctgggtcatcagcagccgcggctggtgggagatgaagaaggtctacatggaccgccagaacgtcaccgtcaacgtcaagcgcttcgccgacctgctcagggcggcgcgtgctcgcctcaggaacaccacggcgtgcgccgccaagcccgcagcgccgctcaggtagacgctagctgctgattgggcttgggttaggtgtcaattactttagtcacacttgccgatttctttgtgctttcgtcctctttttggccgggggataaaaaaggagacgaggtcctgtaaatatgattgggggtacggttggctgagagattggtgggggatctatccatcgcctcctttcgcggtgcattcgtttggttcttggtgttgctggagggagcagcagaaggtgaagaataataatttatggcagggacggctctcctgaaacactttgttcacagtagatcataggggtatcagctctttttatttcgttgccctttctttcttttttttcttttttttttggttttctcattctttgggtgtccagatgatgtataagggcatgtacagtggtgtttaatgtggaggctcttaaggtgtttaagggggttatttgcaaaaaaatcttagagccgtctctccgcgaagagacgcctctggctcgtaaaccaagtagcaacagacgcctcacttcccactgtacgaatttgttgtctgttctatcgatctgatgctatacaaatacatttaattctgtatttattaatagactacgtttgtagacactccattgtacaatacagtctcttagttgtctcctgtgcttagagaaccgttttggtgtctctccactgtacatgccctaagaaactacattctgtaacaaag

SEQ ID NO: 220599 - DNA, 2146 bp, Zea Mays
gtttctccttgtcctccgtgtgggcccgctgttctgtattcttcttcttcttcattccttccaccgctcacctcttctcctccccagtccccactcatcaaactccgcccccatgaatatgatcgggagaagctgctagcatcatctctcgcctccacttcgtcacctcctcgccattctattctatccttcccgccagctgcatatatccccgcgcccaattcggtccccggtgtgtgaggccagctgttttagctcagcgcgcggcgtggcagcaaaaaaaaaaaaaggagagcaaggagagcgccggcgccggcgaagcatgcggcggtgagagagagagagaggaggaggaagggaacggagagaacgagagccggaggacgatgcagctgccgcagcatcatcagaagccctccgcccactcctgctgctcgtcgtggatccggaggtccccgccgccgtcgccgccgccgcacaagagagcgggcggcgtcgggaggagccggtatgcctgccgcctcgtgcccctgctggtgctcaccgtgtacagcgtcgtcaccgtgcttcgcatccccagctcctccctcgtcgtgtccaccgccgattcagagcgcgtggaaaggcgggaggacctggaggcgctcaagacccacctgccgtcgaaccagaacggcctggaggcccgcgaggagacgcggtcggtcgcctccctcccctgctccgccttcatcagcggcaagagcatcaaggacttccaggcgctgctacaccagggctacagccggacgacgacgacggcgtcggcgtcgtcgtcgtcgcccacgccactactccctcttgcgccgccaacccggccgtgcccgcgctcggccaacaagccgaagatgctcatcttcatccgcaagcagaaccgggtgctgctgaacctgccgcaggtggtgacggcgtgccggcgggcggggttcgcgccgcacgtgatgaacctgcggcggcagaccccgctggccgcgatccacgcggcgctggcgtcggcggacgccatggtggcggtgcacggcgcggccgtcacccacttcctcttcatgcgcccgggctccgtgctcctgcagatcgtgcccgtgggcctcgactgggcggccgacgccttctacggcaagcccgcgcagcagctcggcctcgactacctcgagtacagggtggcgcccgaggagagctcgctggccgccgagtacgggctcaacagcaccgtggtgcggaccccctgggtcatcagcagccgcggctggtgggagatgaagaaggtctacatggaccgccagaacgtcaccgtcaacgtcaagcgcttcgccgacctgctcagggcggcgcgtgctcgcctcaggaacaccacggcgtgcgccgccaagcccgcagcgccgctcaggtagacgctagctgctgattgggcttgggttaggtgtcaattactttagtcacacttgccgatttctttgtgctttcgtcctctttttggccgggggataaaaaaggagacgaggtcctgtaaatatgattgggggtacggttggctgagagattggtgggggatctatccatcgcctcctttcgcggtgcattcgtttggttcttggtgttgctggagggagcagcagaaggtgaagaataataatttatggcagggacggctctcctgaaacactttgttcacagtagatcataggggtatcagctctttttatttcgttgccctttctttcttttttttcttttttttttggttttctcattctttgggtgtccagatgatgtataagggcatgtacagtggtgtttaatgtggaggctcttaaggtgtttaagggggttatttgcaaaaaaatcttagagccgtctctccgcgaagagacgcctctggctcgtaaaccaagtagcaacagacgcctcacttcccactgtacgaatttgttgtctgttctatcgatctgatgctatacaaatacatttaattctgtatttattaatagactacgtttgtagacactccattgtacaatacagtctcttagttgtctcctgtgcttagagaaccgttttggtgtctctccactgtacatgccctaagaaactacattctgtaacaaag

SEQ ID NO: 220600 - DNA, 1362 bp, Zea Mays
tccacctctccgtgtgttcgttctttcctccctatttgcgtccgttcgcgcctccagcctcccctgaatcggtgagtccaaggaagtagttgcgggtcccctcgaccaattcgtttgctggcagtgcaaaggtccttgtataccgtctcatgatatgaatctgcagtctttgcctgttgctactggagctccttatccagcatctatggcaccatcttccagcgctttctccacggttactacgcatggatgctttccttattcgacaccatccaccgcgcatccttccctttctggaatcctgccctgcaacaacaacatgatatcctattctgtactaccagaagaaccttcaggtggtattttctctggacagtctcctgaaggctgtgcagaccctggtgacattgattaccgtgttgagagtcagcaaattcctggtcctggcagaaccgtcgacgaatccgacaatagagatgaatggtttgtccccactgatataacttggaactggcaccaaatggctgaatccgcacccgttccctcgtatccgaattctaagtcatggcaacatgatgagcagcacatggtacatgaatcagtctcggttccttctgaagaacctcagcaactgtgtccaaccgtttctcctctggcaaccacaaataatgcgcattgccccaaaagggccaaggcacgcatgcggtggactatggagatgcatgatcgcttcgtagatgctgtcaatctgcttggtggctgtgaaagtgctaaacctaaagcaattcttgatataatgaatgttgaaggtctgactcgcgatcaggtcaaaagccactttcagaagtacaaacttcaagtaaagcagcacccttctgaagttccaggtacatcagtggagatgaccatgcgtagcgaagcaataccttcagacgtacagaaacacatccaagactatgcattacaggtgcaagtagagtttcagaagaaactacatgatatggtagagagcacaatgctggagattcgcagaagcctgctcgagaaccatgtgatgagtctccacgagcttgagcagcggcagtcgtcgtaccgtggcagcgacgacgcaggagcatgacgccatgaccgtcttctggtcgaggcttcaatgcctgtttctatgtggtgttgctttttttttcgcatgtaaatttgagttggtagtatagctccagaaccttgtgataagaatctgtgtgtgatgctgcagagtcaccttttgcagtacgtactggaatttcacactccacatgtaattatgcaaactctatagcttaccaactgttaacttgaatgggcaatgttgatgtctaaacttgg

SEQ ID NO: 220601 - DNA, 2909 bp, Zea Mays
gaaaagatagctgtagacatccccggaagaaatggtcccgtgcgtgcgctcactcctttgctgtttttcttctctccgttcaccttgcgtgcgcgacatctagggcgaccgccgccgccgccgccgccctacgcccagcagcccaggtcttcgtcgcgccctttgccggctacgagcacccaccacaccagatcactgtaatccaggctgaattgtggctgaacctggtggcatattaatcttggatacttggtcaactgcaaacttgaagattcattttcatgcaatcaatggagagcctagcgcaattagaggtgttgtgtgaaaagctttataattctagagactcggctgagcgagcgcatgcagaaagcaccctcaagtgcttctcagagaacagcgagtacatttcgcagtgccaatacatattggacaatgcctcaactccatatgccctgatgctggcgagttcaagcttgctgaagcaagtttctgaccgcagtctttctttgatgctccgtctcgatatacggaattatgtcataaactatcttggcacaagggggcctaaattgcagaactttgtcattgtgtccttaattcagctggtctgtcgaattacaaaatttggatggtttgatgatgacagattcagagagactgtcaaggaagcgactgattttttaggtcttgcttcccaggatcattatttcataggcttgaagatactaaacaatctcgttacagaaatgaatcagccaaaccccgcgatgcctttgacgcttcataggaaaattgcgggttcattcaaggatcagtttcttctgcagatcttccaaatttcgttaacctcactaaaccaactgaagagtgaagctccggatgactttggacatattcctcttgaccttgccttgaagtgcttatcttttgactttgttggttctccggtggacgaaagctctgaagaatttggaacagtgcagcttcctgcatcttggaggcctcttcttcaagatccttccacactccaaatcttttttgattactacaaagtcaatgacatacgggtttcaaaagaggccttggagtgtctggttcgacttgcttctgtcaggcgcagtatttttgtggaggatcctgcaaggtcccagtttctttctcatctgatgctaggcaccaaggagatacttctaactggccaaggacttgctgatcatgacaattaccatgagttctgccgtcttttgggacgtttcaaagtgaattaccagctggcagagcttttgaatgttgagttttatggtgagtggattggtctagtagctgaatttacaactagatccttgttgtcatggcagtgggccagcaacagtgtctactaccttctaagtctttggtcaaggctggtgacatccgtgccttacttgaaaggtgaaacaccaagtcttcttgatgaaactgttcccaagatcacagaaggttttatcacttccagaattaattctgttcaggccatccttgctgacaactcactggaaaatcctttggatagtgtggaagttctccaggaccagctggagtttcttcctttcctttgcagattccagtaccaaagtagtagtctgtacatcataaacatcatggaacctcttctgcaagcttatacggaaaggtccagattacccgctcctggtgatgctgatgagctgtctgtcattgaaggccaaattgcatggatggttcacataattgcggccattgtcaaagttaggcagtcaagaaacacaagagttgattgacgcagaactctctgcccgtgtactacagttgataagtgtgactgatacaggagcgcacacacagagatatcaagaattaagtaagcaaaggcttgaccgagctattctcatttttgtacaaagtttcagaaggtcatatgtaggagaccaagctatgcattcttcaaagcagttgtatggaagattgtctgagcttctaggacttaatgaccatttaattctactcaatgtgattgttggcaaaattgctacaaatatgaagtgctatgctgagagtgaggatgttattgatcatactctgtccctgttccttgacttggcaactggctatatgactggaaagctgctgcttaagctggagagtgtaaaattcatcattgcaaatcattctccagagaatttcccatttcttgcagaatacaaatgttcacgtagtagaactacgttctattacatccttggctccttagtcttcatggaagatagccctgtgaaattcaggactttcatggaaccacttcaacaggttgcattaaacctggaggcaactcctgatgctgcttttcggactgatgtcgctaagcgtgcatttgttggttggatgagagatctacgtggcatagctatggcaaccaacagccgcaagacatatggcctcctatttgactggttgtatccatctcgcatgccacttctgctgagagccatctcactttgcactgatgaaccagaggtcaccacacccttgctcaagttcacgtatgaatttgttttgaacaaagctcaaagactgacatttgattcatcatcaccaaatgggatccttttattccgagaggttagcaagataatcgtggcttacgggtcacgaattctattgcttcctaatggcacagacatttatggaagtaaatacaaaggcatatggatctcactgactgttctttcaagggctttgtgtgggaattatgtcaattttggcgtatttgagctctatggtgacagagcacttgctgatgcccttgatatatctctgaagatgaccctctcagttccattatctgatatattggcattcaaaaagctgttgaccttagtgagaatgag

SEQ ID NO: 220602 - DNA, 4107 bp, Zea Mays
gaaaagatagctgtagacatccccggaagaaatggtcccgtgcgtgcgctcactcctttgctgtttttcttctctccgttcaccttgcgtgcgcgacatctagggcgaccgccgccgccgccgccgccctacgcccagcagcccaggtcttcgtcgcgccctttgccggctacgagcacccaccacaccagatcactgtaatccaggctgaattgtggctgaacctggtggcatattaatcttggatacttggtcaactgcaaacttgaagattcattttcatgcaatcaatggagagcctagcgcaattagaggtgttgtgtgaaaagctttataattctagagactcggctgagcgagcgcatgcagaaagcaccctcaagtgcttctcagagaacagcgagtacatttcgcagtgccaatacatattggacaatgcctcaactccatatgccctgatgctggcgagttcaagcttgctgaagcaagtttctgaccgcagtctttctttgatgctccgtctcgatatacggaattatgtcataaactatcttggcacaagggggcctaaattgcagaactttgtcattgtgtccttaattcagctggtctgtcgaattacaaaatttggatggtttgatgatgacagattcagagagactgtcaaggaagcgactgattttttaggtcttgcttcccaggatcattatttcataggcttgaagatactaaacaatctcgttacagaaatgaatcagccaaaccccgcgatgcctttgacgcttcataggaaaattgcgggttcattcaaggatcagtttcttctgcagatcttccaaatttcgttaacctcactaaaccaactgaagagtgaagctccggatgactttggacatattcctcttgaccttgccttgaagtgcttatcttttgactttgttggttctccggtggacgaaagctctgaagaatttggaacagtgcagcttcctgcatcttggaggcctcttcttcaagatccttccacactccaaatcttttttgattactacaaagtcaatgacatacgggtttcaaaagaggccttggagtgtctggttcgacttgcttctgtcaggcgcagtatttttgtggaggatcctgcaaggtcccagtttctttctcatctgatgctaggcaccaaggagatacttctaactggccaaggacttgctgatcatgacaattaccatgagttctgccgtcttttgggacgtttcaaagtgaattaccagctggcagagcttttgaatgttgagttttatggtgagtggattggtctagtagctgaatttacaactagatccttgttgtcatggcagtgggccagcaacagtgtctactaccttctaagtctttggtcaaggctggtgacatccgtgccttacttgaaaggtgaaacaccaagtcttcttgatgaaactgttcccaagatcacagaaggttttatcacttccagaattaattctgttcaggccatccttgctgacaactcactggaaaatcctttggatagtgtggaagttctccaggaccagctggagtttcttcctttcctttgcagattccagtaccaaagtagtagtctgtacatcataaacatcatggaacctcttctgcaagcttatacggaaaggtccagattacccgctcctggtgatgctgatgagctgtctgtcattgaaggccaaattgcatggatggttcacataattgcggccattgtcaaagttaggcagtcaagaaacacaagagttgattgacgcagaactctctgcccgtgtactacagttgataagtgtgactgatacaggagcgcacacacagagatatcaagaattaagtaagcaaaggcttgaccgagctattctcatttttgtacaaagtttcagaaggtcatatgtaggagaccaagctatgcattcttcaaagcagttgtatggaagattgtctgagcttctaggacttaatgaccatttaattctactcaatgtgattgttggcaaaattgctacaaatatgaagtgctatgctgagagtgaggatgttattgatcatactctgtccctgttccttgacttggcaactgggtaaagttgtgactatgtttttccagttttttttctcatttatgcgtgatgactgttcatattttttttcttgccaagtcagctatatgactggaaagctgctgcttaagctggagagtgtaaaattcatcattgcaaatcattctgtaaagtcttccgcttcccactaacttttatttattttccatcgctgcactcagttttagagataactcttttttattattcttccagccagagaatttcccatttcttgcagaatacaaatgttcacgtagtagaactacgttctattacatccttggctccttagtcttcatggaagatagccctgtgaaattcaggactttcatggaaccacttcaacaggttgcattaaacctggaggcaactcctgatgctgcttttcggactgatgtcgctaagcgtgcatttgttggttggatgagagatctacgtggcatagctatggcaaccaacagccgcaagacatatggcctcctatttgactggttgtatccatctcgcatgccacttctgctgagagccatctcactttgcactgatgaaccagaggtcaccacacccttgctcaagttcacgtatgaatttgttttgaacaaagctcaaagactgacatttgattcatcatcaccaaatgggatccttttattccgagaggttagcaagataatcgtggcttacgggtcacgaattctattgcttcctaatggcacagacatttatggaagtaaatacaaaggcatatggatctcactgactgttctttcaagggctttgtgtgggaattatgtcaattttggcgtatttgagctctatggtgacagagcacttgctgatgcccttgatatatctctgaagatgaccctctcagttccattatctgatatattggcattcaaaaagctgtcgaaagcgtactttgggtatatggaagttctgttcaacaaccatatcaagtttgttctcaatttggacacaaacacattcatacatattgtcagctcactcgaatctggcttaaaaggtctagatgcagggatatcatcacagtgcgcttctgccatcgacaacctggcagccttttactttaataacattacatctggtgactcacctccatcaccagcttcagtaaatctcgcacgacatattggagagtgtcccaatttgtttcctcagatactgaagactctttttgagatcatgctctttgaggatgctggtaatcagtggagtctgagtcgaccaatactgagcctgataatgaccagtgaacagtgaactcagagcgcacatattagcatcacagcaacaacgcctttcacagtgcttcgataagctgatgacggatgtcaataggaacttggaacctaagaatcgtgacagattcactcaaaacctgacagcatttagacgtgattttcgactgaagtaacagctccttggtaccagctatcagtttgaaggtgttcctgcatgatgtaaatactccagttaccttcttttttggaaccacctttctgtgggttgagaaaagaagagcttgtccttaggtttgccttggattggctgaagatggtcttgttgatgcatgtggtagtgaaagcagctgtaaatttcatagcatgtcattttaatcagaatggtgaaaggtggagattgtttcttttgttttttattttatattgcatccctttagcatgtacagcaaaattggtgctagaacaggggtggctgtttgcccaatttgttaagtgggaggcagtcatctcagatataattcatttgttaagaagtcaacgaggtaaaggatgtaaatgattccgttggctttgctgaatatgaaagttgaacagtaagaaggatggctcagttgcatccgctgtgcagattgaactgttaatgataacaatttcttttttttttgtctctgtttggtattgatactctgcag

SEQ ID NO: 220603 - DNA, 4238 bp, Zea Mays
gaaaagatagctgtagacatccccggaagaaatggtcccgtgcgtgcgctcactcctttgctgtttttcttctctccgttcaccttgcgtgcgcgacatctagggcgaccgccgccgccgccgccgccctacgcccagcagcccaggtcttcgtcgcgccctttgccggctacgagcacccaccacaccagatcactgtaatccaggctgaattgtggctggtattggcgatataagcattcgttagctgtttaaattgtgtcttttgtctttgattaagcgtcattggaaaggctgtcatgagaaaactcttttgttcaaacgtttctctcctgtaatatgaatgtactgtgacaatccttcatcctatgctagaatcacatattttagcttctaagctccttacagttctttacaagtttcttattcaaccgaatacctaatgcattaattcggtgcttgtgacaagcattcatgcaaattcgtggatattaattcagaacctggtggcatattaatcttggatacttggtcaactgcaaacttgaagattcattttcatgcaatcaatggagagcctagcgcaattagaggtgttgtgtgaaaagctttataattctagagactcggctgagcgagcgcatgcagaaagcaccctcaagtgcttctcagagaacagcgagtacatttcgcagtgccaatacatattggacaatgcctcaactccatatgccctgatgctggcgagttcaagcttgctgaagcaagtttctgaccgcagtctttctttgatgctccgtctcgatatacggaattatgtcataaactatcttggcacaagggggcctaaattgcagaactttgtcattgtgtccttaattcagctggtctgtcgaattacaaaatttggatggtttgatgatgacagattcagagagactgtcaaggaagcgactgattttttaggtcttgcttcccaggatcattatttcataggcttgaagatactaaacaatctcgttacagaaatgaatcagccaaaccccgcgatgcctttgacgcttcataggaaaattgcgggttcattcaaggatcagtttcttctgcagatcttccaaatttcgttaacctcactaaaccaactgaagagtgaagctccggatgactttggacatattcctcttgaccttgccttgaagtgcttatcttttgactttgttggttctccggtggacgaaagctctgaagaatttggaacagtgcagcttcctgcatcttggaggcctcttcttcaagatccttccacactccaaatcttttttgattactacaaagtcaatgacatacgggtttcaaaagaggccttggagtgtctggttcgacttgcttctgtcaggcgcagtatttttgtggaggatcctgcaaggtcccagtttctttctcatctgatgctaggcaccaaggagatacttctaactggccaaggacttgctgatcatgacaattaccatgagttctgccgtcttttgggacgtttcaaagtgaattaccagagcttttgaatgttgagttttatggtgagtggattggtctagtagctgaatttacaactagatccttgttgtcatggcagtgggccagcaacagtgtctactaccttctaagtctttggtcaaggctggtgacatccgtgccttacttgaaaggtgaaacaccaagtcttcttgatgaaactgttcccaagatcacagaaggttttatcacttccagaattaattctgttcaggccatccttgctgacaactcactggaaaatcctttggatagtgtggaagttctccaggaccagctggagtttcttcctttcctttgcagattccagtaccaaagtagtagtctgtacatcataaacatcatggaacctcttctgcaagcttatacggtccagattacccgctcctggtgatgctgatgagctgtctgtcattgaaggccaaattgcatggatggttcacataattgcggccattgtcaaagttaggcaggtaacaggtgttagtcaagaaacacaagagttgattgacgcagaactctctgcccgtgtactacagttgataagtgtgactgatacaggagcgcacacacagagatatcaagaattaagtaagcaaaggcttgaccgagctattctcatttttgtacaaagtttcagaaggtcatatgtaggagaccaagctatgcattcttcaaagcagttgtatggaagattgtctgagcttctaggacttaatgaccatttaattctactcaatgtgattgttggcaaaattgctacaaatatgaagtgctatgctgagagtgaggatgttattgatcatactctgtccctgttccttgacttggcaactggctatatgactggaaagctgctgcttaagctggagagtgtaaaattcatcattgcaaatcattctccagagaatttcccatttcttgcagaatacaaatgttcacgtagtagaactacgttctattacatccttggctccttagtcttcatggaagatagccctgtgaaattcaggactttcatggaaccacttcaacaggttgcattaaacctggaggcaactcctgatgctgcttttcggactgatgtcgctaagcgtgcatttgttggttggatgagagatctacgtggcatagctatggcaaccaacagccgcaagacatatggcctcctatttgactggttgtatccatctcgcatgccacttctgctgagagccatctcactttgcactgatgaaccagaggtcaccacacccttgctcaagttcacgtatgaatttgttttgaacaaagctcaaagactgacatttgattcatcatcaccaaatgggatccttttattccgagaggttagcaagataatcgtggcttacgggtcacgaattctattgcttcctaatggcacagacatttatggaagtaaatacaaaggcatatggatctcactgactgttctttcaagggctttgtgtgggaattatgtcaattttggcgtatttgagctctatggtgacagagcacttgctgatgcccttgatatatctctgaagatgaccctctcagttccattatctgatatattggcattcaaaaagctgtcgaaagcgtactttgggtatatggaagttctgttcaacaaccatatcaagtttgttctcaatttggacacaaacacattcatacatattgtcagctcactcgaatctggcttaaaaggtctagatgcagggatatcatcacagtgcgcttctgccatcgacaacctggcagccttttactttaataacattacatctggtgactcacctccatcaccagcttcagtaaatctcgcacgacatattggagagtgtcccaatttgtttcctcagatactgaagactctttttgagatcatgctctttgaggatgctggtaatcagtggagtctgagtcgaccaatactgagcctgataatgaccagtgaacagatgttcagtgaactcagagcgcacatattagcatcacagactgtggaccagcaacaacgcctttcacagtgcttcgataagctgatgacggatgtcaataggaacttggaacctaagaatcgtgacagattcactcaaaacctgacagcatttagacgtgattttcgactgaagtaacagctccttggtaccagctatcagtttgaaggtgttcctgcatgatgtaaatactccagttaccttcttttttggaaccacctttctgtgggttgagaaaagaagagcttgtccttaggtttgccttggattggctgaagatggtcttgttgatgcatgtggtagtgaaagcagctgtaaatttcatagcatgtcattttaatcagaatggtgaaaggtggagattgtttcttttgttttttattttatattgcatccctttagcatgtacagcaaaattggtgctagaacaggggtggctgtttgcccaatttgttaagtgggaggcagtcatctcagatataattcatttgttaagaagtcaacgaggtaaaggatgtaaatgattccgttggctttgctgaatatgaaagttgaacagtaagaaggatggctcagttgcatccgctgtgcagattgaactgttaatgataacaatttcttttttttttgtctctgtttggtattgatactctgcag

SEQ ID NO: 220604 - DNA, 3732 bp, Zea Mays
gaaaagatagctgtagacatccccggaagaaatggtcccgtgcgtgcgctcactcctttgctgtttttcttctctccgttcaccttgcgtgcgcgacatctagggcgaccgccgccgccgccgccgccctacgcccagcagcccaggtcttcgtcgcgccctttgccggctacgagcacccaccacaccagatcactgtaatccaggctgaattgtggctgggaattatgtcataaactatcttggcacaagggggcctaaattgcagaactttgtcattgtgtccttaattcagctggtctgtcgaattacaaaatttggatggtttgatgatgacagattcagagagactgtcaaggaagcgactgattttttaggtcttgcttcccaggatcattatttcataggcttgaagatactaaacaatctcgttacagaaatgaatcagccaaaccccgcgatgcctttgacgcttcataggaaaattgcgggttcattcaaggatcagtttcttctgcagatcttccaaatttcgttaacctcactaaaccaactgaagagtgaagctccggatgactttggacatattcctcttgaccttgccttgaagtgcttatcttttgactttgttggttctccggtggacgaaagctctgaagaatttggaacagtgcagcttcctgcatcttggaggcctcttcttcaagatccttccacactccaaatcttttttgattactacaaagtcaatgacatacgggtttcaaaagaggccttggagtgtctggttcgacttgcttctgtcaggcgcagtatttttgtggaggatcctgcaaggtcccagtttctttctcatctgatgctaggcaccaaggagatacttctaactggccaaggacttgctgatcatgacaattaccatgagttctgccgtcttttgggacgtttcaaagtgaattaccagctggcagagcttttgaatgttgagttttatggtgagtggattggtctagtagctgaatttacaactagatccttgttgtcatggcagtgggccagcaacagtgtctactaccttctaagtctttggtcaaggctggtgacatccgtgccttacttgaaaggtgaaacaccaagtcttcttgatgaaactgttcccaagatcacagaaggttttatcacttccagaattaattctgttcaggccatccttgctgacaactcactggaaaatcctttggatagtgtggaagttctccaggaccagctggagtttcttcctttcctttgcagattccagtaccaaagtagtagtctgtacatcataaacatcatggaacctcttctgcaagcttatacggtccagattacccgctcctggtgatgctgatgagctgtctgtcattgaaggccaaattgcatggatggttcacataattgcggccattgtcaaagttaggcaggtaacaggtgttagtcaagaaacacaagagttgattgacgcagaactctctgcccgtgtactacagttgataagtgtgactgatacaggagcgcacacacagagatatcaagaattaagtaagcaaaggcttgaccgagctattctcatttttgtacaaagtttcagaaggtcatatgtaggagaccaagctatgcattcttcaaagcagttgtatggaagattgtctgagcttctaggacttaatgaccatttaattctactcaatgtgattgttggcaaaattgctacaaatatgaagtgctatgctgagagtgaggatgttattgatcatactctgtccctgttccttgacttggcaactggctatatgactggaaagctgctgcttaagctggagagtgtaaaattcatcattgcaaatcattctgtaaagtcttccgcttcccactaacttttatttattttccatcgctgcactcagttttagagataactcttttttattattcttccagccagagaatttcccatttcttgcagaatacaaatgttcacgtagtagaactacgttctattacatccttggctccttagtcttcatggaagatagccctgtgaaattcaggactttcatggaaccacttcaacaggttgcattaaacctggaggcaactcctgatgctgcttttcggactgatgtcgctaagcgtgcatttgttggttggatgagagatctacgtggcatagctatggcaaccaacagccgcaagacatatggcctcctatttgactggttgtatccatctcgcatgccacttctgctgagagccatctcactttgcactgatgaaccagaggtcaccacacccttgctcaagttcacgtatgaatttgttttgaacaaagctcaaagactgacatttgattcatcatcaccaaatgggatccttttattccgagaggttagcaagataatcgtggcttacgggtcacgaattctattgcttcctaatggcacagacatttatggaagtaaatacaaaggcatatggatctcactgactgttctttcaagggctttgtgtgggaattatgtcaattttggcgtatttgagctctatggtgacagagcacttgctgatgcccttgatatatctctgaagatgaccctctcagttccattatctgatatattggcattcaaaaagctgtcgaaagcgtactttgggtatatggaagttctgttcaacaaccatatcaagtttgttctcaatttggacacaaacacattcatacatattgtcagctcactcgaatctggcttaaaaggtctagatgcagggatatcatcacagtgcgcttctgccatcgacaacctggcagccttttactttaataacattacatctggtgactcacctccatcaccagcttcagtaaatctcgcacgacatattggagagtgtcccaatttgtttcctcagatactgaagactctttttgagatcatgctctttgaggatgctggtaatcagtggagtctgagtcgaccaatactgagcctgataatgaccagtgaacagatgttcagtgaactcagagcgcacatattagcatcacagcaacaacgcctttcacagtgcttcgataagctgatgacggatgtcaataggaacttggaacctaagaatcgtgacagattcactcaaaacctgacagcatttagacgtgattttcgactgaagtaacagctccttggtaccagctatcagtttgaaggtgttcctgcatgatgtaaatactccagttaccttcttttttggaaccacctttctgtgggttgagaaaagaagagcttgtccttaggtttgccttggattggctgaagatggtcttgttgatgcatgtggtagtgaaagcagctgtaaatttcatagcatgtcattttaatcagaatggtgaaaggtggagattgtttcttttgttttttattttatattgcatccctttagcatgtacagcaaaattggtgctagaacaggggtggctgtttgcccaatttgttaagtgggaggcagtcatctcagatataattcatttgttaagaagtcaacgaggtaaaggatgtaaatgattccgttggctttgctgaatatgaaagttgaacagtaagaaggatggctcagttgcatccgctgtgcagattgaactgttaatgataacaatttcttttttttttgtctctgtttggtattgatactctgcag

SEQ ID NO: 220605 - DNA, 4126 bp, Zea Mays
gaaaagatagctgtagacatccccggaagaaatggtcccgtgcgtgcgctcactcctttgctgtttttcttctctccgttcaccttgcgtgcgcgacatctagggcgaccgccgccgccgccgccgccctacgcccagcagcccaggtcttcgtcgcgccctttgccggctacgagcacccaccacaccagatcactgtaatccaggctgaattgtggctggtattggcgatataagcattcgttagctgtttaaattgtgtcttttgtctttgattaagcgtcattggaaaggctgtcatgagaaaactcttttgttcaaacgtttctctcctgtaatatgaatcattcatgcaaattcgtggatattaattcagaacctggtggcatattaatcttggatacttggtcaactgcaaacttgaagattcattttcatgcaatcaatggagagcctagcgcaattagaggtgttgtgtgaaaagctttataattctagagactcggctgagcgagcgcatgcagaaagcaccctcaagtgcttctcagagaacagcgagtacatttcgcagtgccaatacatattggacaatgcctcaactccatatgccctgatgctggcgagttcaagcttgctgaagcaagtttctgaccgcagtctttctttgatgctccgtctcgatatacggaattatgtcataaactatcttggcacaagggggcctaaattgcagaactttgtcattgtgtccttaattcagctggtctgtcgaattacaaaatttggatggtttgatgatgacagattcagagagactgtcaaggaagcgactgattttttaggtcttgcttcccaggatcattatttcataggcttgaagatactaaacaatctcgttacagaaatgaatcagccaaaccccgcgatgcctttgacgcttcataggaaaattgcgggttcattcaaggatcagtttcttctgcagatcttccaaatttcgttaacctcactaaaccaactgaagagtgaagctccggatgactttggacatattcctcttgaccttgccttgaagtgcttatcttttgactttgttggttctccggtggacgaaagctctgaagaatttggaacagtgcagcttcctgcatcttggaggcctcttcttcaagatccttccacactccaaatcttttttgattactacaaagtcaatgacatacgggtttcaaaagaggccttggagtgtctggttcgacttgcttctgtcaggcgcagtatttttgtggaggatcctgcaaggtcccagtttctttctcatctgatgctaggcaccaaggagatacttctaactggccaaggacttgctgatcatgacaattaccatgagttctgccgtcttttgggacgtttcaaagtgaattaccagctggcagagcttttgaatgttgagttttatggtgagtggattggtctagtagctgaatttacaactagatccttgttgtcatggcagtgggccagcaacagtgtctactaccttctaagtctttggtcaaggctggtgacatccgtgccttacttgaaaggtgaaacaccaagtcttcttgatgaaactgttcccaagatcacagaaggttttatcacttccagaattaattctgttcaggccatccttgctgacaactcactggaaaatcctttggatagtgtggaagttctccaggaccagctggagtttcttcctttcctttgcagattccagtaccaaagtagtagtctgtacatcataaacatcatggaacctcttctgcaagcttatacggaaaggtccagattacccgctcctggtgatgctgatgagctgtctgtcattgaaggccaaattgcatggatggttcacataattgcggccattgtcaaagttaggcaggtaacaggtgttagtcaagaaacacaagagttgattgacgcagaactctctgcccgtgtactacagttgataagtgtgactgatacaggagcgcacacacagagatatcaagaattaagtaagcaaaggcttgaccgagctattctcatttttgtacaaagtttcagaaggtcatatgtaggagaccaagctatgcattcttcaaagcagttgtatggaagattgtctgagcttctaggacttaatgaccatttaattctactcaatgtgattgttggcaaaattgctacaaatatgaagtgctatgctgagagtgaggatgttattgatcatactctgtccctgttccttgacttggcaactggctatatgactggaaagctgctgcttaagctggagagtgtaaaattcatcattgcaaatcattctccagagaatttcccatttcttgcagaatacaaatgttcacgtagtagaactacgttctattacatccttggctccttagtcttcatggaagatagccctgtgaaattcaggactttcatggaaccacttcaacaggttgcattaaacctggaggcaactcctgatgctgcttttcggactgatgtcgctaagcgtgcatttgttggttggatgagagatctacgtggcatagctatggcaaccaacagccgcaagacatatggcctcctatttgactggttgtatccatctcgcatgccacttctgctgagagccatctcactttgcactgatgaaccagaggtcaccacacccttgctcaagttcacgtatgaatttgttttgaacaaagctcaaagactgacatttgattcatcatcaccaaatgggatccttttattccgagaggttagcaagataatcgtggcttacgggtcacgaattctattgcttcctaatggcacagacatttatggaagtaaatacaaaggcatatggatctcactgactgttctttcaagggctttgtgtgggaattatgtcaattttggcgtatttgagctctatggtgacagagcacttgctgatgcccttgatatatctctgaagatgaccctctcagttccattatctgatatattggcattcaaaaagctgtcgaaagcgtactttgggtatatggaagttctgttcaacaaccatatcaagtttgttctcaatttggacacaaacacattcatacatattgtcagctcactcgaatctggcttaaaaggtctagatgcagggatatcatcacagtgcgcttctgccatcgacaacctggcagccttttactttaataacattacatctggtgactcacctccatcaccagcttcagtaaatctcgcacgacatattggagagtgtcccaatttgtttcctcagatactgaagactctttttgagatcatgctctttgaggatgctggtaatcagtggagtctgagtcgaccaatactgagcctgataatgaccagtgaacagatgttcagtgaactcagagcgcacatattagcatcacagactgtggaccagcaacaacgcctttcacagtgcttcgataagctgatgacggatgtcaataggaacttggaacctaagaatcgtgacagattcactcaaaacctgacagcatttagacgtgattttcgactgaagtaacagctccttggtaccagctatcagtttgaaggtgttcctgcatgatgtaaatactccagttaccttcttttttggaaccacctttctgtgggttgagaaaagaagagcttgtccttaggtttgccttggattggctgaagatggtcttgttgatgcatgtggtagtgaaagcagctgtaaatttcatagcatgtcattttaatcagaatggtgaaaggtggagattgtttcttttgttttttattttatattgcatccctttagcatgtacagcaaaattggtgctagaacaggggtggctgtttgcccaatttgttaagtgggaggcagtcatctcagatataattcatttgttaagaagtcaacgaggtaaaggatgtaaatgattccgttggctttgctgaatatgaaagttgaacagtaagaaggatggctcagttgcatccgctgtgcagattgaactgttaatgataacaatttcttttttttttgtctctgtttggtattgatactctgcag

SEQ ID NO: 220606 - DNA, 3891 bp, Zea Mays
cactcctttgctgtttttcttctctccgttcaccttgcgtgcgcgacatctagggcgaccgccgccgccgccgccgccctacgcccagcagcccaggtcttcgtcgcgccctttgccggctacgagcacccaccacaccagaacctggtggcatattaatcttggatacttggtcaactgcaaacttgaagattcattttcatgcaatcaatggagagcctagcgcaattagaggtgttgtgtgaaaagctttataattctagagactcggctgagcgagcgcatgcagaaagcaccctcaagtgcttctcagagaacagcgagtacatttcgcagtgccaatacatattggacaatgcctcaactccatatgccctgatgctggcgagttcaagcttgctgaagcaagtttctgaccgcagtctttctttgatgctccgtctcgatatacggaattatgtcataaactatcttggcacaagggggcctaaattgcagaactttgtcattgtgtccttaattcagctggtctgtcgaattacaaaatttggatggtttgatgatgacagattcagagagactgtcaaggaagcgactgattttttaggtcttgcttcccaggatcattatttcataggcttgaagatactaaacaatctcgttacagaaatgaatcagccaaaccccgcgatgcctttgacgcttcataggaaaattgcgggttcattcaaggatcagtttcttctgcagatcttccaaatttcgttaacctcactaaaccaactgaagagtgaagctccggatgactttggacatattcctcttgaccttgccttgaagtgcttatcttttgactttgttggttctccggtggacgaaagctctgaagaatttggaacagtgcagcttcctgcatcttggaggcctcttcttcaagatccttccacactccaaatcttttttgattactacaaagtcaatgacatacgggtttcaaaagaggccttggagtgtctggttcgacttgcttctgtcaggcgcagtatttttgtggaggatcctgcaaggtcccagtttctttctcatctgatgctaggcaccaaggagatacttctaactggccaaggacttgctgatcatgacaattaccatgagttctgccgtcttttgggacgtttcaaagtgaattaccagctggcagagcttttgaatgttgagttttatggtgagtggattggtctagtagctgaatttacaactagatccttgttgtcatggcagtgggccagcaacagtgtctactaccttctaagtctttggtcaaggctggtgacatccgtgccttacttgaaaggtgaaacaccaagtcttcttgatgaaactgttcccaagatcacagaaggttttatcacttccagaattaattctgttcaggccatccttgctgacaactcactggaaaatcctttggatagtgtggaagttctccaggaccagctggagtttcttcctttcctttgcagattccagtaccaaagtagtagtctgtacatcataaacatcatggaacctcttctgcaagcttatacggaaaggtccagattacccgctcctggtgatgctgatgagctgtctgtcattgaaggccaaattgcatggatggttcacataattgcggccattgtcaaagttaggcaggtaacaggtgttagtcaagaaacacaagagttgattgacgcagaactctctgcccgtgtactacagttgataagtgtgactgatacaggagcgcacacacagagatatcaagaattaagtaagcaaaggcttgaccgagctattctcatttttgtacaaagtttcagaaggtcatatgtaggagaccaagctatgcattcttcaaagcagttgtatggaagattgtctgagcttctaggacttaatgaccatttaattctactcaatgtgattgttggcaaaattgctacaaatatgaagtgctatgctgagagtgaggatgttattgatcatactctgtccctgttccttgacttggcaactggctatatgactggaaagctgctgcttaagctggagagtgtaaaattcatcattgcaaatcattctccagagaatttcccatttcttgcagaatacaaatgttcacgtagtagaactacgttctattacatccttggctccttagtcttcatggaagatagccctgtgaaattcaggactttcatggaaccacttcaacaggttgcattaaacctggaggcaactcctgatgctgcttttcggactgatgtcgctaagcgtgcatttgttggttggatgagagatctacgtggcatagctatggcaaccaacagccgcaagacatatggcctcctatttgactggttgtatccatctcgcatgccacttctgctgagagccatctcactttgcactgatgaaccagaggtcaccacacccttgctcaagttcacgtatgaatttgttttgaacaaagctcaaagactgacatttgattcatcatcaccaaatgggatccttttattccgagaggttagcaagataatcgtggcttacgggtcacgaattctattgcttcctaatggcacagacatttatggaagtaaatacaaaggcatatggatctcactgactgttctttcaagggctttgtgtgggaattatgtcaattttggcgtatttgagctctatggtgacagagcacttgctgatgcccttgatatatctctgaagatgaccctctcagttccattatctgatatattggcattcaaaaagctgtcgaaagcgtactttgggtatatggaagttctgttcaacaaccatatcaagtttgttctcaatttggacacaaacacattcatacatattgtcagctcactcgaatctggcttaaaaggtctagatgcagggatatcatcacagtgcgcttctgccatcgacaacctggcagccttttactttaataacattacatctggtgactcacctccatcaccagcttcagtaaatctcgcacgacatattggagagtgtcccaatttgtttcctcagatactgaagactctttttgagatcatgctctttgaggatgctggtaatcagtggagtctgagtcgaccaatactgagcctgataatgaccagtgaacagatgttcagtgaactcagagcgcacatattagcatcacagactgtggaccagcaacaacgcctttcacagtgcttcgataagctgatgacggatgtcaataggaacttggaacctaagaatcgtgacagattcactcaaaacctgacagcatttagacgtgattttcgactgaagtaacagctccttggtaccagctatcagtttgaaggtgttcctgcatgatgtaaatactccagttaccttcttttttggaaccacctttctgtgggttgagaaaagaagagcttgtccttaggtttgccttggattggctgaagatggtcttgttgatgcatgtggtagtgaaagcagctgtaaatttcatagcatgtcattttaatcagaatggtgaaaggtggagattgtttcttttgttttttattttatattgcatccctttagcatgtacagcaaaattggtgctagaacaggggtggctgtttgcccaatttgttaagtgggaggcagtcatctcagatataattcatttgttaagaagtcaacgaggtaaaggatgtaaatgattccgttggctttgctgaatatgaaagttgaacagtaagaaggatggctcagttgcatccgctgtgcagattgaactgttaatgataacaatttcttttttttttgtctctgtttggtattgatactctgcag

SEQ ID NO: 220607 - DNA, 871 bp, Zea Mays
ggcggtttgcctagcttccgcacgcgagaggcacagggcgagcgcacgcgagagggaggcagccggcactgcaactgctgaagtccgtgtgtttttcttatttttcagtttggcccttctgtacgtttaatgcagcccgtatctccgcctcccgcggcccgtctcgacacttccatcaccgcccatcgaaatccttctaccgccccgctccgtcatccatggctcgtctgctcgcggcgcgagcccttgcgctggcccgcccctcggggacgccatccgccctacgcttctgcccctcccgtgcgctgtcggacgaggtggagttcgtcgagatcgacctatccgaggagtcccctgcctcttcatccggaggggaaggcgagggcgactcagccacggttcaggcgcagatggggtcgcggcgcctggaggacgccatctatggggtgctcgtgcgccgggcggcgcccgaatggctccccttcgtgcccggggcatcctactgggtcccgccgttgccgcggccgctcggggtggcgagtctcctcggcgcggctgtgtacaccgcgaggggcgccacggcgatgacggaggaggaggcgttcagcttcactaccgtacgggggtgtccatccgcggcgtactttgtgggaggtggtcagagtttttggtctccttaggctccaaagtgtccagggccagaaatggaaaatttctgcgtccagtgaagaaatcaagggaagatgctactcaaactgacgatgatgatgaaagctaattctatgctgcttcacctggggctcctaccgaagagggctgctcggggctgtgaagctcctctgatgattgtagatgtagacagctagggagc

SEQ ID NO: 220608 - DNA, 839 bp, Zea Mays
atttttcagtttggcccttctgtacgtttaatgcagcccgtatctccgcctcccgcggcccgtctcgacacttccatcaccgcccatcgaaatccttctaccgccccgctccgtcatccatggctcgtctgctcgcggcgcgagcccttgcgctggcccgcccctcggggacgccatccgccctacgcttctgcccctcccgtgcgctgtcggacgaggtggagttcgtcgagatcgacctatccgaggagtcccctgcctcttcatccggaggggaaggcgagggcgactcagccacggttcaggcgcagatggggtcgcggcgcctggaggacgccatctatggggtgctcgtgcgccgggcggcgcccgaatggctccccttcgtgcccggggcatcctactgggtcccgccgttgccgcggccgctcggggtggcgagtctcctcggcgcggctgtgtacaccgcgaggggcgccacggcgatgacggaggaggaggcgttcagcttcactaccgtacgggggtgtccatccgcggcgtactttgtgggaggtttgagcgggttcgcaaaccaagccgtgtgcatgtactctggtctgggttgggtagctctgcacaggtggtcagagtttttggtctccttaggctccaaagtgtccagggccagaaatggaaaatttctgcgtccagtgaagaaatcaagggaagatgctactcaaactgacgatgatgatgaaagctaattctatgctgcttcacctggggctcctaccgaagagggctgctcggggctgtgaagctcctctgatgattgtagatgtagacagctagggagc

SEQ ID NO: 220609 - DNA, 643 bp, Zea Mays
tctgtacgtttaatgcagcccgtatctccgcctcccgcggcccgtctcgacacttccatcaccgcccatcgaaatccttctaccgccccgctccgtcatccatggctcgtctgctcgcggcgcgagcccttgcgctggcccgcccctcggggacgccatccgccctacgcttctgcccctcccgtgcgctgtcggacgaggtggagttcgtcgagatcgacctatccgaggagtcccctgcctcttcatccggaggggaaggcgagggcgactcagccacggttcaggcgcagatggggtcgcggcgcctggaggacgccatctatggggtgctcgtgcgccgggcggcgcccgaatggctccccttcgtgcccggggcatcctactgggtcccgccgttgccgcggccgctcggggtggcgagtctcctcggcgcggctgtgtacaccgcgaggggcgccacggcgatgacggaggaggaggcgttcagcttcactaccgtacgggggtgtccatccgcggcgtactttgtgggaggtttgagcgggttcgcaaaccaagccgtgtgcatgtactctggtctgggttgggtagctctgcacagttgataagtcccatcgctagaaggaaaaacaaaaaagga

SEQ ID NO: 220610 - DNA, 2518 bp, Zea Mays
cgtctccttcggcatggaggacctctccgctttgactctgtttaccgcgcacagataccattccggaagggacccagacgcagcctacacctgcacggctgcaccgcagggaggcgccatctgacccggccccggcggcgctggctgccccgtcgcccccagacccacccagaggaatcacgcagatattgccttcccccgtggcatgcacccaccgacccacatgcgcgcgcgcgcacccatcgggaattccggacccgattcgctttcctatttcattccactccacccgcttttgggtgtgtggacgatgcatggggagagagagagggagcgggagagtctcctcctcctccccgaccggagcgccggtgccatggaagggggcggcgagcaccaccacccgcttagcgtattcctccgggacgcgaggctcgcattcagatgggacgagctcggtcaggagatcatgaggatcgcggtgcccggcgcgctcgcgctcatggctgacccagtcgcctccctcgtcgacaccgccttcattggccacataggtccagttgaacttggagctgtaggtgtatcaattgccgtgtttaatcagagacaatgacaaaatacatcaacaaaacgaacgcaatgtttcggtcagtgaaatggatgaactgattcctcctgaaggggctagtgccagtaccagcatatcgtcttttgaaactgattcatgtgaggtcagtgttgagcagaagaggaaaaatattccatcagtctctacagcactactacttggtggggtgcttggcctacttgaaaccctactgcttgttctctctgcaaaacctatcttaggctacatgggtgtaaaaccggactctgcgatgatgaagcccgcattgcagtacttagttctcagatctcttggtgctcctgctgttctgttatctctggcaatacaaggagtctttcgcggatttaaggatacaaagacgcctctatacgcaactgtggctggagatgcgatcaatatagttttggatccaatatttatgtttgtgttccaatatggtgttagtggtgccgccatcgctcatgttatatcacatgtatggtggaacattctgcagatatttcattgcatccatactcttatggagattaaggttgcatgttgatttgttgccacctagcttcaaacatctgcagtttggccgatttcttaaaaatggttttctgctacttgcacgagttattgccgcaacttgttgtgtgacactatccgcttcaatggccgcacggctaggttcaactccaatggctgcattccagatctgcttgcaaacctggttggcttgctcacttcttgccgatggattggcttttgctggacaagccatacttgcaagtgcatttgctcgtaaggactatccgaaggccaccgccacagcttctcgtatcttgcagctggccttggtcttgggacttctcctaagcatacttcttggtgttggtctgcgcatagggtccagattatttacatccgatcagggtgtactgcatcatatctacataggaataccgtttgtctgccttactcaaccaatcaacgctctggcttttgtttttgatggtatcaattacggagcatcagatttcggatatgctgcctactcaatggtccttgttgccgttgtcagtatcatttgcatcctcactcttgaaagttatggcgggtttattggaatctggatagctctggtgatctacatgagcctccggatgtttgctggattttggaggatagggacggcacaagggccctgggcttatcttcgcggctgaacatagaggcagagctagtaacctgactcaccagcacgacgagcacatggtttattattgttcacggaagtggcagtccttgatgtggtctcgtaaatatgccatacggactcagggtctttttggtttgctacctaacttgtcatactttgcctaacttttctgcttaaggttagttcttcaattcggacaactaaccttaggcaaagtgtgacgcagttagccacgagccaaacagtccctcagttcgtcaaacttaggtctgtgagtttggcggatgtgtaggcactcacatcgttaaacaaatctgttgtactggcctagattgtgacagatgcaaaattatgtcatggttggctactatgcgtagcagggctgcaatacatgtttccatcaggaaggctgtcacaagtttaacacacttgttgtaccaaggcgtgtgaactatagctattttttctgtcctaggacaaactgtgccacgacgtgttgtagctatttttctgtcccgtattcatatgagcagatacatggtcctgcaagtaacacatatatgtaactaaaaatggtgaggaccgttccatgtatgtactctgtgcttcctaacttttagggcccgttcggttgtaccaaaatgagtcaggattcattccagctcatcaaaatctatataaattag

SEQ ID NO: 220611 - DNA, 2761 bp, Zea Mays
agataccattccggaagggacccagacgcagcctacacctgcacggctgcaccgcagggaggcgccatctgacccggccccggcggcgctggctgccccgtcgcccccagacccacccagaggaatcacgcagatattgccttcccccgtggcatgcacccaccgacccacatgcgcgcgcgcgcacccatcgggaattccggacccgattcgctttcctatttcattccactccacccgcttttgggtgtgtggacgatgcatggggagagagagagggagcgggagagtctcctcctcctccccgaccggagcgccggtgccatggaagggggcggcgagcaccaccacccgcttagcgtattcctccgggacgcgaggctcgcattcagatgggacgagctcggtcaggagatcatgaggatcgcggtgcccggcgcgctcgcgctcatggctgacccagtcgcctccctcgtcgacaccgccttcattggccacataggtccagttgaacttggagctgtaggtgtatcaattgccgtgtttaatcagagacaatgacaaaatacatcaacaaaacgaacgcaatgtttcggtcagtgaaatggatgaactgattcctcctgaaggggctagtgccagtaccagcatatcgtcttttgaaactgattcatgtgaggtcagtgttgagcagaagaggaaaaatattccatcagtctctacagcactactacttggtggggtgcttggcctacttgaaaccctactgcttgttctctctgcaaaacctatcttaggctacatgggtgtaaaaccggactctgcgatgatgaagcccgcattgcagtacttagttctcagatctcttggtgctcctgctgttctgttatctctggcaatacaaggagtctttcgcggatttaaggatacaaagacgcctctatacgcaactggtataataatatttcatttcttagatagtaaatgatatatacttggcaaattgaattctaaaagaaatcttcgacttcactctcatcatgactcagctttgatttgccattatttagttatataatgctaatagtttgtggcaatgtttcttggaaggatttctgtttttttctttatgtgtctaatggttttatgacaaccagtggctggagatgcgatcaatatagttttggatccaatatttatgtttgtgttccaatatggtgttagtggtgccgccatcgctcatgttatatcacatgtatggtggaacattctgcagatatttcattgcatccatactcttatggagattaaggttgcatgttgatttgttgccacctagcttcaaacatctgcagtttggccgatttcttaaaaatggttttctgctacttgcacgagttattgccgcaacttgttgtgtgacactatccgcttcaatggccgcacggctaggttcaactccaatggctgcattccagatctgcttgcaaacctggttggcttgctcacttcttgccgatggattggcttttgctggacaagccatacttgcaagtgcatttgctcgtaaggactatccgaaggccaccgccacagcttctcgtatcttgcagctggccttggtcttgggacttctcctaagcatacttcttggtgttggtctgcgcatagggtccagattatttacatccgatcagggtgtactgcatcatatctacataggaataccgtttgtctgccttactcaaccaatcaacgctctggcttttgtttttgatggtatcaattacggagcatcagatttcggatatgctgcctactcaatggcaagctgacagacttctacttgtcacgcatattcttctaataaacctcgtgccttacaatttttttactgaaccatgcatgtatcgtcaggtccttgttgccgttgtcagtatcatttgcatcctcactcttgaaagttatggcgggtttattggaatctggatagctctggtgatctacatgagcctccggatgtttgctggattttggaggatagggacggcacaagggccctgggcttatcttcgcggctgaacatagaggcagagctagtaacctgactcaccagcacgacgagcacatggtttattattgttcacggaagtggcagtccttgatgtggtctcgtaaatatgccatacggactcagggtctttttggtttgctacctaacttgtcatactttgcctaacttttctgcttaaggttagttcttcaattcggacaactaaccttaggcaaagtgtgacgcagttagccacgagccaaacagtccctcagttcgtcaaacttaggtctgtgagtttggcggatgtgtaggcactcacatcgttaaacaaatctgttgtactggcctagattgtgacagatgcaaaattatgtcatggttggctactatgcgtagcagggctgcaatacatgtttccatcaggaaggctgtcacaagtttaacacacttgttgtaccaaggcgtgtgaactatagctattttttctgtcctaggacaaactgtgccacgacgtgttgtagctatttttctgtcccgtattcatatgagcagatacatggtcctgcaagtaacacatatatgtaactaaaaatggtgaggaccgttccatgtatgtactctgtgcttcctaacttttagggcccgttcggttgtaccaaaatgagtcaggattcattccagctcatcaaaatctatataaattag

SEQ ID NO: 220612 - DNA, 2417 bp, Zea Mays
agataccattccggaagggacccagacgcagcctacacctgcacggctgcaccgcagggaggcgccatctgacccggccccggcggcgctggctgccccgtcgcccccagacccacccagaggaatcacgcagatattgccttcccccgtggcatgcacccaccgacccacatgcgcgcgcgcgcacccatcgggaattccggacccgattcgctttcctatttcattccactccacccgcttttgggtgtgtggacgatgcatggggagagagagagggagcgggagagtctcctcctcctccccgaccggagcgccggtgccatggaagggggcggcgagcaccaccacccgcttagcgtattcctccgggacgcgaggctcgcattcagatgggacgagctcggtcaggagatcatgaggatcgcggtgcccggcgcgctcgcgctcatggctgacccagtcgcctccctcgtcgacaccgccttcattggccacataggtccagttgaacttggagctgtaggtgtatcaattgccgtgtttaatcagagacaatgacaaaatacatcaacaaaacgaacgcaatgtttcggtcagtgaaatggatgaactgattcctcctgaaggggctagtgccagtaccagcatatcgtcttttgaaactgattcatgtgaggtcagtgttgagcagaagaggaaaaatattccatcagtctctacagcactactacttggtggggtgcttggcctacttgaaaccctactgcttgttctctctgcaaaacctatcttaggctacatgggtgtaaaaccggactctgcgatgatgaagcccgcattgcagtacttagttctcagatctcttggtgctcctgctgttctgttatctctggcaatacaaggagtctttcgcggatttaaggatacaaagacgcctctatacgcaactgtggctggagatgcgatcaatatagttttggatccaatatttatgtttgtgttccaatatggtgttagtggtgccgccatcgctcatgttatatcacagttttctgctacttgcacgagttattgccgcaacttgttgtgtgacactatccgcttcaatggccgcacggctaggttcaactccaatggctgcattccagatctgcttgcaaacctggttggcttgctcacttcttgccgatggattggcttttgctggacaagccatacttgcaagtgcatttgctcgtaaggactatccgaaggccaccgccacagcttctcgtatcttgcaggtatgttatgtatcttgagtttatatttgacacattttccatggccttagagaagcattttccttattttgcagctggccttggtcttgggacttctcctaagcatacttcttggtgttggtctgcgcatagggtccagattatttacatccgatcagggtgtactgcatcatatctacataggaataccgtttgtctgccttactcaaccaatcaacgctctggcttttgtttttgatggtatcaattacggagcatcagatttcggatatgctgcctactcaatggtccttgttgccgttgtcagtatcatttgcatcctcactcttgaaagttatggcgggtttattggaatctggatagctctggtgatctacatgagcctccggatgtttgctggattttggaggatagggacggcacaagggccctgggcttatcttcgcggctgaacatagaggcagagctagtaacctgactcaccagcacgacgagcacatggtttattattgttcacggaagtggcagtccttgatgtggtctcgtaaatatgccatacggactcagggtctttttggtttgctacctaacttgtcatactttgcctaacttttctgcttaaggttagttcttcaattcggacaactaaccttaggcaaagtgtgacgcagttagccacgagccaaacagtccctcagttcgtcaaacttaggtctgtgagtttggcggatgtgtaggcactcacatcgttaaacaaatctgttgtactggcctagattgtgacagatgcaaaattatgtcatggttggctactatgcgtagcagggctgcaatacatgtttccatcaggaaggctgtcacaagtttaacacacttgttgtaccaaggcgtgtgaactatagctattttttctgtcctaggacaaactgtgccacgacgtgttgtagctatttttctgtcccgtattcatatgagcagatacatggtcctgcaagtaacacatatatgtaactaaaaatggtgaggaccgttccatgtatgtactctgtgcttcctaacttttagggcccgttcggttgtaccaaaatgagtcaggattcattccagctcatcaaaatctatataaattag

SEQ ID NO: 220613 - DNA, 2444 bp, Zea Mays
agataccattccggaagggacccagacgcagcctacacctgcacggctgcaccgcagggaggcgccatctgacccggccccggcggcgctggctgccccgtcgcccccagacccacccagaggaatcacgcagatattgccttcccccgtggcatgcacccaccgacccacatgcgcgcgcgcgcacccatcgggaattccggacccgattcgctttcctatttcattccactccacccgcttttgggtgtgtggacgatgcatggggagagagagagggagcgggagagtctcctcctcctccccgaccggagcgccggtgccatggaagggggcggcgagcaccaccacccgcttagcgtattcctccgggacgcgaggctcgcattcagatgggacgagctcggtcaggagatcatgaggatcgcggtgcccggcgcgctcgcgctcatggctgacccagtcgcctccctcgtcgacaccgccttcattggccacataggtccagttgaacttggagctgtaggtgtatcaattgccgtgtttaatcagagacaatgacaaaatacatcaacaaaacgaacgcaatgtttcggtcagtgaaatggatgaactgattcctcctgaaggggctagtgccagtaccagcatatcgtcttttgaaactgattcatgtgaggtcagtgttgagcagaagaggaaaaatattccatcagtctctacagcactactacttggtggggtgcttggcctacttgaaaccctactgcttgttctctctgcaaaacctatcttaggctacatgggtgtaaaaccggactctgcgatgatgaagcccgcattgcagtacttagttctcagatctcttggtgctcctgctgttctgttatctctggcaatacaaggagtctttcgcggatttaaggatacaaagacgcctctatacgcaactgtggctggagatgcgatcaatatagttttggatccaatatttatgtttgtgttccaatatggtgttagtggtgccgccatcgctcatgttatatcacaatatttcattgcatccatactcttatggagattaaggttgcatgttgatttgttgccacctagcttcaaacatctgcagtttggccgatttcttaaaaatggttttctgctacttgcacgagttattgccgcaacttgttgtgtgacactatccgcttcaatggccgcacggctaggttcaactccaatggctgcattccagatctgcttgcaaacctggttggcttgctcacttcttgccgatggattggcttttgctggacaagccatacttgcaagtgcatttgctcgtaaggactatccgaaggccaccgccacagcttctcgtatcttgcagctggccttggtcttgggacttctcctaagcatacttcttggtgttggtctgcgcatagggtccagattatttacatccgatcagggtgtactgcatcatatctacataggaataccgtttgtctgccttactcaaccaatcaacgctctggcttttgtttttgatggtatcaattacggagcatcagatttcggatatgctgcctactcaatggtccttgttgccgttgtcagtatcatttgcatcctcactcttgaaagttatggcgggtttattggaatctggatagctctggtgatctacatgagcctccggatgtttgctggattttggaggatagggacggcacaagggccctgggcttatcttcgcggctgaacatagaggcagagctagtaacctgactcaccagcacgacgagcacatggtttattattgttcacggaagtggcagtccttgatgtggtctcgtaaatatgccatacggactcagggtctttttggtttgctacctaacttgtcatactttgcctaacttttctgcttaaggttagttcttcaattcggacaactaaccttaggcaaagtgtgacgcagttagccacgagccaaacagtccctcagttcgtcaaacttaggtctgtgagtttggcggatgtgtaggcactcacatcgttaaacaaatctgttgtactggcctagattgtgacagatgcaaaattatgtcatggttggctactatgcgtagcagggctgcaatacatgtttccatcaggaaggctgtcacaagtttaacacacttgttgtaccaaggcgtgtgaactatagctattttttctgtcctaggacaaactgtgccacgacgtgttgtagctatttttctgtcccgtattcatatgagcagatacatggtcctgcaagtaacacatatatgtaactaaaaatggtgaggaccgttccatgtatgtactctgtgcttcctaacttttagggcccgttcggttgtaccaaaatgagtcaggattcattccagctcatcaaaatctatataaattag

SEQ ID NO: 220614 - DNA, 4313 bp, Zea Mays
gttctgtgcatgctctgaaaggcgttcggcccggctgaaagggcccgtcgaggcccagcaggaatttctcggcccctttcacacaccaaaaaaaaaaccaggtgaggaatctaccaattgattttcttcacccgtccacctcgtcttgcgctcctctgtctcggcgacgactgtgctaccgccgccgccgccgcaagacttcgtcgggcactttgccggcgacgatttcccaccagctatttctactcggatccgatctatttacaagcccaacaggatcagaggaggtgatggcgaggagtgacagctgcctggcgcgcgtgggtgccggaattgctatcggtggcgcggtcggcggagccgtcggtgcttgctatggaacttttgaggcgttcagatacaagatccctggattgctaaagatcagatacattgggcaaaccaccgttggcagcgctgcgatttttgggcttttcttgggggctgggagcttgattcactgtggaaaatcctactagtttgtttccctttttttttctgaagtctgaacacacctttgtcgatgggcttcagtgaaaactattcaatgcctgtttcatgtaacagctaatagctcagggttggaaaagaacaatcaagttatgtcctagttttggtgtggatggaaatagaatcaacgttcatctgcacgagaatcgtcaatttctcatctagcgtcttatgttctcatctcattttctttaaaaacgtaaggaattctttactcaccatatactttagctcggcagggcgccgcgaagcgcgcaactttttgtttactagtacttattagcagccggtgaagtaataaaagtgcgtacagcttttgctttactttttgtttacctattgcatccctactttggctctgaagtgtcctgccagcggcctgcgtacttaggcctaatttgataggccatgagtatgtggccagctgagtggcgcgcaggccataaatgcgctgcagtcagaggggctacttctaccgtcgcgagtactgcaccgcgtgcgcgtcctccacgaccagacacgtgtcccgccagtcctcgaccgcgccggcaacacggttcactccaccacgtcctcgcgcgagtgcgtgtctcaggtgttagccacgacgactggccacccggctgctccggtccgtcagttaagacccagcactcgtccttcatcgctctcggtccatcagcacgagcccgtatgaccttcacctcggccgtcgaccaccatccctatgctccacacctacacaccacaagccgaccgatatggttgcacaaaacataatctcacactctggtcagtccacagactaccacagagtgctattcgttgataatcactcatcatcaacccgaaccacaagggaagagacaaatcaaccttgtgttcgcacttttccaaccctatttctccacaagccgaccacaaaggtcaaggcaaatcctttccttaaacttgctcaacgagcgggagatacaaacttcttggggtcttccacaagttggagactcccaagcacacacaaaccgtcaaggaaccaaagttccaagagtaataaattcgcacaagtgaagtttgcaaaacgagctcaagtgagggagagggaggaggagagtgaaaaaccaacaacaaatcaacgaacgtcacctcacaccgaagatcctccaaccgttggaagaggatgcgatttgaggtgtgggagatagagttagagcgcttgttttgagtttggtgagcagtaaagtcagggagagtggctgaagtaaatgaggagagagagggaaaggggagtatatataggtgtccctctctcagggcagaagatttgaaaaatctgtgcaaaggtcggttgaaccgcacccagggccggttcaaccgtctgataggtcagacctatcagaacggccttctgactaaaggtcggttgaaccgcaccctagggccggttcaaccgctattttccagagaggtctgagtataaagtccggttgaaccagccaacagggcgaggttcaaccgcattttgtcagagaggtttgcgaggccggttcaaccgctttttaccagagacttccggaacagagtccggttgaaccgcaccctagggccggttcaaccacacttttccagagacttcttttggagaagtcaggttgaattgcccctgaggtaggttcaacctttcttcctagagagggtatcaaatgcaaattctctggagcggattgaacttttgcaaaccaaattcgaaatgcggttttcaaaatagattttgaagagtagagattttgagctcttgcaaacattttatacctttgtgcgaatccctcttgattgtacggtgaatcctatgactcaagaaaaagtaaatttcgaagagccttctcttggaaacaccagaaacacagtgcgatgtatgaaccaagttttagtagttatcgccttgatccgtgtttcttcctcttttaaaatgtattctgtttatctacctaatttgcaataactaaatatacacttggagcaaacttgttagacaccttatttgttttgtcatttaatgaccaaaaccttcaaaaaggttgattgtacttacaccttcggcggttgcgcagaggaaagcggttgcccgacagcgctcctctcgcatgtacgtatcgagcaagtctgtgaacgacgcggctttggcggcgaagggggcgccccgtcccctcgggtcctcttactgccggcgccggatggggcggctcctttcgctgtcgccttcgtcccaccagctgaggcggcgactgctcctcgcgtggcagacgctccagcctccttggtcgtcctggaggtgccaggagtggttgcccctggtgcggccttctttgagccgccgccttctgcacctggcccggggcaggtttcggtcgccgaggaagtcgttgtcggcgcgcgctcggtggcggcagggtcggtcgccggtctgccgccgccgcccccgccccgtgaagggggttctgggttggcgctgttgcccgcggaggtcgccgcgccctaggtgccaccgccgcctgccgctattgccttgacttccgcaggtgccgcggtacccatgggatctgaggaaatccacggggggcttcccctctccctccctgaaggacggggggcagaggcagaagagtggcagcggaccgagtcagcctcgtctcgggccaactcgagcttagaaactatcgagcgcatgttcggtagcttcgaggaggcgatttcgattgcttgggcgtcgatgacgcgggatctgattccttttggttagcgcctccttatgcggtcggtggctcgagaggaagcgctactagccgcccaacaggaggtggagcagttgcgtgctggggccattcggctcagggagtgggagcgcgagctcaccaccctttgttctgaggctgtccggcttcggagcgagacgccgctcctacgcgtggagcatgacgatgcttagggcaacatggatcacctacgggaggaggggtcccgactctaagaggccctcgatgggatgagccttggggccgagggggccacgccgaaccttggggaggtcgacgcctgtctaggggaggcaaactcggagctccaaagggaacgcaatgcaactggagatgatttcccaagctgaggtcgccaggaaggcagcagaagaggcgaagacggtggcagaaggaaggatacgagagctctcgcttgcttgtgatggcaccgttgtttcgagactccaggcggagacctcactttcggagcggagcgccgagctccaagtgcttcacccgatcgtcggctcggtgtgcactcacctttcttctccaccgccgatcgaggtccctctaatcaatcggctgcgagcgctgtccgatcatgtggagcacgtggtcgtcgagggagcatatcacgggagcatccttgccctgggacagatggtctcccatttcgatgaaatcgactctggtgtgatcgcggaaggcttcgccgccggttgaagtgacgaggagctgggtgccattgaggtgcaggtccatccccacgcccggtcgatcgtgggccgggtcaatgtgaagttcctcctgatcgacccctggagcctgggaccactcgccggtggtccgtccacccattcttagtcggcgttcattgtaatgttttgtaatgactatctttagatgtcctgactgtgatcttatgtataatattatctgttttaaactctgcatccttcctttttcctt

SEQ ID NO: 220615 - DNA, 319 bp, Zea Mays
accaattgattttcttcacccgtccacctcgtcttgcgctcctctgtctcggcgacgactgtgctaccgccgccgccgccgcaagacttcgtcgggcactttgccggcgacgatttcccaccagaggaggtgatggcgaggagtgacagctgcctggcgcgcgtgggtgccggaattgctatcggtggcgcggtcggcggagccgtcggtgcttgctatggaacttttgaggcgttcagatacaaggaaaataaaaaactggaataggtcggtagtctggtcctggaagactcaaaagcatagtggaaggatatcctac

SEQ ID NO: 220616 - DNA, 4166 bp, Zea Mays
accaattgattttcttcacccgtccacctcgtcttgcgctcctctgtctcggcgacgactgtgctaccgccgccgccgccgcaagacttcgtcgggcactttgccggcgacgatttcccaccagaggaggtgatggcgaggagtgacagctgcctggcgcgcgtgggtgccggaattgctatcggtggcgcggtcggcggagccgtcggtgcttgctatggaacttttgaggcgttcagatacaagatccctggattgctaaagatcagatacattgggcaaaccaccgttggcagcgctgcgatttttgggcttttcttgggggctgggagcttgattcactgtggaaaatcctactagtttgtttccctttttttttctgaagtctgaacacacctttgtcgatgggcttcagtgaaaactattcaatgcctgtttcatgtaacagctaatagctcagggttggaaaagaacaatcaagttatgtcctagttttggtgtggatggaaatagaatcaacgttcatctgcacgagaatcgtcaatttctcatctagcgtcttatgttctcatctcattttctttaaaaacgtaaggaattctttactcaccatatactttagctcggcagggcgccgcgaagcgcgcaactttttgtttactagtacttattagcagccggtgaagtaataaaagtgcgtacagcttttgctttactttttgtttacctattgcatccctactttggctctgaagtgtcctgccagcggcctgcgtacttaggcctaatttgataggccatgagtatgtggccagctgagtggcgcgcaggccataaatgcgctgcagtcagaggggctacttctaccgtcgcgagtactgcaccgcgtgcgcgtcctccacgaccagacacgtgtcccgccagtcctcgaccgcgccggcaacacggttcactccaccacgtcctcgcgcgagtgcgtgtctcaggtgttagccacgacgactggccacccggctgctccggtccgtcagttaagacccagcactcgtccttcatcgctctcggtccatcagcacgagcccgtatgaccttcacctcggccgtcgaccaccatccctatgctccacacctacacaccacaagccgaccgatatggttgcacaaaacataatctcacactctggtcagtccacagactaccacagagtgctattcgttgataatcactcatcatcaacccgaaccacaagggaagagacaaatcaaccttgtgttcgcacttttccaaccctatttctccacaagccgaccacaaaggtcaaggcaaatcctttccttaaacttgctcaacgagcgggagatacaaacttcttggggtcttccacaagttggagactcccaagcacacacaaaccgtcaaggaaccaaagttccaagagtaataaattcgcacaagtgaagtttgcaaaacgagctcaagtgagggagagggaggaggagagtgaaaaaccaacaacaaatcaacgaacgtcacctcacaccgaagatcctccaaccgttggaagaggatgcgatttgaggtgtgggagatagagttagagcgcttgttttgagtttggtgagcagtaaagtcagggagagtggctgaagtaaatgaggagagagagggaaaggggagtatatataggtgtccctctctcagggcagaagatttgaaaaatctgtgcaaaggtcggttgaaccgcacccagggccggttcaaccgtctgataggtcagacctatcagaacggccttctgactaaaggtcggttgaaccgcaccctagggccggttcaaccgctattttccagagaggtctgagtataaagtccggttgaaccagccaacagggcgaggttcaaccgcattttgtcagagaggtttgcgaggccggttcaaccgctttttaccagagacttccggaacagagtccggttgaaccgcaccctagggccggttcaaccacacttttccagagacttcttttggagaagtcaggttgaattgcccctgaggtaggttcaacctttcttcctagagagggtatcaaatgcaaattctctggagcggattgaacttttgcaaaccaaattcgaaatgcggttttcaaaatagattttgaagagtagagattttgagctcttgcaaacattttatacctttgtgcgaatccctcttgattgtacggtgaatcctatgactcaagaaaaagtaaatttcgaagagccttctcttggaaacaccagaaacacagtgcgatgtatgaaccaagttttagtagttatcgccttgatccgtgtttcttcctcttttaaaatgtattctgtttatctacctaatttgcaataactaaatatacacttggagcaaacttgttagacaccttatttgttttgtcatttaatgaccaaaaccttcaaaaaggttgattgtacttacaccttcggcggttgcgcagaggaaagcggttgcccgacagcgctcctctcgcatgtacgtatcgagcaagtctgtgaacgacgcggctttggcggcgaagggggcgccccgtcccctcgggtcctcttactgccggcgccggatggggcggctcctttcgctgtcgccttcgtcccaccagctgaggcggcgactgctcctcgcgtggcagacgctccagcctccttggtcgtcctggaggtgccaggagtggttgcccctggtgcggccttctttgagccgccgccttctgcacctggcccggggcaggtttcggtcgccgaggaagtcgttgtcggcgcgcgctcggtggcggcagggtcggtcgccggtctgccgccgccgcccccgccccgtgaagggggttctgggttggcgctgttgcccgcggaggtcgccgcgccctaggtgccaccgccgcctgccgctattgccttgacttccgcaggtgccgcggtacccatgggatctgaggaaatccacggggggcttcccctctccctccctgaaggacggggggcagaggcagaagagtggcagcggaccgagtcagcctcgtctcgggccaactcgagcttagaaactatcgagcgcatgttcggtagcttcgaggaggcgatttcgattgcttgggcgtcgatgacgcgggatctgattccttttggttagcgcctccttatgcggtcggtggctcgagaggaagcgctactagccgcccaacaggaggtggagcagttgcgtgctggggccattcggctcagggagtgggagcgcgagctcaccaccctttgttctgaggctgtccggcttcggagcgagacgccgctcctacgcgtggagcatgacgatgcttagggcaacatggatcacctacgggaggaggggtcccgactctaagaggccctcgatgggatgagccttggggccgagggggccacgccgaaccttggggaggtcgacgcctgtctaggggaggcaaactcggagctccaaagggaacgcaatgcaactggagagctctaaaagatgatttcccaagctgaggtcgccaggaaggcagcagaagaggcgaagacggtggcagaaggaaggatacgagagctctcgcttgcttgtgatggcaccgttgtttcgagactccaggcggagacctcactttcggagcggagcgccgagctccaagtgcttcacccgatcgtcggctcggtgtgcactcacctttcttctccaccgccgatcgaggtccctctaatcaatcggctgcgagcgctgtccgatcatgtggagcacgtggtcgtcgagggagcatatcacgggagcatccttgccctgggacagatggtctcccatttcgatgaaatcgactctggtgtgatcgcggaaggcttcgccgccggttgaagtgacgaggagctgggtgccattgaggtgcaggtccatccccacgcccggtcgatcgtgggccgggtcaatgtgaagttcctcctgatcgacccctggagcctgggaccactcgccggtggtccgtccacccattcttagtcggcgttcattgtaatgttttgtaatgactatctttagatgtcctgactgtgatcttatgtataatattatctgttttaaactctgcatccttcctttttcctt

SEQ ID NO: 220617 - DNA, 2608 bp, Zea Mays
atatctaatgataggcatgaaatgaaactagggttttaggcaaacatcaagggatagtgcctcctagaccaactgtggctcctgaaaactcagttgcttctgctgctctggaacaactcagtgccgcagaagtggagagacgggttaaactgttgcgagaagacagaaattacataagaagtttgttcttggaaatattctgcaagaatctgaattttgggcaacaagaaagaatttacttgatgatgaagcaaataagagatcaaaacaaaagccaggtttcaagagtgcacttgtagatattaggccaacaactgatggtcggacaaacaaggttactttccagatcacacctgagatgatacatcaggtccacctttccactctgcttctttatcatgaactaatacatatatactgcttggtatcatcaatttttctgttgtctcaactgttataattgcaaaatttatatactatgctgtaaaatgaaaaagtacgtcattttgtgggttatggagtttctgaacattgttgttggtaaaaggcttccaaagatttttttaatctgtatatgaatgtgtagcaagccctgtaccttctctgtctccttagtagctttcatgcatgatgcagtgatcctctattgaactatttttatatcttgaaattatagttttcattgtgtgcatgtgactttgatgcgaccaaagggaattaatgagcaggaacactgaaaattatgcttccaccctagccagttaggttaggcttagtccatagctgcaaagaccatcttacttgctttgaaccctacctgcgctgggccctgtttgctcaagaatactccattatgcctgaggcatatattattcatggaaacaggtgctgaattctatgattctatatctgatgtactttcaacttgttaacaccatatatcctattttacagatttttgcagaaaagcctgctgtccgtagagcatatttagattttgttccaaaaaagatgtcagaaacccgattttgggaaaaatactgtagagctgagtatctagtcaggacaaaaaacactgcagcagcaacagctgaggcagctggagatgaggaattagctatcttcctgaagaatgatgatatactggccaaggaggcaaagttgaagataaaacgagtcgatccaacattagacatggaggcagacactggagatgattacattcatcttccggaccatgggattcaccgtgatggtagcaaagagacagtcgatgctgacagtgagttggcgaggaggacgctgtctcaggacctgaaccgtcatgcagctgttgttcttgaagggagatctcttgatgttgagtcaactgatccaaagactttagctgaagcccttgcaagatccaagaaagaaccaccttctacttctaatgttgatgatgataatcatgagagactaatgaaggtggctagaatgacagagatagaggatctgcaagctccacgaagtcttctgtatgcaccactttgtataaaggatcctagagaatattttgattcccaacaagcaaatgctctgagatctctaggtggcagcaatggtggaagaaaagcccatagttgcagcttgagcactgaagaagtgttccatcatttaatggatcaaatgtcttctgttaaagttaataggcttaactgtccgattgttcagtctgatatggctcttaaggaaatcctaactacctaaatggtatgggcctaggttcttaatgaattaaacgaagggatttctcgttcaaggagacttaacctcaagaatcctcaagaaggtctccttggtcagctgcctcaacatacacgggacgagcttatggatcattggacggctatccaggaattgctacgccatttttggtcatcgtatccaataacaagtgcagtactttataacaaggttcaaagagttaaagaagctatgacacagatatatcaaaagctgcagcttataaaggaattggcacagcctgatgtaagacatgaaatatctcggctagtaaagcccatgactcaggccttggatgccgccttcaaccatgatttggaacagcagcagaaatcgtccaaggccggaaacaggcacaacgggttttgagcctaggagattggtttgaccaacacatgaagcgagacggacggacgggctgtgcccgaatacacaagagctgctgcagaattcttgaggcttgtacgattttgttcttttccccctcgcttattaatagctgccggaggagcctgctgtttgcagccccggaatcttgatctatgcatcaattgtttgtaactgactgaatagtgaagactcgcaacgcatgatgctgccgacgcgttgtacttgtacatggcagtaatggctattcgagatagaaccaaagctttaccattttgttttatgcggttcgttcatggccgccgggcagaattatacacatgtatgtcatctacagcgttacaaacataccattatatatcacagtaccgatgacatctgtcagctcccacccaggagttgctgtaaactatatggatcccggtgtcgtgttttg

SEQ ID NO: 220618 - DNA, 2693 bp, Zea Mays
caagcggccaagcgcacacaggagtatactctgcagcacggacacgcccggcccgacaagccagccactcttctcgcgtgaagctgccaggacgagaagagagagagggagtgagacacacacagacagagaaagcggaggagactaacgaggcgtgcatgaggaagggggcagtggccgtgatggggagggaggccgcggccgcggtggcggcggagctggaggactcgttggggaacgctgctgctgccgcggcggcggcgcccgtgctgagcccgctgagcgagacgctgtggcgcgacagggcggcggcgggcggggtcctcctcggggacgtgtcggcgcggctggcgtggcgggacctcaccgtgaccgtggcgctcggcaccggcgacacgcaggccgtgctgcagggcctcacgggccacgccgagcccggcaccatcaccgcgctcatgggcccgtccggctccggcaagtccacgctgctcgacgcgctcgccggacgcctcgccgccaacgccttcctcgacgggaccgtcctcctcaacggccgcaaggccaacctctccttcggcgccgcggtacgcacgtcgtcgtcgtcctcgtgtcaccggttcgccgtcggttctgtaaccttgctgcctttcggcagcggcttcgcgatcgcagcacaagatgccatgcatcaagccagcccttgcatctgtggttgttggatcagcagcagtagccatctccggtcaaaatttgggcgacatgctgccttcgctagctgtcgcccgtctgttctcctgatggatcgttctgttgtcaggcctacgtgacgcaagacgacaacctgatcggcacgctgacggtgagggagacgatctcgtactcggcgcgtctccggctccccgacagcatgccgagggaggagaagcaggccctggtggagggcaccatcgccgagatggggctccaggactgcgccgacacggtggtgggcaactggcacctgagggggatcagcggcggcgagaagaggcgggtcagcatcgccctggagatcctcatgaggccccggctgctcttcctggacgagcccaccagcggcctcgacagcgcttcggcgttcttcgtgacgcagacgctgcgggggctggcgagggatggcggccggaccgtcgtagcttcggtccaccagccgagcagcgacgtcttcttgctgttcgactgcctctacctcctgtcaggaggcagaacagtctactttggcaaggcttcagaggcttgcgagttcttcgcgcaagctgggttcccgtgcccgccgatgcgcaacccgtcggaccatttcctccggtgcataaattcggacttcgacagggtgaaggccaccctgaaagggtcgatgaagacgaggttcgaaagatcttacgacgatccgctggagaagatcacgacctcggaggcgatgagcaggctggtcagccactaccagcactcgcagcactacgtcagcgcgcagcagaaagtagacgagatggcccggctcaaagggactgtgctggactctggagggagccaggctagcttcctgatgcaggcgtccacgctcacgaagcggtcgttcgtcaatatgtccagggatttcgggtactactggctgaggctcatcatctatgtcgtcgtcacgatttgcatcgggactatatacttcaatgtcggcaccggctacagctctatcctggcccggggggcatgcgcttccttcatcttcggcttcgtcacgttcatgtcgatcggggggttcccgtcgttcgtggaggacatgaaggtgtttcagagggagaggctgaacgggcactacggcgtggtcgcgttcgtgatcagcaacacggtgtcggcgatgccgttcctggtcctgatcaccctggtgtcgggcacgctgtgctacttcatggtgcgcctgcacccgggcttcacgcactacctcttcttcgtgctggacctctacgccagcgtcaccgtggtggagagcctgatgatggccatcgcgagcgtcatccccaacttcctcatgggcatcatcgtcggcgcggggatccaggggatattcatgctggtgtcgggctacttcaggctcccccacgacatccccaagcccttctggaggtaccccatgtcctacatcagcttccactactgggcgctgcggggccagtaccagaacgacctcaagggcctgctgttcgacggccagcaggacgacgtgctgcccagcaagatccccggcgagttcatcctggagaacgtgttccagatggacgcggggcggtccaagtggctcgacctggccgtgctgctctgcatggtcgtcgtctaccgcctgctcttcttcgccatgatcaaggccgccgaggacgtcaccccccgggtgcgccgccacgtcgcgcgccggcgggtgcggagccggcggcgccagcagccgctgcccgcccggacgccctcgctccgcggttacgtggtccacgccgccgccagcctgccggccgatcacccgtgaacaacgtaaccgtcagttgtactgcaatatatatgatatgcgtgtgttaagttgttagtagcaaccgctttatagctgtaacgaagatgcaatgcaccggtaagatgatgtgtgttatcaccagcttgatgcaagtttttcttcg

SEQ ID NO: 220619 - DNA, 1904 bp, Zea Mays
tacgcgtcgcagctgtacgagcaggccatcaagtacgagaaggggtcgttcatcacgtccaccggcgcgctggcgacgctgtccggcgccaagaccgggcggtcgcccagggacaagcgcgtcgtcaaggacgaggtcgcggcgcgggacctgtggtggggcaagggctcgcccaacatcgagatggacgagcacacgttcctgaccaacagggagagggccgtggactacctcaactccctggacaaggtgttcgtgaacgaccagtttctcaactgggaccccgagaaccggatcaaggtccgcatcatctccgccagggcgtaccactccctcttcatgcacaacatgtgcatccggcccacggacgaggagctggagagcttcggcacgccggacttcaccatctacaacgccggccagttcccctgtaaccgctacacgcactacatgacgtcgtccaccagcgtagacatcaacctcgccaggagggagatggtgatcctgggcacgcagtacgccggcgagatgaagaaggggctgttcggcgtcatgcactacctcatgcccaagcgcggcatcctctcgctgcactccggctgcaatatgggcaaggacggcgacgtcgccctcttctttggcctctcaggtaccgggaagacgacgctgtcgacggatcacaacaggcttctgatcggcgacgacgagcactgctggagcgagaatggcgtgtccaacatcgagggcggctgctatgccaagtgcatagacctatcgcaggagaaagagcctgatatctggaacgccatcaagttcggagccgtgctggagaacgttgtcttcgatgagcatactcgtgaagttgactacaccgacaaatctgtcaccggaacactcgggctgcctacccgatcgagtacatccccaacgccaagataccatgcgtcggtccacaccccaagaacgtgatcctgctggcgtgcgacgccttcggcgtgctcccgccggtgagcaagctggacctggcgcagaccatgtaccacttcatcagcggatacaccgccctggtcgccggcacggaggacggcatcaaggagccacaggccaccttctccgcctgcttcggcgcggccttcatcatgctccacccgaccaagtacgccgccatgctcgccgagaagatgcagaagtacggcgccacagggtggctcgtcaacaccggctggtctggcggcaggtacggtgtgggcaagaggatccggcttccctacaccaggaagatcatcgacgccatccactccggcgagcttctcaccgccaactaccagaagaccgaggtctttggcctggagatcccgactgagatcaagggcgtgccgtcggaaatcctcgacccaatcaacacctggacggacaaggccgcgtacaaggagacgctcctgaggcttgccgggctcttcaagaagaacttcgaggtgttcgccagctacaagatcggggacgacagcaacctgaccgacgagatcctcgccgcaggccccaacttctgaactaaagcagtgggtccggatgaataaaacggtggtatgcgtgtgaagaagaagatgatgacgacgaaaatagtgtgttggatcgatgggccagcacagtgtagactagcttttgtatattatctcgggttggaaatctggtgttgttacctaaaatgttggtctgttctatcggcttgttgaaaacagtttgcgcgtgcttgcatcttggcccccctgtattctctgtggtttcagaatttgaacacgaaacagcttggtctcgggatcatgttggtttcatatgtcattgcagtatcgcaccgacacgacacataccaattgattttgcctggaactgccatattttgtggc

SEQ ID NO: 220620 - DNA, 620 bp, Zea Mays
cgtcaactagctactcaagggcacgtacggagggtggcgtgcgagaggaaaggcggcatccggtacacgatcacggggaaccagcactacagcgaggtgaaggtgaccaacgtgggcggcgccggggacgtggtggcgctgtgggtgaagggcaacaagcgcgtcaagtggacgccgatgaagcgcagctggggccagctctggaccacggaggtcgacctcaccggcgagtcgctgacgttccgcgtcatgaccgccgaccaccgcaaggctacctcctggcacgtcacgccccgcgactggcagttcggcaaaacgtaccaggccaccaagaacttctagggccggatcgggccggggagctgagccgcgcccttctttatatgtatatgcatgcagcggattatattggactgttttgtactgtgtactaccttctttattccatgataaacatgttccaatttcaacaccattggtttgagcggtcagcaggcagcagcacagcacagagcacaaaagttctgatgcgtcagcttctacgatttgaaacaatgatagcacatgatgtgtgttttgaattcgtatcttaatcaatgcgccaaattgatctgctgcaa

SEQ ID NO: 220621 - DNA, 1291 bp, Zea Mays
ctggtgaccgcgcccctcacatggacgcgccccctgctcgtgatctccccaggaccgagtgcccctccccaactctcctacaccctcaagtcgagtgggctctctccatggatgaagcttaggcaccgatgctctccttctctagttcgtcatgtcagcttggtgccctctctcccatggccaagcctgaggtccctacctcgacctccacatcggcctccatggcgctcttctccctgggcacccagacgtgtgcgcccccttccctgctcttgccgcggcgagctccttccctccaagcaccagtcctgaacgccaggccacaggccatagctcctgcgcgcttgtccgcagccaggttcgtgtagccaccgtggagctcgatcagccttcttccccaccgtgctacgctagatccgagctcccatggtgcaggcgccccttcccccatcagatccatggcgccatgtctcccagttggcctcctctgcccagcgccaccccttcctttccctaggcgcataaagctctcccccacgcagtccagctccaggccagacccaattcgcccaacccctgctcgcccagagcttcttcgccccaaatccggccatccccgccttgccgtggagttcctcgagcagccccacctggccaccatcctccccagccgaaccctttctccatggccgccaatcgtcctactcctttcgtctggtgtgcttgacgcctggtgcttcgacctcgatggcttcccctgcgagcgacacctctgctcggctccctctcctggcagcgagctcctctgtaggcaccgacccacagcagcagggagcctccaatggcatttgtttccccaaggctcgccccgtcaacagccatcgacctcgtgcagcagccgcgacgccagttcgcacagccacgtggatctcccttgtgtcgtgccctcggcatgctcgatgtaatgccaaagcagcagcagcagcgacgccctccgttgcgtcgtgctcgctagatcgggcctcacgtcgtcgatctgcgcagcgtctgcgcgtcgtcgtcgaaacccgcgccccttgtcgtcgtcacgcttcgcacgtcgtttctcgacaggaagccaaaccgacatgcatgcatgcacaactccactcgggttttagccaggttgttcgctttagaaaaattgtggtttttgttttatttacgattcagtcgatggcgtgattatgtgcgtgaaaatataattgtatgaatggacgcgagtagaaaagaaaatgaattagataagaac

SEQ ID NO: 220622 - DNA, 3090 bp, Zea Mays
cggacatgtgcgctttctccgcctttcctctcgtctcctcgtccgttgggggctcgggcgctcggctggatccatttcgcgtggcgcgcgcggtcgacgggaggtcccagccagccagcgagagagggagccggggccgggcggggcggcacctcgcgagatggcggcggaagcggacgacccgtcgctggcggcgaccctggagaagttccgcctctacgagacgcgcgcgaggttctacgtgatcgggagctcgcgggagaagcgctggttccgggtgctcaagatcgaccgctccgagccctccgagctcaacgtaagcgaggaccccgtctggtactcgctgcaggaggtcaagagcctcctccagcggatcgacgagggcaaccgatccaccgggggcctcgccttcgtcaccaaggcatacggcatcgcaggttgcatcaagttcctggagtcatactacctgattttagtcaccaaacgccgtcaaatcggttgcatttgcgggcatgctatatattgtatagatgagagccagatgatcaccatcccacactcatcagtgcaaacagatgttgcgacctctaagaatgagctgaggtacaagaagcttttggctagtgttgatctcaccaaggatttcttctatagctacacatatccaattatgcagagcctgcaacagagtgttacttctgcagggatgaaagaaatgccttatgaaaatttgtttgtctggaacacttttctgacagagccagtacgttcaaggtgccacaatactctctggacagtagctcttgtccatgggcacttcaagcaggtcaagctatcaatttttggcagagagataaatgttgttctcagctctagaagatcccgacacttcgccgggacacggtatttgaaaagaggtgtgaatgaccatggaaaagttgctaatgatgttgaaacagagcagatagtctttgaagaagaggctggttcctggaagggaagaatgagtgccgtagtacagatgcgaggatcaatccctctcttttggtcacaagaggcatctcgacttagtcctaagcctgatatttttgtgcagagatatgatcccacatatgaagcaacaaaattacattttgatgatctcgcccggcgatatggacatcctatcataatacttaatttgataaagactgttgaaaaaaggccacgtgaaatgatgctcaggcgtgaatattgtagagctgttgaatatcttaatcaaaatgtcccagaggagaagaagttgagattcatccactgggattttcataaatttgctaaaagcaaatctgcaaatgtactgggtgttttaggaaaagttgcgggtgaagcactggacctcactgggttttactacagcggaaagccaaaagtccagaaaaaaagggatggctcccttgatataagggccagttctggagatctttcaaggctctctagtaatgctgaggcacttagttctacaggctttcaagatatgagaaatcaggctaacaaacaagagtttcttggtgatactccctgttaccaaactggagtgctccgtacaaattgcatagattgcctggatcgcacaaatgttgctcagtatgcatatggccttgctgctttggggaggcaacttcatgcaatgggactgacagatgttttaaaaatccaccctgatagcagcattgcttctgctttgatggaaatgtaccagagcatgggtgatgcacttgctcatcagtatggaggatctgcggcacataacacggttttccctgagaggcaagggaaatggaaggctactactcagtctcgggagttcctgaaatcaattaaacggtattacagtaatgcctacactgatggtgagaagcaggatgctataaatctatttctggggtattttcaaccacaagaaggaaaaccagctctttgggagctggatactgattactatcttcatgtgacgacagctggggatgatcttatgtctgatagctaccacttgagttctgcacctggaaataatgtgttcgtggggtctggagctgcattgaaccctgggaccatattgagccctgtcccagcatgcaaagaggatttctcacggaagaagcttacttcgttcgacaaacttatagaaagaacatgtagttctataaggaatgtaaggcttcattgtgacgctgatctaaagccaagtggaggtgttggaacttctggaatggcaccagatgcagctgagatacagcttaaaagccccaactggttgtttggtcaaaggaagcatacggagacaatttcaaccgcaagagttgccccggttgaaaacgtgaacgaggggaacagagacgagtcaaatgtgtctctttgtggggaactaatttggctatcctcctcagttgaatcatgcgaggaggacattttcagaaggtaccttgcattcacgacagcggatgtagagaatggctggtatggcggaacactgctatatgaccgagatgaaaacagcggggcttacaggcactattctgagctctgccagggagctgtcatggatccctttgagcatgaccctgagaaagagcggcactacgcggaggcccttagcgtggatctcggcgatgcacgggtggaggccgaaatgcaggccgcgctggatgactaccaggtcatagggtcggacctgagcatcatcccttcgtgcggagcactcgcagaggacccgagccagctgacgaggtggatcattggagatgagaggctgcttgtgggtgctgctgcgcagtagaccggtggggttctgtcttctactcttctgtggaaggttgtacagagcaacagattgccattcaccgacccagcctttgtgttttatagatacttccctgaaacaattactccatgtatttagcagcaggtgttttatagacacttccctgaaacaattactccaacacgtgcatgcaatttattgttgtgcagcaggtggtattgctgctgggattagctttggcaataatagttgattgttgtgcagcaggtgtttgatttcattcatct

SEQ ID NO: 220623 - DNA, 3202 bp, Zea Mays
cggacatgtgcgctttctccgcctttcctctcgtctcctcgtccgttgggggctcgggcgctcggctggatccatttcgcgtggcgcgcgcggtcgacgggaggtcccagccagccagcgagagagggagccggggccgggcggggcggcacctcgcgagatggcggcggaagcggacgacccgtcgctggcggcgaccctggagaagttccgcctctacgagacgcgcgcgaggttctacgtgatcgggagctcgcgggagaagcgctggttccgggtgctcaagatcgaccgctccgagccctccgagctcaacgtaagcgaggaccccgtctggtactcgctgcaggaggtcaagagcctcctccagcggatcgacgagggcaaccgatccaccgggggcctcgccttcgtcaccaaggcatacggcatcgcaggttgcatcaagttcctggagtcatactacctgattttagtcaccaaacgccgtcaaatcggttgcatttgcgggcatgctatatattgtatagatgagagccagatgatcaccatcccacactcatcagtgcaaacagatgttgcgacctctaagaatgagctgaggtacaagaagcttttggctagtgttgatctcaccaaggatttcttctatagctacacatatccaattatgcagagcctgcaacagagtgttacttctgcagggatgaaagaaatgccttatgaaaatttgtttgtctggaacacttttctgacagagccagtacgttcaaggtgccacaatactctctggacagtagctcttgtccatgggcacttcaagcaggtcaagctatcaatttttggcagagagataaatgttgttctcagctctagaagatcccgacacttcgccgggacacggtatttgaaaagaggtgtgaatgaccatggaaaagttgctaatgatgttgaaacagagcagatagtctttgaagaagaggctggttcctggaagggaagaatgagtgccgtagtacagatgcgaggatcaatccctctcttttggtcacaagaggcatctcgacttagtcctaagcctgatatttttgagatatgatcccacatatgaagcaacaaaattacattttgatgatctcgcccggcgatatggacatcctatcataatacttaatttgataaagactgttgaaaaaaggccacgtgaaatgatgctcaggcgtgaatattgtagagctgttgaatatcttaatcaaaatgtcccagaggagaagaagttgagattcatccactgggattttcataaatttgctaaaagcaaatctgcaaatgtactgggtgttttaggaaaagttgcgggtgaagcactggacctcactgggttttactacagcggaaagccaaaagtccagaaaaaaaggttaattcagcttagtcgaactagcactgcaagggatggctcccttgatataagggccagttctggagatctttcaaggctcagggatggctcccttgatataagggccagttctggagatctttcaaggctctctagtaatgctgaggcacttagttctacaggctttcaagatatgagaaatcaggctaacaaacaagagtttcttggtgatactccctgttaccaaactggagtgctccgtacaaattgcatagattgcctggatcgcacaaatgttgctcagtatgcatatggccttgctgctttggggaggcaacttcatgcaatgggactgacagatgttttaaaaatccaccctgatagcagcattgcttctgctttgatggaaatgtaccagagcatgggtgatgcacttgctcatcagtatggaggatctgcggcacataacacgacatccagtactgtccaatgaacacaatttcaggttttccctgagaggcaagggaaatggaaggctactactcagtctcgggagttcctgaaatcaattaaacggtattacagtaatgcctacactgatggtgagaagcaggatgctataaatctatttctggggtattttcaaccacaagaaggaaaaccagctctttgggagctggatactgattactatcttcatgtgacgacagctggggatgatcttatgtctgatagctaccacttgagttctgcacctggaaataatgtgttcgtggggtctggagctgcattgaaccctgggaccatattgagccctgtcccagcatgcaaagaggatttctcacggaagaagcttacttcgttcgacaaacttatagaaagaacatgtagttctataaggaatgtaaggcttcattgtgacgctgatctaaagccaagtggaggtgttggaacttctggaatggcaccagatgcagctgagatacagcttaaaagccccaactggttgtttggtcaaaggaagcatacggagacaatttcaaccgcaagagttgccccggttgaaaacgtgaacgaggggaacagagacgagtcaaatgtgtctctttgtggggaactaatttggctatcctcctcagttgaatcatgcgaggaggacattttcagaaggtaccttgcattcacgacagcggatgtagagaatggctggtatggcggaacactgctatatgaccgagatgaaaacagcggggcttacaggcactattctgagctctgccagggagctgtcatggatccctttgagcatgaccctgagaaagagcggcactacgcggaggcccttagcgtggatctcggcgatgcacgggtggaggccgaaatgcaggccgcgctggatgactaccaggtcatagggtcggacctgagcatcatcccttcgtgcggagcactcgcagaggacccgagccagctgacgaggtggatcattggagatgagaggctgcttgtgggtgctgctgcgcagtagaccggtggggttctgtcttctactcttctgtggaaggttgtacagagcaacagattgccattcaccgacccagcctttgtgttttatagatacttccctgaaacaattactccatgtatttagcagcaggtgttttatagacacttccctgaaacaattactccaacacgtgcatgcaatttattgttgtgcagcaggtggtattgctgctgggattagctttggcaataatagttgattgttgtgcagcaggtgtttgatttcattcatct

SEQ ID NO: 220624 - DNA, 3113 bp, Zea Mays
cggacatgtgcgctttctccgcctttcctctcgtctcctcgtccgttgggggctcgggcgctcggctggatccatttcgcgtggcgcgcgcggtcgacgggaggtcccagccagccagcgagagagggagccggggccgggcggggcggcacctcgcgagatggcggcggaagcggacgacccgtcgctggcggcgaccctggagaagttccgcctctacgagacgcgcgcgaggttctacgtgatcgggagctcgcgggagaagcgctggttccgggtgctcaagatcgaccgctccgagccctccgagctcaacgtaagcgaggaccccgtctggtactcgctgcaggaggtcaagagcctcctccagcggatcgacgagggcaaccgatccaccgggggcctcgccttcgtcaccaaggcatacggcatcgcaggttgcatcaagttcctggagtcatactacctgattttagtcaccaaacgccgtcaaatcggttgcatttgcgggcatgctatatattgtatagatgagagccagatgatcaccatcccacactcatcagtgcaaacagatgttgcgacctctaagaatgagctgaggtacaagaagcttttggctagtgttgatctcaccaaggatttcttctatagctacacatatccaattatgcagagcctgcaacagagtgttacttctgcagggatgaaagaaatgccttatgaaaatttgtttgtctggaacacttttctgacagagccagtacgttcaaggtgccacaatactctctggacagtagctcttgtccatgggcacttcaagcaggtcaagctatcaatttttggcagagagataaatgttgttctcagctctagaagatcccgacacttcgccgggacacgatagtctttgaagaagaggctggttcctggaagggaagaatgagtgccgtagtacagatgcgaggatcaatccctctcttttggtcacaagaggcatctcgacttagtcctaagcctgatatttttgtgcagagatatgatcccacatatgaagcaacaaaattacattttgatgatctcgcccggcgatatggacatcctatcataatacttaatttgataaagactgttgaaaaaaggccacgtgaaatgatgctcaggcgtgaatattgtagagctgttgaatatcttaatcaaaatgtcccagaggagaagaagttgagattcatccactgggattttcataaatttgctaaaagcaaatctgcaaatgtactgggtgttttaggaaaagttgcgggtgaagcactggacctcactgggttttactacagcggaaagccaaaagtccagaaaaaaaggttaattcagcttagtcgaactagcactgcaagggatggctcccttgatataagggccagttctggagatctttcaaggctcagggatggctcccttgatataagggccagttctggagatctttcaaggctctctagtaatgctgaggcacttagttctacaggctttcaagatatgagaaatcaggctaacaaacaagagtttcttggtgatactccctgttaccaaactggagtgctccgtacaaattgcatagattgcctggatcgcacaaatgttgctcagtatgcatatggccttgctgctttggggaggcaacttcatgcaatgggactgacagatgttttaaaaatccaccctgatagcagcattgcttctgctttgatggaaatgtaccagagcatgggtgatgcacttgctcatcagtatggaggatctgcggcacataacacggttttccctgagaggcaagggaaatggaaggctactactcagtctcgggagttcctgaaatcaattaaacggtattacagtaatgcctacactgatggtgagaagcaggatgctataaatctatttctggggtattttcaaccacaagaaggaaaaccagctctttgggagctggatactgattactatcttcatgtgacgacagctggggatgatcttatgtctgatagctaccacttgagttctgcacctggaaataatgtgttcgtggggtctggagctgcattgaaccctgggaccatattgagccctgtcccagcatgcaaagaggatttctcacggaagaagcttacttcgttcgacaaacttatagaaagaacatgtagttctataaggaatgtaaggcttcattgtgacgctgatctaaagccaagtggaggtgttggaacttctggaatggcaccagatgcagctgagatacagcttaaaagccccaactggttgtttggtcaaaggaagcatacggagacaatttcaaccgcaagagttgccccggttgaaaacgtgaacgaggggaacagagacgagtcaaatgtgtctctttgtggggaactaatttggctatcctcctcagttgaatcatgcgaggaggacattttcagaaggtaccttgcattcacgacagcggatgtagagaatggctggtatggcggaacactgctatatgaccgagatgaaaacagcggggcttacaggcactattctgagctctgccagggagctgtcatggatccctttgagcatgaccctgagaaagagcggcactacgcggaggcccttagcgtggatctcggcgatgcacgggtggaggccgaaatgcaggccgcgctggatgactaccaggtcatagggtcggacctgagcatcatcccttcgtgcggagcactcgcagaggacccgagccagctgacgaggtggatcattggagatgagaggctgcttgtgggtgctgctgcgcagtagaccggtggggttctgtcttctactcttctgtggaaggttgtacagagcaacagattgccattcaccgacccagcctttgtgttttatagatacttccctgaaacaattactccatgtatttagcagcaggtgttttatagacacttccctgaaacaattactccaacacgtgcatgcaatttattgttgtgcagcaggtggtattgctgctgggattagctttggcaataatagttgattgttgtgcagcaggtgtttgatttcattcatct

SEQ ID NO: 220625 - DNA, 3206 bp, Zea Mays
ggacatgtgcgctttctccgcctttcctctcgtctcctcgtccgttgggggctcgggcgctcggctggatccatttcgcgtggcgcgcgcggtcgacgggaggtcccagccagccagcgagagagggagccggggccgggcggggcggcacctcgcgagatggcggcggaagcggacgacccgtcgctggcggcgaccctggagaagttccgcctctacgagacgcgcgcgaggttctacgtgatcgggagctcgcgggagaagcgctggttccgggtgctcaagatcgaccgctccgagccctccgagctcaacgtaagcgaggaccccgtctggtactcgctgcaggaggtcaagagcctcctccagcggatcgacgagggcaaccgatccaccgggggcctcgccttcgtcaccaaggcatacggcatcgcaggttgcatcaagttcctggagtcatactacctgattttagtcaccaaacgccgtcaaatcggttgcatttgcgggcatgctatatattgtatagatgagagccagatgatcaccatcccacactcatcagtgcaaacagatgttgcgacctctaagaatgagctgaggtacaagaagcttttggctagtgttgatctcaccaaggatttcttctatagctacacatatccaattatgcagagcctgcaacagagtgttacttctgcagggatgaaagaaatgccttatgaaaatttgtttgtctggaacacttttctgacagagccagtacgttcaaggtgccacaatactctctggacagtagctcttgtccatgggcacttcaagcaggtcaagctatcaatttttggcagagagataaatgttgttctcagctctagaagatcccgacacttcgccgggacacggtatttgaaaagaggtgtgaatgaccatggaaaagttgctaatgatgttgaaacagagcagatagtctttgaagaagaggctggttcctggaagggaagaatgagtgccgtagtacagatgcgaggatcaatccctctcttttggtcacaagaggcatctcgacttagtcctaagcctgatatttttgtgcagagatatgatcccacatatgaagcaacaaaattacattttgatgatctcgcccggcgatatggacatcctatcataatacttaatttgataaagactgttgaaaaaaggccacgtgaaatgatgctcaggcgtgaatattgtagagctgttgaatatcttaatcaaaatgtcccagaggagaagaagttgagattcatccactgggattttcataaatttgctaaaagcaaatctgcaaatgtactgggtgttttaggaaaagttgcgggtgaagcactggacctcactgggttttactacagcggaaagccaaaagtccagaaaaaaaggttaattcagcttagtcgaactagcactgcaagggatggctcccttgatataagggccagttctggagatctttcaaggctcagggatggctcccttgatataagggccagttctggagatctttcaaggctctctagtaatgctgaggcacttagttctacaggctttcaagatatgagaaatcaggctaacaaacaagagtttcttggtgatactccctgttaccaaactggagtgctccgtacaaattgcatagattgcctggatcgcacaaatgttgctcagtatgcatatggccttgctgctttggggaggcaacttcatgcaatgggactgacagatgttttaaaaatccaccctgatagcagcattgcttctgctttgatggaaatgtaccagagcatgggtgatgcacttgctcatcagtatggaggatctgcggcacataacacgacatccagtactgtccaatgaacacaatttcaggttttccctgagaggcaagggaaatggaaggctactactcagtctcgggagttcctgaaatcaattaaacggtattacagtaatgcctacactgatggtgagaagcaggatgctataaatctatttctggggtattttcaaccacaagaaggaaaaccagctctttgggagctggatactgattactatcttcatgtgacgacagctggggatgatcttatgtctgatagctaccacttgagttctgcacctggaaataatgtgttcgtggggtctggagctgcattgaaccctgggaccatattgagccctgtcccagcatgcaaagaggatttctcacggaagaagcttacttcgttcgacaaacttatagaaagaacatgtagttctataaggaatgtaaggcttcattgtgacgctgatctaaagccaagtggaggtgttggaacttctggaatggcaccagatgcagctgagatacagcttaaaagccccaactggttgtttggtcaaaggaagcatacggagacaatttcaaccgcaagagttgccccggttgaaaacgtgaacgaggggaacagagacgagtcaaatgtgtctctttgtggggaactaatttggctatcctcctcagttgaatcatgcgaggaggacattttcagaaggtaccttgcattcacgacagcggatgtagagaatggctggtatggcggaacactgctatatgaccgagatgaaaacagcggggcttacaggcactattctgagctctgccagggagctgtcatggatccctttgagcatgaccctgagaaagagcggcactacgcggaggcccttagcgtggatctcggcgatgcacgggtggaggccgaaatgcaggccgcgctggatgactaccaggtcatagggtcggacctgagcatcatcccttcgtgcggagcactcgcagaggacccgagccagctgacgaggtggatcattggagatgagaggctgcttgtgggtgctgctgcgcagtagaccggtggggttctgtcttctactcttctgtggaaggttgtacagagcaacagattgccattcaccgacccagcctttgtgttttatagatacttccctgaaacaattactccatgtatttagcagcaggtgttttatagacacttccctgaaacaattactccaacacgtgcatgcaatttattgttgtgcagcaggtggtattgctgctgggattagctttggcaataatagttgattgttgtgcagcaggtgtttgatttcattcatct

SEQ ID NO: 220626 - DNA, 3117 bp, Zea Mays
ggacatgtgcgctttctccgcctttcctctcgtctcctcgtccgttgggggctcgggcgctcggctggatccatttcgcgtggcgcgcgcggtcgacgggaggtcccagccagccagcgagagagggagccggggccgggcggggcggcacctcgcgagatggcggcggaagcggacgacccgtcgctggcggcgaccctggagaagttccgcctctacgagacgcgcgcgaggttctacgtgatcgggagctcgcgggagaagcgctggttccgggtgctcaagatcgaccgctccgagccctccgagctcaacgtaagcgaggaccccgtctggtactcgctgcaggaggtcaagagcctcctccagcggatcgacgagggcaaccgatccaccgggggcctcgccttcgtcaccaaggcatacggcatcgcaggttgcatcaagttcctggagtcatactacctgattttagtcaccaaacgccgtcaaatcggttgcatttgcgggcatgctatatattgtatagatgagagccagatgatcaccatcccacactcatcagtgcaaacagatgttgcgacctctaagaatgagctgaggtacaagaagcttttggctagtgttgatctcaccaaggatttcttctatagctacacatatccaattatgcagagcctgcaacagagtgttacttctgcagggatgaaagaaatgccttatgaaaatttgtttgtctggaacacttttctgacagagccagtacgttcaaggtgccacaatactctctggacagtagctcttgtccatgggcacttcaagcaggtcaagctatcaatttttggcagagagataaatgttgttctcagctctagaagatcccgacacttcgccgggacacgagcagatagtctttgaagaagaggctggttcctggaagggaagaatgagtgccgtagtacagatgcgaggatcaatccctctcttttggtcacaagaggcatctcgacttagtcctaagcctgatatttttgtgcagagatatgatcccacatatgaagcaacaaaattacattttgatgatctcgcccggcgatatggacatcctatcataatacttaatttgataaagactgttgaaaaaaggccacgtgaaatgatgctcaggcgtgaatattgtagagctgttgaatatcttaatcaaaatgtcccagaggagaagaagttgagattcatccactgggattttcataaatttgctaaaagcaaatctgcaaatgtactgggtgttttaggaaaagttgcgggtgaagcactggacctcactgggttttactacagcggaaagccaaaagtccagaaaaaaaggttaattcagcttagtcgaactagcactgcaagggatggctcccttgatataagggccagttctggagatctttcaaggctcagggatggctcccttgatataagggccagttctggagatctttcaaggctctctagtaatgctgaggcacttagttctacaggctttcaagatatgagaaatcaggctaacaaacaagagtttcttggtgatactccctgttaccaaactggagtgctccgtacaaattgcatagattgcctggatcgcacaaatgttgctcagtatgcatatggccttgctgctttggggaggcaacttcatgcaatgggactgacagatgttttaaaaatccaccctgatagcagcattgcttctgctttgatggaaatgtaccagagcatgggtgatgcacttgctcatcagtatggaggatctgcggcacataacacggttttccctgagaggcaagggaaatggaaggctactactcagtctcgggagttcctgaaatcaattaaacggtattacagtaatgcctacactgatggtgagaagcaggatgctataaatctatttctggggtattttcaaccacaagaaggaaaaccagctctttgggagctggatactgattactatcttcatgtgacgacagctggggatgatcttatgtctgatagctaccacttgagttctgcacctggaaataatgtgttcgtggggtctggagctgcattgaaccctgggaccatattgagccctgtcccagcatgcaaagaggatttctcacggaagaagcttacttcgttcgacaaacttatagaaagaacatgtagttctataaggaatgtaaggcttcattgtgacgctgatctaaagccaagtggaggtgttggaacttctggaatggcaccagatgcagctgagatacagcttaaaagccccaactggttgtttggtcaaaggaagcatacggagacaatttcaaccgcaagagttgccccggttgaaaacgtgaacgaggggaacagagacgagtcaaatgtgtctctttgtggggaactaatttggctatcctcctcagttgaatcatgcgaggaggacattttcagaaggtaccttgcattcacgacagcggatgtagagaatggctggtatggcggaacactgctatatgaccgagatgaaaacagcggggcttacaggcactattctgagctctgccagggagctgtcatggatccctttgagcatgaccctgagaaagagcggcactacgcggaggcccttagcgtggatctcggcgatgcacgggtggaggccgaaatgcaggccgcgctggatgactaccaggtcatagggtcggacctgagcatcatcccttcgtgcggagcactcgcagaggacccgagccagctgacgaggtggatcattggagatgagaggctgcttgtgggtgctgctgcgcagtagaccggtggggttctgtcttctactcttctgtggaaggttgtacagagcaacagattgccattcaccgacccagcctttgtgttttatagatacttccctgaaacaattactccatgtatttagcagcaggtgttttatagacacttccctgaaacaattactccaacacgtgcatgcaatttattgttgtgcagcaggtggtattgctgctgggattagctttggcaataatagttgattgttgtgcagcaggtgtttgatttcattcatct

SEQ ID NO: 220627 - DNA, 3163 bp, Zea Mays
ggacatgtgcgctttctccgcctttcctctcgtctcctcgtccgttgggggctcgggcgctcggctggatccatttcgcgtggcgcgcgcggtcgacgggaggtcccagccagccagcgagagagggagccggggccgggcggggcggcacctcgcgagatggcggcggaagcggacgacccgtcgctggcggcgaccctggagaagttccgcctctacgagacgcgcgcgaggttctacgtgatcgggagctcgcgggagaagcgctggttccgggtgctcaagatcgaccgctccgagccctccgagctcaacgtaagcgaggaccccgtctggtactcgctgcaggaggtcaagagcctcctccagcggatcgacgagggcaaccgatccaccgggggcctcgccttcgtcaccaaggcatacggcatcgcaggttgcatcaagttcctggagtcatactacctgattttagtcaccaaacgccgtcaaatcggttgcatttgcgggcatgctatatattgtatagatgagagccagatgatcaccatcccacactcatcagtgcaaacagatgttgcgacctctaagaatgagctgagagccagtacgttcaaggtgccacaatactctctggacagtagctcttgtccatgggcacttcaagcaggtcaagctatcaatttttggcagagagataaatgttgttctcagctctagaagatcccgacacttcgccgggacacggtatttgaaaagaggtgtgaatgaccatggaaaagttgctaatgatgttgaaacagagcagatagtctttgaagaagaggctggttcctggaagggaagaatgagtgccgtagtacagatgcgaggatcaatccctctcttttggtcacaagaggcatctcgacttagtcctaagcctgatatttttgtgcagagatatgatcccacatatgaagcaacaaaattacattttgatgatctcgcccggcgatatggacatcctatcataatacttaatttgataaagactgttgaaaaaaggccacgtgaaatgatgctcaggcgtgaatattgtagagctgttgaatatcttaatcaaaatgtcccagaggagaagaagttgagattcatccactgggattttcataaatttgctaaaagcaaatctgcaaatgtactgggtgttttaggaaaagttgcgggtgaagcactggacctcactgggttttactacagcggaaagccaaaagtccagaaaaaaaggttaattcagcttagtcgaactagcactgcaagggatggctcccttgatataagggccagttctggagatctttcaaggctcagggatggctcccttgatataagggccagttctggagatctttcaaggctctctagtaatgctgaggcacttagttctacaggctttcaagatatgagaaatcaggctaacaaacaagagtttcttggtgatactccctgttaccaaactggagtgctccgtacaaattgcatagattgcctggatcgcacaaatgttgctcagtatgcatatggccttgctgctttggggaggcaacttcatgcaatgggactgacagatgttttaaaaatccaccctgatagcagcattgcttctgctttgatggaaatgtaccagagcatgggtgatgcacttgctcatcagtatggaggatctgcggcacataacacggttttccctgagaggcaagggaaatggaaggctactactcagtctcgggagttcctgaaatcaattaaacggtattacagtaatgcctacactgatggtgagaagcaggatgctataaatctgtaagtctatcgtgttgcttttatcataatagatgtactgtattaaacatataaggtagtgagtgaaccagctcttgagttgtctagtgccatgggtgcaatcagatttctggggtactaattcttagtttggtggtactatcagatttctggggtattttcaaccacaagaaggaaaaccagctctttgggagctggatactgattactatcttcatgtgacgacagctggggatgatcttatgtctgatagctaccacttgagttctgcacctggaaataatgtgttcgtggggtctggagctgcattgaaccctgggaccatattgagccctgtcccagcatgcaaagaggatttctcacggaagaagcttacttcgttcgacaaacttatagaaagaacatgtagttctataaggaatgtaaggcttcattgtgacgctgatctaaagccaagtggaggtgttggaacttctggaatggcaccagatgcagctgagatacagcttaaaagccccaactggttgtttggtcaaaggaagcatacggagacaatttcaaccgcaagagttgccccggttgaaaacgtgaacgaggggaacagagacgagtcaaatgtgtctctttgtggggaactaatttggctatcctcctcagttgaatcatgcgaggaggacattttcagaaggtaccttgcattcacgacagcggatgtagagaatggctggtatggcggaacactgctatatgaccgagatgaaaacagcggggcttacaggcactattctgagctctgccagggagctgtcatggatccctttgagcatgaccctgagaaagagcggcactacgcggaggcccttagcgtggatctcggcgatgcacgggtggaggccgaaatgcaggccgcgctggatgactaccaggtcatagggtcggacctgagcatcatcccttcgtgcggagcactcgcagaggacccgagccagctgacgaggtggatcattggagatgagaggctgcttgtgggtgctgctgcgcagtagaccggtggggttctgtcttctactcttctgtggaaggttgtacagagcaacagattgccattcaccgacccagcctttgtgttttatagatacttccctgaaacaattactccatgtatttagcagcaggtgttttatagacacttccctgaaacaattactccaacacgtgcatgcaatttattgttgtgcagcaggtggtattgctgctgggattagctttggcaataatagttgattgttgtgcagcaggtgtttgatttcattcatct

SEQ ID NO: 220628 - DNA, 3192 bp, Zea Mays
ggacatgtgcgctttctccgcctttcctctcgtctcctcgtccgttgggggctcgggcgctcggctggatccatttcgcgtggcgcgcgcggtcgacgggaggtcccagccagccagcgagagagggagccggggccgggcggggcggcacctcgcgagatggcggcggaagcggacgacccgtcgctggcggcgaccctggagaagttccgcctctacgagacgcgcgcggttgcttgctggaacgcagaggttctacgtgatcgggagctcgcgggagaagcgctggttccgggtgctcaagatcgaccgctccgagccctccgagctcaacgtaagcgaggaccccgtctggtactcgctgcaggaggtcaagagcctcctccagcggatcgacgagggcaaccgatccaccgggggcctcgccttcgtcaccaaggcatacggcatcgcaggttgcatcaagttcctggagtcatactacctgattttagtcaccaaacgccgtcaaatcggttgcatttgcgggcatgctatatattgtatagatgagagccagatgatcaccatcccacactcatcagtgcaaacagatgttgcgacctctaagaatgagctgaggtacaagaagcttttggctagtgttgatctcaccaaggatttcttctatagctacacatatccaattatgcagagcctgcaacagagtgttacttctgcagggatgaaagaaatgccttatgaaaatttgtttgtctggaacacttttctgacagagccagtacgttcaaggtgccacaatactctctggacagtagctcttgtccatgggcacttcaagcaggtcaagctatcaatttttggcagagagataaatgttgttctcagctctagaagatcccgacacttcgccgggacacggtatttgaaaagaggtgtgaatgaccatggaaaagttgctaatgatgttgaaacagagcagatagtctttgaagaagaggctggttcctggaagggaagaatgagtgccgtagtacagatgcgaggatcaatccctctcttttggtcacaagaggcatctcgacttagtcctaagcctgatatttttgtgcagagatatgatcccacatatgaagcaacaaaattacattttgatgatctcgcccggcgatatggacatcctatcataatacttaatttgataaagactgttgaaaaaaggccacgtgaaatgatgctcaggcgtgaatattgtagagctgttgaatatcttaatcaaaatgtcccagaggagaagaagttgagattcatccactgggattttcataaatttgctaaaagcaaatctgcaaatgtactgggtgttttaggaaaagttgcgggtgaagcactggacctcactgggttttactacagcggaaagccaaaagtccagaaaaaaaggttaattcagcttagtcgaactagcactgcaagggatggctcccttgatataagggccagttctggagatctttcaaggctcagggatggctcccttgatataagggccagttctggagatctttcaaggctctctagtaatgctgaggcacttagttctacaggctttcaagatatgagaaatcaggctaacaaacaagagtttcttggtgatactccctgttaccaaactggagtgctccgtacaaattgcatagattgcctggatcgcacaaatgttgctcagtatgcatatggccttgctgctttggggaggcaacttcatgcaatgggactgacagatgttttaaaaatccaccctgatagcagcattgcttctgctttgatggaaatgtaccagagcatgggtgatgcacttgctcatcagtatggaggatctgcggcacataacacggttttccctgagaggcaagggaaatggaaggctactactcagtctcgggagttcctgaaatcaattaaacggtattacagtaatgcctacactgatggtgagaagcaggatgctataaatctatttctggggtattttcaaccacaagaaggaaaaccagctctttgggagctggatactgattactatcttcatgtgacgacagctggggatgatcttatgtctgatagctaccacttgagttctgcacctggaaataatgtgttcgtggggtctggagctgcattgaaccctgggaccatattgagccctgtcccagcatgcaaagaggatttctcacggaagaagcttacttcgttcgacaaacttatagaaagaacatgtagttctataaggaatgtaaggcttcattgtgacgctgatctaaagccaagtggaggtgttggaacttctggaatggcaccagatgcagctgagatacagcttaaaagccccaactggttgtttggtcaaaggaagcatacggagacaatttcaaccgcaagagttgccccggttgaaaacgtgaacgaggggaacagagacgagtcaaatgtgtctctttgtggggaactaatttggctatcctcctcagttgaatcatgcgaggaggacattttcagaaggtaccttgcattcacgacagcggatgtagagaatggctggtatggcggaacactgctatatgaccgagatgaaaacagcggggcttacaggcactattctgagctctgccagggagctgtcatggatccctttgagcatgaccctgagaaagagcggcactacgcggaggcccttagcgtggatctcggcgatgcacgggtggaggccgaaatgcaggccgcgctggatgactaccaggtcatagggtcggacctgagcatcatcccttcgtgcggagcactcgcagaggacccgagccagctgacgaggtggatcattggagatgagaggctgcttgtgggtgctgctgcgcagtagaccggtggggttctgtcttctactcttctgtggaaggttgtacagagcaacagattgccattcaccgacccagcctttgtgttttatagatacttccctgaaacaattactccatgtatttagcagcaggtgttttatagacacttccctgaaacaattactccaacacgtgcatgcaatttattgttgtgcagcaggtggtattgctgctgggattagctttggcaataatagttgattgttgtgcagcaggtgtttgatttcattcatct

SEQ ID NO: 220629 - DNA, 3072 bp, Zea Mays
ggacatgtgcgctttctccgcctttcctctcgtctcctcgtccgttgggggctcgggcgctcggctggatccatttcgcgtggcgcgcgcggtcgacgggaggtcccagccagccagcgagagagggagccggggccgggcggggcggcacctcgcgagatggcggcggaagcggacgacccgtcgctggcggcgaccctggagaagttccgcctctacgagacgcgcgcgaggttctacgtgatcgggagctcgcgggagaagcgctggttccgggtgctcaagatcgaccgctccgagccctccgagctcaacgtaagcgaggaccccgtctggtactcgctgcaggaggtcaagagcctcctccagcggatcgacgagggcaaccgatccaccgggggcctcgccttcgtcaccaaggcatacggcatcgcaggttgcatcaagttcctggagtcatactacctgattttagtcaccaaacgccgtcaaatcggttgcatttgcgggcatgctatatattgtatagatgagagccagatgatcaccatcccacactcatcagtgcaaacagatgttgcgacctctaagaatgagctgagggatgaaagaaatgccttatgaaaatttgtttgtctggaacacttttctgacagagccagtacgttcaaggtgccacaatactctctggacagtagctcttgtccatgggcacttcaagcaggtcaagctatcaatttttggcagagagataaatgttgttctcagctctagaagatcccgacacttcgccgggacacggtatttgaaaagaggtgtgaatgaccatggaaaagttgctaatgatgttgaaacagagcagatagtctttgaagaagaggctggttcctggaagggaagaatgagtgccgtagtacagatgcgaggatcaatccctctcttttggtcacaagaggcatctcgacttagtcctaagcctgatatttttgtgcagagatatgatcccacatatgaagcaacaaaattacattttgatgatctcgcccggcgatatggacatcctatcataatacttaatttgataaagactgttgaaaaaaggccacgtgaaatgatgctcaggcgtgaatattgtagagctgttgaatatcttaatcaaaatgtcccagaggagaagaagttgagattcatccactgggattttcataaatttgctaaaagcaaatctgcaaatgtactgggtgttttaggaaaagttgcgggtgaagcactggacctcactgggttttactacagcggaaagccaaaagtccagaaaaaaaggttaattcagcttagtcgaactagcactgcaagggatggctcccttgatataagggccagttctggagatctttcaaggctcagggatggctcccttgatataagggccagttctggagatctttcaaggctctctagtaatgctgaggcacttagttctacaggctttcaagatatgagaaatcaggctaacaaacaagagtttcttggtgatactccctgttaccaaactggagtgctccgtacaaattgcatagattgcctggatcgcacaaatgttgctcagtatgcatatggccttgctgctttggggaggcaacttcatgcaatgggactgacagatgttttaaaaatccaccctgatagcagcattgcttctgctttgatggaaatgtaccagagcatgggtgatgcacttgctcatcagtatggaggatctgcggcacataacacggttttccctgagaggcaagggaaatggaaggctactactcagtctcgggagttcctgaaatcaattaaacggtattacagtaatgcctacactgatggtgagaagcaggatgctataaatctatttctggggtattttcaaccacaagaaggaaaaccagctctttgggagctggatactgattactatcttcatgtgacgacagctggggatgatcttatgtctgatagctaccacttgagttctgcacctggaaataatgtgttcgtggggtctggagctgcattgaaccctgggaccatattgagccctgtcccagcatgcaaagaggatttctcacggaagaagcttacttcgttcgacaaacttatagaaagaacatgtagttctataaggaatgtaaggcttcattgtgacgctgatctaaagccaagtggaggtgttggaacttctggaatggcaccagatgcagctgagatacagcttaaaagccccaactggttgtttggtcaaaggaagcatacggagacaatttcaaccgcaagagttgccccggttgaaaacgtgaacgaggggaacagagacgagtcaaatgtgtctctttgtggggaactaatttggctatcctcctcagttgaatcatgcgaggaggacattttcagaaggtaccttgcattcacgacagcggatgtagagaatggctggtatggcggaacactgctatatgaccgagatgaaaacagcggggcttacaggcactattctgagctctgccagggagctgtcatggatccctttgagcatgaccctgagaaagagcggcactacgcggaggcccttagcgtggatctcggcgatgcacgggtggaggccgaaatgcaggccgcgctggatgactaccaggtcatagggtcggacctgagcatcatcccttcgtgcggagcactcgcagaggacccgagccagctgacgaggtggatcattggagatgagaggctgcttgtgggtgctgctgcgcagtagaccggtggggttctgtcttctactcttctgtggaaggttgtacagagcaacagattgccattcaccgacccagcctttgtgttttatagatacttccctgaaacaattactccatgtatttagcagcaggtgttttatagacacttccctgaaacaattactccaacacgtgcatgcaatttattgttgtgcagcaggtggtattgctgctgggattagctttggcaataatagttgattgttgtgcagcaggtgtttgatttcattcatct

SEQ ID NO: 220630 - DNA, 2165 bp, Zea Mays
ccaacgcaccccaccgcacactcacaggcgccagcctagcccacgctgttgttctcctctctcagtcgcctcgccccaccgtgtctccctcccctcggtgtcgtcaatcaccgcacccgctgctgctagcccgcaactccctcgcttcctgcacccacatccccgcggcgctacctgcctacccagatcccgctcgccggtggtgccctcctcagtcctcactctcccgccgctggcgccgccggagcgagggggactgcccataccctactaggacgagcagtaggaggcggaggggcgagatccggcggaggccgccccgatgggggacttcaatgtggcactggtgatcgtggcggcggtggtcagcgtgctggtgctgctcgtcagcgtctaccttctcgtcaactaccagcaccccgacgacgtcaaccaggcctacttccccaagctcgtcgtcgtgctcggcctcaccgtcgccgtcctctccatcctcatgctccccgccgacgtcgccaaccgccaggcatgccgcaaggccgtctacaacggcgcctgcagcctcacgctccccatgaggacgctctggctcgtcgtttacatcgttgacgccgtcctcgtcttcctcgtcatccccttcgcaatgttctactacgagggcgaccaggacaagtccgtcgggaagaggctcaggaccgcgctcatctgggtcgtcgcgtccgcggtagtgtgcggcctcgtcctcggcatcctatacggacttgttggtaaagtggacttcactgtcaggcacctatcttcctcggtccagacatttccaaactcattttctggattctcaagtggccagccgtgcattagtccattgactcgtcagtgtgcggcttctactgcaccggctaactcgcaaacaacttggacaatgcgtgctaccttccctgaatatgtggttgctcttactacaattgttggatctgtgcttttcacgatatttggtggtgtcggaattgcctgccttccattgggacttatattctcatttgttcggcgtccaaaagctgtaattacacgctcacaatatataaaggaagcaactgaattggggaagaaggccagggagctgaaaaaggcggctgaagctcttcaccaagaagaaagaagtgggaacaagggccggaaatggcgaaaaaacgtgaaggctgtagagaaggagttactacttctggaagatgacatgaaggctctagaagagatgtatcctcaaggagaacaggcagaggctacttgggcattcacagtccttgggtacattggaaaacttatatttggtgttgttgggttaattgtttcaatagcttgggttgcacatatcgtcatatacttgttgattgatcctcctctatcttctttcctgaatgaagtcttcataaagttggatggtgtttgggtgattgctggggagatgatgcttggtttgaaacttgttttcatcacaattcacccaatgaaatggggaggcactttaatgaactcctttttgtttaatgttgggctcatactactttgctccatcagtgtgattcagttctgtgccacggcttttgcctattatgcacaagcaactgctgctcaagagatctttggccacacattgcaatcccttcgtggaattaagtatctttacaagtacaatgttttccagtatggctttgttgctcttgccatcctcacactcttctactatgctatatttgggtggagaaaaaagaagccaacagggaggttccagctctcaaaatgattcatcacatttcccccctgagtgatagttcagttagcgtcgtacggatgtatatgaacgaaaccaaatcttttcaaagagctgaggagctgcaaatggtgtatattatcaactacgtgacctcaaagccgagaatgttggttaccacggacatggatgttagaagtagaacccagttaactttgcagcgtttggtgtgtttgggggcgctttgccgcccccagttcgatattcatttcttggttgtgtctggagttagtcagttcattgcttttgtatgtattatatactgtgattacaacacaaggttctaggttgtattaatgatatgtcctgatcattcctgtgcccgttccactgtctt

SEQ ID NO: 220631 - DNA, 1737 bp, Zea Mays
ccgtgtctccctcccctcggtgtcgtcaatcaccgcacccgctgctgctagcccgcaactccctcgcttcctgcacccacatccccgcggcgctacctgcctacccagatcccgctcgccggtggtgccctcctcagtcctcactctcccgccgctggcgccgccggagcgagggggactgcccataccctactaggacgagcagtaggaggcggaggggcgagatccggcggaggccgccccgatgggggacttcaatgtggcactggtgatcgtggcggcggtggtcagcgtgctggtgctgctcgtcagcgtctaccttctcgtcaactaccagcaccccgacgacgtcaaccaggcctacttccccaagctcgtcgtcgtgctcggcctcaccgtcgccgtcctctccatcctcatgctccccgccgacgtcgccaaccgccaggcatgccgcaaggccgtctacaacggcgcctgcagcctcacgctccccatgaggacgctctggctcgtcgtttacatcgttgacgccgtcctcgtcttcctcgtcatccccttcgcaatgttctactacgagggcgaccaggacaagtccgtcgggaagaggctcaggaccgcgctcatctgggtcgtcgcgtccgcggtagtgtgcggcctcgtcctcggcatcctatacggacttgttggtaaagtggacttcactgtcaggcacctatcttcctcggtccagacatttccaaactcattttctggattctcaagtggccagccgtgcattagtccattgactcgtcagtgtgcggcttctactgcaccggctaactcgcaaacaacttggacaatgcgtgctaccttccctgaatatgtggttgctcttactacaattgttggatctgtgcttttcacgatatttggtggtgtcggaattgcctgccttccattgggacttatattctcatttgttcggcgtccaaaagctgtaattacacgctcacaatatataaaggaagcaactgaattggggaagaaggccagggagctgaaaaaggcggctgaagctcttcaccaagaagaaagaagtgggaacaagggccggaaatggcgaaaaaacgtgaaggctgtagagaaggagttactacttctggaagatgacatgaaggctctagaagagatgtatcctcaaggagaacaggcagaggctacttgggcattcacagtccttgggtacattggaaaacttatatttggtgttgttgggttaattgtttcaatagcttgggttgcacatatcgtcatatacttgttgattgatcctcctctatcttctttcctgaatgaagtcttcataaagttggatggtgtttggggtctccttgggactgctgctttcgcattcttctgcttctatctccttattgcagtgattgctggggagatgatgcttggtttgaaacttgttttcatcacaattcacccaatgaaatggggaggcactttaatgaactcctttttgtttaatgttgggctcatactactttgctccatcagtgtgattcagttctgtgccacggcttttgcctattatgcacaagcaactgctgctcaagagatctttggccacacattgcaatcccttcgtggaattaagtatctttacaagtacaatgttttccagtatggctttgttgctcttgccatcctcacactcttctactatgctatatttaaatcaag

SEQ ID NO: 220632 - DNA, 2349 bp, Zea Mays
agtttggtatattgttggaaagaaatgtgaagaagactatattgttgctagaaccgaagaggaggcgattgcagaagctcatgaaaaatatggaaaatcagttgaaatatatcaagaccctgatgttcttgatacttggttctcaagtgctctgtggcctttcagcacgcttggttggcctgatctttccaaggaggattataagcatttttatccttcaactgttctggagacaggccacgatattttgttcttctgggttgcacgaatggtcatgatgggaattgagttcacaggatcagtaccattttcttatgtctatctacatggtcttatccgggatgctgagggtcgaaaaatgtcgaagacattagggaatgtcattgatcccctagataccatcaaagagtacgggacagatgctttgagatttacactatctttgggcactgcaggccaggacctcaatctctctacagaaaggttgacgtcaaataaggctttcacaaacaagctgtggaacgcagggaaatttttgttacagaacttgcctgataaaaatgatgtctctgcatgggatgtcttgttgtctaataagttcgactcagaagcatcactccagaaactgccattgccagaatgctgggtggttacaggactacatgaactcatcgataaggtcagcagaagctatgataagtttttcttcggagatgctgctagagaaatatatgattacttctggggggattttgctgattggtatattgaagctagcaaaacacggctttaccactcgagtgacaagatcgctgctgctacagcccagagtgttctggtgtatgtgtttgaaaacatactgaagttattgcatcccttcatgccattcgtcactgaagaattatggcaggcatttccatacagaaaacaagcacttatggttactccctggcctaccactgaccttcctaaagatttgaggtccatcaaacggttccagaatttgcaatcattggagaactgcgcatcttatataaaagagaggaagaaaagccatacaaaagatggcatcttgctgagcaagttccccaaggatcctacacacaaccgtaggacattacaaaccggaaccaagacttgaccctacctcgctaagagctgcaactaagcctaggtgctttagctcttcagctcctgccatagcccagctagtacattcatccaggaaccttcgaagaattctagataatgagggggactccccttcaaacactgttctgtttctctggatccatagacaccaagctcccaggaggccaggatgatcaaggagttaagcccctttttcatgttcttggaaaccctgaggctcattcttctccaccattctgcaaaagactcctcgtcagctgtaggagtgaggtgtcccaagccaagagcagaaagaattttgtgccaaaatcgccgagcaaagatgcaagcagaaagaaggtgctgaattgtctcctgggcttgatcacacatggggcaaacatccggagggagaagcaggtcctagcattactttcaaagcttgacgttcagaacgtacattttactgaatcagcaccaggcgatgcaaaccagtcggttcacattgttgctgatgagggtttggaggcgtatctacctttggctgatatggttgacgtgtctgaagaggttaagcggctctccaagcgcctctccaagatgcagtcggagtatgatgctcttgttgcccgactcaattccccaagttttgttgaaaaggcccctgaagatattgttcgcggagttcgtgaaaaagcgtctgaggcagacgagaagatctctctaactaaaaatcgtctcacttttctgcaatcaaccattaccacttaaatacagtaatccacggggactctaccaggatgccattttgatcgatgacgcaggacaaaactgattgttaatagtttttggttgaaggatatgatagattggcaacgaagttgtgccttgtccagcagaaacacacattctttctagttcatatctgttgtctcttgaaacttaaaacatacattcggctaggcatataatttatattcctgacttatggttttagagcctttcgggatgcccttagttgaggtaaattttgttctgcctctgaagttttgctgatgccattgttagtaatattcatattttgtaaggtgggcgcacgttattagatatgaatgatctgtaaggtcggtgcacatgtattatcaatgactattgtttcgggcgtcagtcggtttctgctgattctaaaggaaagagatcataaggaaaatgaaccca

SEQ ID NO: 220633 - DNA, 2504 bp, Zea Mays
  misc_feature (1)..(1): n is a, c, g, or t
nagtttggtatattgttggaaagaaatgtgaagaagactatattgttgctagaaccgaagaggaggcgattgcagaagctcatgaaaaatatggaaaatcagttgaaatatatcaagaccctgatgttcttgatacttggttctcaagtgctctgtggcctttcagcacgcttggttggcctgatctttccaaggaggattataagcatttttatccttcaactgttctggagacaggccacgatattttgttcttctgggttgcacgaatggtcatgatgggaattgagttcacaggatcagtaccattttcttatgtctatctacatggtcttatccgggatgctgagggtcgaaaaatgtcgaagacattagggaatgtcattgatcccctagataccatcaaagagtacgggacagatgctttgagatttacactatctttgggcactgcaggccaggacctcaatctctctacagaaaggttgacgtcaaataaggctttcacaaacaagctgtggaacgcagggaaatttttgttacagaacttgcctgataaaaatgatgtctctgcatgggatgtcttgttgtctaataagttcgactcagaagcatcactccagaaactgccattgccagaatgctgggtggttacaggactacatgaactcatcgataaggtcagcagaagctatgataagtttttcttcggagatgctgctagagaaatatatgattacttctggggggattttgctgattggtatattgaagctagcaaaacacggctttaccactcgagtgacaagatcgctgctgctacagcccagagtgttctggtgtatgtgtttgaaaacatactgaagttattgcatcccttcatgccattcgtcactgaagaattatggcaggcatttccatacagaaaacaagcacttatggttactccctggcctaccactgaccttcctaaagatttgaggtccatcaaacggttccagaatttgcaatcattgataagaggaatcagaaatgttcgagcagaatattctgttgagccagctaaacggatatcagcttctgttgttgctactgcggatgtcctggaatacgtatcagtaagtgtgcagatccattttgttagtgacactttttttctcgaatgcgcaggagaactgcgcatcttatataaaagagaggaagaaaagccatacaaaagatggcatcttgctgagcaagttccccaaggatcctacacacaaccgtaggacattacaaaccggaaccaagacttgaccctacctcgctaagagctgcaactaagcctaggtgctttagctcttcagctcctgccatagcccagctagtacattcatccaggaaccttcgaagaattctagataatgagggggactccccttcaaacactgttctgtttctctggatccatagacaccaagctcccaggaggccaggatgatcaaggagttaagcccctttttcatgttcttggaaaccctgaggctcattcttctccaccattctgcaaaagactcctcgtcagctgtaggagtgaggtgtcccaagccaagagcagaaagaattttgtgccaaaatcgccgagcaaagatgcaagcagaaagaaggtgctgaattgtctcctgggcttgatcacacatggggcaaacatccggagggagaagcaggtcctagcattactttcaaagcttgacgttcagaacgtacattttactgaatcagcaccaggcgatgcaaaccagtcggttcacattgttgctgatgagggtttggaggcgtatctacctttggctgatatggttgacgtgtctgaagaggttaagcggctctccaagcgcctctccaagatgcagtcggagtatgatgctcttgttgcccgactcaattccccaagttttgttgaaaaggcccctgaagatattgttcgcggagttcgtgaaaaagcgtctgaggcagacgagaagatctctctaactaaaaatcgtctcacttttctgcaatcaaccattaccacttaaatacagtaatccacggggactctaccaggatgccattttgatcgatgacgcaggacaaaactgattgttaatagtttttggttgaaggatatgatagattggcaacgaagttgtgccttgtccagcagaaacacacattctttctagttcatatctgttgtctcttgaaacttaaaacatacattcggctaggcatataatttatattcctgacttatggttttagagcctttcgggatgcccttagttgaggtaaattttgttctgcctctgaagttttgctgatgccattgttagtaatattcatattttgtaaggtgggcgcacgttattagatatgaatgatctgtaaggtcggtgcacatgtattatcaatgactattgtttcgggcgtcagtcggtttctgctgattctaaaggaaagagatcataaggaaaatgaaccca

SEQ ID NO: 220634 - DNA, 1285 bp, Zea Mays
ggtatattgttggaaagaaatgtgaagaagactatattgttgctagaaccgaagaggaggcgattgcagaagctcatgaaaaatatggaaaatcagttgaaatatatcaagaccctgatgttcttgatacttggttctcaagtgctctgtggcctttcagcacgcttggttggcctgatctttccaaggaggattataagcatttttatccttcaactgttctggagacaggccacgatattttgttcttctgggttgcacgaatggtcatgatgggaattgagttcacaggatcagtaccattttcttatgtctatctacatggtcttatccgggatgctgagggtcgaaaaatgtcgaagacattagggaatgtcattgatcccctagataccatcaaagagtacgggacagatgctttgagatttacactatctttgggcactgcaggccaggacctcaatctctctacagaaaggttgacgtcaaataaggctttcacaaacaagctgtggaacgcagggaaatttttgttacagaacttgcctgataaaaatgatgtctctgcatgggatgtcttgttgtctaataagttcgactcagaagcatcactccagaaactgccattgccagaatgctgggtggttacaggactacatgaactcatcgataaggtatattgaagctagcaaaacacggctttaccactcgagtgacaagatcgctgctgctacagcccagagtgttctggtgtatgtgtttgaaaacatactgaagttattgcatcccttcatgccattcgtcactgaagaattatggcaggcatttccatacagaaaacaagcacttatggttactccctggcctaccactgaccttcctaaagatttgaggtccatcaaacggttccagaatttgcaatcattggagaactgcgcatcttatataaaagagaggaagaaaagccatacaaaagatggcatcttgctgagcaagttccccaaggatcctacacacaaccgtaggacattacaaaccggaaccaagacttgaccctacctcgctaagagctgcaactaagcctaggtgctttagctcttcagctcctgccatagcccagctagtacattcatccaggaaccttcgaagaattctagataatgagggggactccccttcaaacactgttctgtttctctggatccatagacaccaagctcccaggaggccaggatgatcaaggagttaagcccctttttcatgttcttggaaaccctgaggctca

SEQ ID NO: 220635 - DNA, 1499 bp, Zea Mays
ggactttgcatgcttgggctcgtcggcaaccggacaggaggacagcaaggcggaagcgcaaccgggcgtcgctggtccgacgggcggcacgtgtcagggagcgtgacaggggcggcagatccggacctccacgtccgtatccatatccacatccatccatcaaacacggaagagagagaggaagggagggagggagaggagagattattttggaccagttccaccgcttaatttgcaggaccgccaccccccgcggcgccgacgatcacctcaggcgtgcgcggatatggggcgccgcggctcctacgaccgcctcgaggcgctctccctggagatcgagcgcaagctgcacaaggccctgatgtccaactcacagcgtcttcagatacttcagcaattgtttgctgacatcgcattgaaggtggatgatcgcgctcgagatgcaattatgagtgagagtgatgatggcattgctccagcagatgaacgggaggatggttggctatgcttctatgagattcttgccaatcattttgttagagtgcctgaaagtggcaggcgtatacttgagttgattgtgcaactctggagccagtccttcgcggccaacatatttgcacttcttttccagaaatggttgtttgaagcccctcttgatgaaaaagaaatatcgctacgatatagctctgctcttgttcaaggtgctacaaatgtattttggattgacatacagacaaatacaagacattttctctctttgtatcattatctccttgaggacgttgctctagtccctgaaagacttagtaaaatatcattacaggctggtagagaccttttccttctgctctctagattcatgttcttctatgatcaagcttcaaaagctaaaaattgagccagtactactacactacctctcccgcatgagcatacttcaagggttggaactgaggttgagtacaagcaccagactaaaggcctgcctctacagcttcacttctcctggtggccctacctacccaacacgggcggtgcggcacgcagcctggaacaccttggatttgctgttccctatcggtcgttacccgaggcacgtgatcagcctgttcttccggctgctgtatccgtggtactggccttcctcttgctggaacttcgtgatgacctgtgccatgaccgtgtactactacatcctgaacctgctggtgtcgtgttgggagaacatgaggcggcggcccagtcaccggagaacgcacggtgaatgaagacgcggcggcccatccagtggcaccttgtgttgttgttgttgttcatttttctttcctttgcgcgagtggtgtagtagttagtagcagcggcttatgtgttcgtcgcgaaacaacattccctgtataatataaactgctgtacttgttcagctgttgttcatataggaagagccgaatgaagaggaacagctggtaatggagggagagcgtgtgcgcgcatttctcgct

SEQ ID NO: 220636 - DNA, 3104 bp, Zea Mays
ctgtctttatgcaatatgcttatggggctacaagattggttttgatggattatgacaagtctagaagaagtaactccaagaagaggacacattccaattctgatgacggaaagagaaaacggttaaacactaggcatgatgacacatctatgttctctgagccaattgaaaccatctacaggatattgtgcccggtaaaaaagataggcagtgtcttgggaagaggtggtgacattgttaaggcccttagagaggaaactaaagccaagataagggttgctgattccattcctggtgcagatgagagagtaattatcatcttcaattaccaaaatgagcctgaaccgactgatgaagcagctgaagaaaaaaatagtgatggcttagggaacttcaaatcccattgctttgcccaagatgcgttattgaagatacatgataagattgtgtctgatgaaattcatgatgaagtcgccaatgatgaaaagtctgaaagtgcagatgatgtgactgctcgaattttggttcaaggcaatcaagttggctgccttctaggaaaaggtggctccattatacagcaactacgaagtaatactggtgctggaatccgtgtcttgccatctgaaaaccttccccagtgtgcacttaaaagtgatgaactggtgcagatatctggagcaccttcccttgtaagaaaagctctatatgaaatatctactcgtctccatcagcatcctcgtaaggaaaatagacctcttgaagaaataatagatgcaagcacacaaaggaaacgtgaatctccaacactacaacatgaatattcaatgttgccgcacctgcatagtgatcatacacctccaatacccctgcttgatccatatagaagtggaccacaatatcctgttactgaaactgaagagttctctatcagaattctgtgtgcttctgagctcattggttcagttattgggaaaagtggggccaatgttaggcgtgtagagcagcagactggtgctcgcattaaagttcaagagatcgacaaagatgcttctggagaaaggctgatcattatttcatctaatgagataccagctgaaccaatatccccagcaattgaggcactcattttgctccatgataaagttagtgcaccctctgagaaacaccattcaagtacaaggcttgttgtaccatcaagcaaagttggctgtattattggggaaggtggaaaagtgattactgacatgagaagacgaactggggctgaaattcgagtttactcaaaggcagataaaccaaaatacttgtcttttgatgatgaacttgtgcaggttgctgggcctccaactattgcaagaggagccctcacagaaattgcttcgaggcttagaactaggactttgagagatacaagtaccgccaataatcctccaccttttgccccttttgatgatcctcctgttgatatgcctagcagaaagttgtcactatatggagggcctgccactgatccaccgtatggaaggcctgccaatgatccactgtatggaaggcctgccattgatccaccattcggaagacctaccaatgatcgaccatatggaaggactgctgttgctcccccatttggaagacctgccaacgatccaccatatggaaggcctaccaacgatccaccatatggacgaccttccggtagtataccatatggaagaccaaacggaagtgcacctcgtgagccttccgatgcatatcctgtagactacttttctaaaagagaatatcctagtggaagtcctatgtttactagtaatgccccatcagctgcttatgagagatatgcagcacccacacgctttcctactagagaatttccctctgctttcagtcctggtgtagatcatatgcctcatcattcctatcgtgaccatgtgcctactgatagctactctagtaggggtacacagcaattaggcatcacaagaggtggaaattcagatgcttatgactataccgaggtacatccttgacgtgagcttccctcttttgcaaaaggccatcacctaaatttttcattagaagcttgagactttacacatgcctgctccattgcccctgttctgttatgttctgtattaggtggtactcctaaatattgcaaaaaagtcatatgttggtgtcttagctgtcacttctgtggcagcaatgttcaccctataatgtggtcacatggtgcaactcttttcatttgttgtcactcacaacttggttcaatatatatttggcagctgggatgtactctgctgctcttggctttaaccaatttttctttattttgtggcctatcagaaaatctcaagttctgtacatatttaaattttatcattgcacaggctgctggacaaattcatggacgtgaggattacagagaaccgacaagtgctaccgggttcttgagcactattgaactaaggattccaaatagttctttggggtctatcgtcggtgctggtggggtcaatctagcagagatccgtcaggtttctggtgcaagactgaggctacatgaggctcatgctggttcttctgagtctgtggtggagatccagggcacactggaccaagcaaaagctgcccagagcctcctgcaaggctttattagtgcaaacagccggcagcaacagcagccctattcttctcgcatgccactttacccaagctggggatagcttctggtctcatggtcgtgtcagaggaaaacagagtcagcagggtttgtcatgtggctgtagatctcggactgcagattagctgtagcgatgatgttgttgaaggaggctgtttaacagtgcaagcaagataacttatacttatgccttaggacaagtaatattgttttcctctgatgaaatacttggtaacgatctgtctctgtatttttatatttgattctgaatgctttgaaccctagtgttacaaaagctgctattttgaggtcagactacggaggccgaataattctgttatctgcagaattgggcaaaaaagcacatcttgctgaggttcctatgtcttcacccatatcgtttcatattttgtccaga

SEQ ID NO: 220637 - DNA, 2759 bp, Zea Mays
atgcacttactgaagtgcccttaacgactgtctttatgcaatatgcttatggggctacaagattggttttgatggattatgacaagtctagaagaagtaactccaagaagaggacacattccaattctgatgacggaaagagaaaacggttaaacactaggcatgatgacacatctatgttctctgagccaattgaaaccatctacaggatattgtgcccggtaaaaaagataggcagtgtcttgggaagaggtggtgacattgttaaggcccttagagaggaaactaaagccaagataagggttgctgattccattcctggtgcagatgagagagtaattatcatcttcaattaccaaaatgagcctgaaccgactgatgaagcagctgaagaaaaaaatagtgatggcttagggaacttcaaatcccattgctttgcccaagatgcgttattgaagatacatgataagattgtgtctgatgaaattcatgatgaagtcgccaatgatgaaaagtctgaaagtgcagatgatgtgactgctcgaattttggttcaaggcaatcaagttggctgccttctaggaaaaggtggctccattatacagcaactacgaagtaatactggtgctggaatccgtgtcttgccatctgaaaaccttccccagtgtgcacttaaaagtgatgaactggtgcagatatctggagcaccttcccttgtaagaaaagctctatatgaaatatctactcgtctccatcagcatcctcgtaaggaaaatagacctcttgaagaaataatagatgcaagcacacaaaggaaacgtgaatctccaacactacaacatgaatattcaatgttgccgcacctgcatagtgatcatacacctccaatacccctgcttgatccatatagaagtggaccacaatatcctgttactgaaactgaagagttctctatcagaattctgtgtgcttctgagctcattggttcagttattgggaaaagtggggccaatgttaggcgtgtagagcagcagactggtgctcgcattaaagttcaagagatcgacaaagatgcttctggagaaaggctgatcattatttcatctaatgagataccagctgaaccaatatccccagcaattgaggcactcattttgctccatgataaagttagtgcaccctctgagaaacaccattcaagtacaaggcttgttgtaccatcaagcaaagttggctgtattattggggaaggtggaaaagtgattactgacatgagaagacgaactggggctgaaattcgagtttactcaaaggcagataaaccaaaatacttgtcttttgatgatgaacttgtgcaggttgctgggcctccaactattgcaagaggagccctcacagaaattgcttcgaggcttagaactaggactttgagagatacaagtaccgccaataatcctccaccttttgccccttttgatgatcctcctgttgatatgcctagcagaaagttgtcactatatggagggcctgccactgatccaccgtatggaaggcctgccaatgatccactgtatggaaggcctgccattgatccaccattcggaagacctaccaatgatcgaccatatggaaggactgctgttgctcccccatttggaagacctgccaacgatccaccatatggaaggcctaccaacgatccaccatatggacgaccttccggtagtataccatatggaagaccaaacggaagtgcacctcgtgagccttccgatgcatatcctgtagactacttttctaaaagagaatatcctagtggaagtcctatgtttactagtaatgccccatcagctgcttatgagagatatgcagcacccacacgctttcctactagagaatttccctctgctttcagtcctggtgtagatcatatgcctcatcattcctatcgtgaccatgtgcctactgatagctactctagtaggggtacacagcaattaggcatcacaagaggtggaaattcagatgcttatgactataccgaggctgctggacaaattcatggacgtgaggattacagagaaccgacaagtgctaccggaaggttcttgagcactattgaactaaggattccaaatagttctttggggtctatcgtcggtgctggtggggtcaatctagcagagatccgtcaggtttctggtgcaagactgaggctacatgaggctcatgctggttcttctgagtctgtggtggagatccagggcacactggaccaagcaaaagctgcccagagcctcctgcaaggctttattagtgcaaacagccggcagcaacagcagccctattcttctcgcatgccactttacccaagctggggatagcttctggtctcatggtcgtgtcagaggaaaacagagtcagcagggtttgtcatgtggctgtagatctcggactgcagattagctgtagcgatgatgttgttgaaggaggctgtttaacagtgcaagcaagataacttatacttatgccttaggacaagtaatattgttttcctctgatgaaatacttggtaacgatctgtctctgtatttttatatttgattctgaatgctttgaaccctagtgttacaaaagctgctattttgaggtcagactacggaggccgaataattctgttatctgcagaattgggcaaaaaagcacatcttgctgaggttcctatgtcttcacccatatcgtttcatattttgtccaga

SEQ ID NO: 220638 - DNA, 2121 bp, Zea Mays
gctaaatgtaaggcaaactgcagcaggattttgttgctgtgttatgtacatgcacttactgaagtgcccttaacgactgtctttatgcaatatgcttatggggctacaagattggttttgatggattatgacaagtctagaagaagtaactccaagaagaggacacattccaattctgatgacggaaagagaaaacggttaaacactaggcatgatgacacatctatgttctctgagccaattgaaaccatctacaggatattgtgcccggtaaaaaagataggcagtgtcttgggaagaggtggtgacattgttaaggcccttagagaggaaactaaagccaagataagggttgctgattccattcctggtgcagatgagagagtaattatcatcttcaattaccaaaatgagcctgaaccgactgatgaagcagctgaagaaaaaaatagtgatggcttagggaacttcaaatcccattgctttgcccaagatgcgttattgaagatacatgataagattgtgtctgatgaaattcatgatgaagtcgccaatgatgaaaagtctgaaagtgcagatgatgtgactgctcgaattttggttcaaggcaatcaagttggctgccttctaggaaaaggtggctccattatacagcaactacgaagtaatactggtgctggaatccgtgtcttgccatctgaaaaccttccccagtgtgcacttaaaagtgatgaactggtgcagatatctggagcaccttcccttgtaagaaaagctctatatgaaatatctactcgtctccatcagcatcctcgtaaggaaaatagacctcttgaagaaataatagatgcaagcacacaaaggaaacgtgaatctccaacactacaacatgaatattcaatgttgccgcacctgcatagtgatcatacacctccaatacccctgcttgatccatatagaagtggaccacaatatcctgttactgaaactgaagagttctctatcagaattctgtgtgcttctgagctcattggttcagttattgggaaaagtggggccaatgttaggcgtgtagagcagcagactggtgctcgcattaaagttcaagagatcgacaaagatgcttctggagaaaggctgatcattatttcatctaatgagataccagctgaaccaatatccccagcaattgaggcactcattttgctccatgataaagttagtgcaccctctgagaaacaccattcaagtacaaggcttgttgtaccatcaagcaaagttggctgtattattggggaaggtggaaaagtgattactgacatgagaagacgaactggggctgaaattcgagtttactcaaaggcagataaaccaaaatacttgtcttttgatgatgaacttgtgcaggctgctggacaaattcatggacgtgaggattacagagaaccgacaagtgctaccggaaggttcttgagcactattgaactaaggattccaaatagttctttggggtctatcgtcggtgctggtggggtcaatctagcagagatccgtcaggtttctggtgcaagactgaggctacatgaggctcatgctggttcttctgagtctgtggtggagatccagggcacactggaccaagcaaaagctgcccagagcctcctgcaaggctttattagtgcaaacagccggcagcaacagcagccctattcttctcgcatgccactttacccaagctggggatagcttctggtctcatggtcgtgtcagaggaaaacagagtcagcagggtttgtcatgtggctgtagatctcggactgcagattagctgtagcgatgatgttgttgaaggaggctgtttaacagtgcaagcaagataacttatacttatgccttaggacaagtaatattgttttcctctgatgaaatacttggtaacgatctgtctctgtatttttatatttgattctgaatgctttgaaccctagtgttacaaaagctgctattttgaggtcagactacggaggccgaataattctgttatctgcagaattgggcaaaaaagcacatcttgctgaggttcctatgtcttcacccatatcgtttcatattttgtccaga

SEQ ID NO: 220639 - DNA, 2137 bp, Zea Mays
ttcaaatgtgagtttgagtgctaaatgtaaggcaaactgcagcaggattttgttgctgtgttatgtacatgcacttactgaagtgcccttaacgactgtctttatgcaatatgcttatggggctacaagattggttttgatggattatgacaagtctagaagaagtaactccaagaagaggacacattccaattctgatgacggaaagagaaaacggttaaacactaggcatgatgacacatctatgttctctgagccaattgaaaccatctacaggatattgtgcccggtaaaaaagataggcagtgtcttgggaagaggtggtgacattgttaaggcccttagagaggaaactaaagccaagataagggttgctgattccattcctggtgcagatgagagagtaattatcatcttcaattaccaaaatgagcctgaaccgactgatgaagcagctgaagaaaaaaatagtgatggcttagggaacttcaaatcccattgctttgcccaagatgcgttattgaagatacatgataagattgtgtctgatgaaattcatgatgaagtcgccaatgatgaaaagtctgaaagtgcagatgatgtgactgctcgaattttggttcaaggcaatcaagttggctgccttctaggaaaaggtggctccattatacagcaactacgaagtaatactggtgctggaatccgtgtcttgccatctgaaaaccttccccagtgtgcacttaaaagtgatgaactggtgcagatatctggagcaccttcccttgtaagaaaagctctatatgaaatatctactcgtctccatcagcatcctcgtaaggaaaatagacctcttgaagaaataatagatgcaagcacacaaaggaaacgtgaatctccaacactacaacatgaatattcaatgttgccgcacctgcatagtgatcatacacctccaatacccctgcttgatccatatagaagtggaccacaatatcctgttactgaaactgaagagttctctatcagaattctgtgtgcttctgagctcattggttcagttattgggaaaagtggggccaatgttaggcgtgtagagcagcagactggtgctcgcattaaagttcaagagatcgacaaagatgcttctggagaaaggctgatcattatttcatctaatgagataccagctgaaccaatatccccagcaattgaggcactcattttgctccatgataaagttagtgcaccctctgagaaacaccattcaagtacaaggcttgttgtaccatcaagcaaagttggctgtattattggggaaggtggaaaagtgattactgacatgagaagacgaactggggctgaaattcgagtttactcaaaggcagataaaccaaaatacttgtcttttgatgatgaacttgtgcaggctgctggacaaattcatggacgtgaggattacagagaaccgacaagtgctaccgggttcttgagcactattgaactaaggattccaaatagttctttggggtctatcgtcggtgctggtggggtcaatctagcagagatccgtcaggtttctggtgcaagactgaggctacatgaggctcatgctggttcttctgagtctgtggtggagatccagggcacactggaccaagcaaaagctgcccagagcctcctgcaaggctttattagtgcaaacagccggcagcaacagcagccctattcttctcgcatgccactttacccaagctggggatagcttctggtctcatggtcgtgtcagaggaaaacagagtcagcagggtttgtcatgtggctgtagatctcggactgcagattagctgtagcgatgatgttgttgaaggaggctgtttaacagtgcaagcaagataacttatacttatgccttaggacaagtaatattgttttcctctgatgaaatacttggtaacgatctgtctctgtatttttatatttgattctgaatgctttgaaccctagtgttacaaaagctgctattttgaggtcagactacggaggccgaataattctgttatctgcagaattgggcaaaaaagcacatcttgctgaggttcctatgtcttcacccatatcgtttcatattttgtccaga

SEQ ID NO: 220640 - DNA, 2177 bp, Zea Mays
ccacggactccgacactccgttcaacccccctgcctttttgctctcctgttcaccccttgtgcccgcgctctctcgtggcgacgacttgcgcgaccgccgccaacgccaggcacctaggtcttcgtcggtcctttcttcagagacgagcacccaacagggggctacaagattggttttgatggattatgacaagtctagaagaagtaactccaagaagaggacacattccaattctgatgacggaaagagaaaacggttaaacactaggcatgatgacacatctatgttctctgagccaattgaaaccatctacaggatattgtgcccggtaaaaaagataggcagtgtcttgggaagaggtggtgacattgttaaggcccttagagaggaaactaaagccaagataagggttgctgattccattcctggtgcagatgagagagtaattatcatcttcaattaccaaaatgagcctgaaccgactgatgaagcagctgaagaaaaaaatagtgatggcttagggaacttcaaatcccattgctttgcccaagatgcgttattgaagatacatgataagattgtgtctgatgaaattcatgatgaagtcgccaatgatgaaaagtctgaaagtgcagatgatgtgactgctcgaattttggttcaaggcaatcaagttggctgccttctaggaaaaggtggctccattatacagcaactacgaagtaatactggtgctggaatccgtgtcttgccatctgaaaaccttccccagtgtgcacttaaaagtgatgaactggtgcagatatctggagcaccttcccttgtaagaaaagctctatatgaaatatctactcgtctccatcagcatcctcgtaaggaaaatagacctcttgaagaaataatagatgcaagcacacaaaggaaacgtgaatctccaacactacaacatgaatattcaatgttgccgcacctgcatagtgatcatacacctccaatacccctgcttgatccatatagaagtggaccacaatatcctgttactgaaactgaagagttctctatcagaattctgtgtgcttctgagctcattggttcagttattgggaaaagtggggccaatgttaggcgtgtagagcagcagactggtgctcgcattaaagttcaagagatcgacaaagatgcttctggagaaaggctgatcattatttcatctaatgagataccagctgaaccaatatccccagcaattgaggcactcattttgctccatgataaagttagtgcaccctctgagaaacaccattcaagtacaaggcttgttgtaccatcaagcaaagttggctgtattattggggaaggtggaaaagtgattactgacatgagaagacgaactggggctgaaattcgagtttactcaaaggcagataaaccaaaatacttgtcttttgatgatgaacttgtgcaggctgctggacaaattcatggacgtgaggattacagagaaccgacaagtgctaccgggttcttgagcactattgaactaaggattccaaatagttctttggggtctatcgtcggtgctggtggggtcaatctagcagagatccgtcaggtttctggtgcaagactgaggctacatgaggctcatgctggttcttctgagtctgtggtggagatccagggcacactggaccaagcaaaagctgcccagagcctcctgcaaggctttattagtgcaaacagccggcagcaacagcagccctattcttctcgcatgccactttacccaagctggggatagcttctggtctcatggtcgtgtcagaggaaaacagagtcagcagggtttgtcatgtggctgtagatctcggactgcagattagctgtagcgatgatgttgttgaaggaggctgtttaacagtgcaagcaagataacttatacttatgccttaggacaagtaatattgttttcctctgatgaaatacttggtaacgatctgtctctgtatttttatatttgattctgaatgctttgaaccctagtgttacaaaagctgctattttgaggtcagactacggaggccgaataattctgttatctgcagaattgggcaaaaaagcacatcttgctgaggttcctatgtcttcacccatatcgtttcatattttgtccaga

SEQ ID NO: 220641 - DNA, 3364 bp, Zea Mays
cctgttccttgtgctgggtctttatgtgggctgccgtgatcccatatgggggtcggtcaacggatcccgattccctcagcggtcaggcgggcctcatgcctcatcccctaaccgaacaggagtagccacggactccgacactccgttcaacccccctgcctttttgctctcctgttcaccccttgtgcccgcgctctctcgtggcgacgacttgcgcgaccgccgccaacgccaggcacctaggtcttcgtcggtcctttcttcagagacgagcacccaacagggggctacaagattggttttgatggattatgacaagtctagaagaagtaactccaagaagaggacacattccaattctgatgacggaaagagaaaacggttaaacactaggcatgatgacacatctatgttctctgagccaattgaaaccatctacaggatattgtgcccggtaaaaaagataggcagtgtcttgggaagaggtggtgacattgttaaggcccttagagaggaaactaaagccaagataagggttgctgattccattcctggtgcagatgagagagtaattatcatcttcaattaccaaaatgagcctgaaccgactgatgaagcagctgaagaaaaaaatagtgatggcttagggaacttcaaatcccattgctttgcccaagatgcgttattgaagatacatgataagattgtgtctgatgaaattcatgatgaagtcgccaatgatgaaaagtctgaaagtgcagatgatgtgactgctcgaattttggttcaaggcaatcaagttggctgccttctaggaaaaggtggctccattatacagcaactacgaagtaatactggtgctggaatccgtgtcttgccatctgaaaaccttccccagtgtgcacttaaaagtgatgaactggtgcagatatctggagcaccttcccttgtaagaaaagctctatatgaaatatctactcgtctccatcagcatcctcgtaaggaaaatagacctcttgaagaaataatagatgcaagcacacaaaggaaacgtgaatctccaacactacaacatgaatattcaatgttgccgcacctgcatagtgatcatacacctccaatacccctgcttgatccatatagaagtggaccacaatatcctgttactgaaactgaagagttctctatcagaattctgtgtgcttctgagctcattggttcagttattgggaaaagtggggccaatgttaggcgtgtagagcagcagactggtgctcgcattaaagttcaagagatcgacaaagatgcttctggagaaaggctgatcattatttcatctaatgagataccagctgaaccaatatccccagcaattgaggcactcattttgctccatgataaagttagtgcaccctctgagaaacaccattcaagtacaaggcttgttgtaccatcaagcaaagttggctgtattattggggaaggtggaaaagtgattactgacatgagaagacgaactggggctgaaattcgagtttactcaaaggcagataaaccaaaatacttgtcttttgatgatgaacttgtgcaggttgctgggcctccaactattgcaagaggagccctcacagaaattgcttcgaggcttagaactaggactttgagagatacaagtaccgccaataatcctccaccttttgccccttttgatgatcctcctgttgatatgcctagcagaaagttgtcactatatggagggcctgccactgatccaccgtatggaaggcctgccaatgatccactgtatggaaggcctgccattgatccaccattcggaagacctaccaatgatcgaccatatggaaggactgctgttgctcccccatttggaagacctgccaacgatccaccatatggaaggcctaccaacgatccaccatatggacgaccttccggtagtataccatatggaagaccaaacggaagtgcacctcgtgagccttccgatgcatatcctgtagactacttttctaaaagagaatatcctagtggaagtcctatgtttactagtaatgccccatcagctgcttatgagagatatgcagcacccacacgctttcctactagagaatttccctctgctttcagtcctggtgtagatcatatgcctcatcattcctatcgtgaccatgtgcctactgatagctactctagtaggggtacacagcaattaggcatcacaagaggtggaaattcagatgcttatgactataccgaggtacatccttgacgtgagcttccctcttttgcaaaaggccatcacctaaatttttcattagaagcttgagactttacacatgcctgctccattgcccctgttctgttatgttctgtattaggtggtactcctaaatattgcaaaaaagtcatatgttggtgtcttagctgtcacttctgtggcagcaatgttcaccctataatgtggtcacatggtgcaactcttttcatttgttgtcactcacaacttggttcaatatatatttggcagctgggatgtactctgctgctcttggctttaaccaatttttctttattttgtggcctatcagaaaatctcaagttctgtacatatttaaattttatcattgcacaggctgctggacaaattcatggacgtgaggattacagagaaccgacaagtgctaccgggttcttgagcactattgaactaaggattccaaatagttctttggggtctatcgtcggtgctggtggggtcaatctagcagagatccgtcaggtttctggtgcaagactgaggctacatgaggctcatgctggttcttctgagtctgtggtggagatccagggcacactggaccaagcaaaagctgcccagagcctcctgcaaggctttattagtgcaaacagccggcagcaacagcagccctattcttctcgcatgccactttacccaagctggggatagcttctggtctcatggtcgtgtcagaggaaaacagagtcagcagggtttgtcatgtggctgtagatctcggactgcagattagctgtagcgatgatgttgttgaaggaggctgtttaacagtgcaagcaagataacttatacttatgccttaggacaagtaatattgttttcctctgatgaaatacttggtaacgatctgtctctgtatttttatatttgattctgaatgctttgaaccctagtgttacaaaagctgctattttgaggtcagactacggaggccgaataattctgttatctgcagaattgggcaaaaaagcacatcttgctgaggttcctatgtcttcacccatatcgtttcatattttgtccaga

SEQ ID NO: 220642 - DNA, 3389 bp, Zea Mays
ctgctgttgcaatgttgctcgccctgttccttgtgctgggtctttatgtgggctgccgtgatcccatatgggggtcggtcaacggatcccgattccctcagcggtcaggcgggcctcatgcctcatcccctaaccgaacaggagtagccacggactccgacactccgttcaacccccctgcctttttgctctcctgttcaccccttgtgcccgcgctctctcgtggcgacgacttgcgcgaccgccgccaacgccaggcacctaggtcttcgtcggtcctttcttcagagacgagcacccaacagggggctacaagattggttttgatggattatgacaagtctagaagaagtaactccaagaagaggacacattccaattctgatgacggaaagagaaaacggttaaacactaggcatgatgacacatctatgttctctgagccaattgaaaccatctacaggatattgtgcccggtaaaaaagataggcagtgtcttgggaagaggtggtgacattgttaaggcccttagagaggaaactaaagccaagataagggttgctgattccattcctggtgcagatgagagagtaattatcatcttcaattaccaaaatgagcctgaaccgactgatgaagcagctgaagaaaaaaatagtgatggcttagggaacttcaaatcccattgctttgcccaagatgcgttattgaagatacatgataagattgtgtctgatgaaattcatgatgaagtcgccaatgatgaaaagtctgaaagtgcagatgatgtgactgctcgaattttggttcaaggcaatcaagttggctgccttctaggaaaaggtggctccattatacagcaactacgaagtaatactggtgctggaatccgtgtcttgccatctgaaaaccttccccagtgtgcacttaaaagtgatgaactggtgcagatatctggagcaccttcccttgtaagaaaagctctatatgaaatatctactcgtctccatcagcatcctcgtaaggaaaatagacctcttgaagaaataatagatgcaagcacacaaaggaaacgtgaatctccaacactacaacatgaatattcaatgttgccgcacctgcatagtgatcatacacctccaatacccctgcttgatccatatagaagtggaccacaatatcctgttactgaaactgaagagttctctatcagaattctgtgtgcttctgagctcattggttcagttattgggaaaagtggggccaatgttaggcgtgtagagcagcagactggtgctcgcattaaagttcaagagatcgacaaagatgcttctggagaaaggctgatcattatttcatctaatgagataccagctgaaccaatatccccagcaattgaggcactcattttgctccatgataaagttagtgcaccctctgagaaacaccattcaagtacaaggcttgttgtaccatcaagcaaagttggctgtattattggggaaggtggaaaagtgattactgacatgagaagacgaactggggctgaaattcgagtttactcaaaggcagataaaccaaaatacttgtcttttgatgatgaacttgtgcaggttgctgggcctccaactattgcaagaggagccctcacagaaattgcttcgaggcttagaactaggactttgagagatacaagtaccgccaataatcctccaccttttgccccttttgatgatcctcctgttgatatgcctagcagaaagttgtcactatatggagggcctgccactgatccaccgtatggaaggcctgccaatgatccactgtatggaaggcctgccattgatccaccattcggaagacctaccaatgatcgaccatatggaaggactgctgttgctcccccatttggaagacctgccaacgatccaccatatggaaggcctaccaacgatccaccatatggacgaccttccggtagtataccatatggaagaccaaacggaagtgcacctcgtgagccttccgatgcatatcctgtagactacttttctaaaagagaatatcctagtggaagtcctatgtttactagtaatgccccatcagctgcttatgagagatatgcagcacccacacgctttcctactagagaatttccctctgctttcagtcctggtgtagatcatatgcctcatcattcctatcgtgaccatgtgcctactgatagctactctagtaggggtacacagcaattaggcatcacaagaggtggaaattcagatgcttatgactataccgaggtacatccttgacgtgagcttccctcttttgcaaaaggccatcacctaaatttttcattagaagcttgagactttacacatgcctgctccattgcccctgttctgttatgttctgtattaggtggtactcctaaatattgcaaaaaagtcatatgttggtgtcttagctgtcacttctgtggcagcaatgttcaccctataatgtggtcacatggtgcaactcttttcatttgttgtcactcacaacttggttcaatatatatttggcagctgggatgtactctgctgctcttggctttaaccaatttttctttattttgtggcctatcagaaaatctcaagttctgtacatatttaaattttatcattgcacaggctgctggacaaattcatggacgtgaggattacagagaaccgacaagtgctaccggaaggttcttgagcactattgaactaaggattccaaatagttctttggggtctatcgtcggtgctggtggggtcaatctagcagagatccgtcaggtttctggtgcaagactgaggctacatgaggctcatgctggttcttctgagtctgtggtggagatccagggcacactggaccaagcaaaagctgcccagagcctcctgcaaggctttattagtgcaaacagccggcagcaacagcagccctattcttctcgcatgccactttacccaagctggggatagcttctggtctcatggtcgtgtcagaggaaaacagagtcagcagggtttgtcatgtggctgtagatctcggactgcagattagctgtagcgatgatgttgttgaaggaggctgtttaacagtgcaagcaagataacttatacttatgccttaggacaagtaatattgttttcctctgatgaaatacttggtaacgatctgtctctgtatttttatatttgattctgaatgctttgaaccctagtgttacaaaagctgctattttgaggtcagactacggaggccgaataattctgttatctgcagaattgggcaaaaaagcacatcttgctgaggttcctatgtcttcacccatatcgtttcatattttgtccaga

SEQ ID NO: 220643 - DNA, 2698 bp, Zea Mays
actgaattcgatcaaattactacgctcaattcttgagaattctggtcaatccgcagatacagttcagatggttcttgaagaaggcactgactcactgtctgaaattgctcgctctgttgttatgacagctcatcttatgccatccctagccaatgtgtcagtaaatgatgaatctccttttctcttctctaatatgtggaaggttattgttgattcagaagagcctcttgactgccaagagggtgaatttgcaaagaggctagtttgggagttgcctgattcttctcttgatagacaactagcacctggccaatctgccaggaggaaattagcactgggagagagtgcaagtaggcgtgtaagggataatcaactgcctgaacccactgggcagttctcacgaggtttaaatacatccaatgcttcttcgggacatacacgcagagacactttccgtcagcggaaacctaacacaagtagaccaccttcaatgcatgtagatgactatgttgcaagagagagaaacatagatggtgcaagtagtgcgtcaaatattgtgaactctaccccacgaggaacacttagtggaaggcctccatccattcatgttgatgaatttatggcaaggcagagagaacgtcaaaatcatgcgccagccccaactggagatgcacctcaagctaaaagtcagacaacaagtttagatgacagtcttcgtactaagccagagaacttgcgtcaacccaagactgatctcgatgatgatcaagaaattgaaattgtctttgatgaggaatcaggttcggatgataaacttcctttccctcaaccagatgatagtctccaatctccacctgtcattattggggaaaattctcctggtcctgttattgacgagacagaaaatcaggagaatgaaagagttccctttttccagagggccacatctatcccgaaggacgatgaaaatcttggcattggcatttcttcccagactgcaatgctctcagaagctaacagttctttggaactgaaacattcagtttctagcccagggaagaattcttttcgtgatcatgctgaagagtctaattatgattctattggtgtatctgggagaccatctttacaagcagatcatcaacaattatctcgtagacatgaaaagagaagtccacgaaaattttctgagacttctctgtcaaatggattccatgggcgtgagcatagacattccaataaccatccacctctgccaccaatgccacctccaatttcatccgtgtccatgcaaaatactgattcagttaataggcagtcatcttcgttcagtgctcgagatcgaccaacacctaatccttctggttatcctacacaatcttttgactctagtatgcctagtgctttcacaggccttcagggtcaaactcaatacatgcttgcaggcgctggcagttcatcagcgaatgagttacccaatgtggaggccaagcttctatggaacacatttccagcaaataggatccctctggagaccttcagctcaggtttacctgctcggccgatgccaccccttacaccttattcagctgttgctactcagcacgctacgatgaactctggctctcctgcaaacctgtatagccagggcagtgttgtccagccttctccaactgcttctattattagtgattcaaatttggccatgaactccgcatctggcagcatgcttgcatcgaatctgctgccatcatttgcatcacaatttctgatgagcaggccttcaatgcctactccgttttttggcacgcctcttcaacaagttcaattctcatccggtcttccacaaaatatttctaaccctcagccacctgtctcaatacaaccacggccacccccacccccaccacccccgcagcagccacatccttctcagacactccaacaacttggtgctatccaattaccacaccaagatcagcagcactcatatccccatagtgctatcttgccacaagttacgttgcagtttcctaaccagctacccattcctcaagtacaattgtatcatcaaagccagcaggaatctgggcaaacactgaggcaagttggtgaacaatcacaacttcagaaccagggtatgcaagcagatagtttctctcaacagcagcaagactcagggatcaacttaaaccagttcttttcatctccagaagccattcagagtctacttagtgatcgtgagaagctctgccaacttttagagcagaatccaaaacttatgcaaatgctccagttgtagtcgcactggaggtgctattgtgaaagtgaaatctgatgctggtcgatcgctaggttcctagagtatggtgttgttttgttttcggctatggctgtagctagatgaaagcaactgccagcttgctagtcgccgaaatgtattcctatgtacattatatgtaactttgttctgtaatgtgaaaatttgtaatgttagtgcgtatctaatttatagttttaagtttaccttagtggttagatcgtgtgacatgcgcagcgacgggaaaacgacgccgccttttgtctgcaaaggcatttgacgctaactacctgtagagttctgaatatcctgttgcactcttgtgtgtatctggttgctttaatgctcgaaaatgaatatcctaaggttttgcattcg

SEQ ID NO: 220644 - DNA, 762 bp, Zea Mays
acaccaccaccaccggcagcaagaaaaaacattctttgtcctcttctcctccgctccccatttctcttgctagggtttctacccctccatatcctcgctccacggtcatggcgaagacgaagcagggaaataaggacgtggattcgtacaccatcggcggcaccaacaaggtcgtctatgtgggagactgcgtgctgatgcgggcgtcggactcggacaaccagccgtatgtggcgcgggtggagaagatggagggcgacgggcgtggcagcgtgcgggtgcaggtgcggtggtactaccgccccgaggagtccaagggcggccgccggcagttccacggcgccaaggagctattcctctccgaccatttcgacctgcagagcgcccacacaattgaggggaagtgtgttgtccactctttcaagaactataccaggcttgacaatgttgggcctgaggacttcttctgccgattcgagtacaaggcggccaccggttcgttcacccctgaccgcgtggcagtgtattgcaaatgtgagatgccgtacaaccccgatgacctcatggtgcagtgcgatgcttgcaagcactggttccatccatcttgtgtggctatgaccattgaacaggccaaaaagctagatcactttgtttgctcagactgtttcaaagaaaatggttcaaagagactttcaaatgcatatgccacttcaccaaattttgagcctaaggatttcatggattggttggagcactattcag

SEQ ID NO: 220645 - DNA, 1213 bp, Zea Mays
acaccaccaccaccggcagcaagaaaaaacattctttgtcctcttctcctccgctccccatttctcttgctagggtttctacccctccatatcctcgctccacggtcatggcgaagacgaagcagggaaataaggacgtggattcgtacaccatcggcggcaccaacaaggtcgtctatgtgggagactgcgtgctgatgcgggcgtcggactcggacaaccagccgtatgtggcgcgggtggagaagatggagggcgacgggcgtggcagcgtgcgggtgcaggtgcggtggtactaccgccccgaggagtccaagggcggccgccggcagttccacggcgccaaggagctattcctctccgaccatttcgacctgcagagcgcccacacaattgaggggaagtgtgttgtccactctttcaagaactataccaggcttgacaatgttgggcctgaggacttcttctgccgattcgagtacaaggcggccaccggttcgttcacccctgaccgcgtggcagtgtatgaagctcctcaacccttccattgctggctgtcccttttactgtgcatgcatttttagcttgcttgtgatgattgggttgtctattttctctcaaggtattgcaaatgtgagatgccgtacaaccccgatgacctcatggtgcagtgcgatgcttgcaagcactggccaaaaagctagatcactttgtttgctcagactgtttcaaagaaaatggttcaaagagactttcaaatgcatatgccacttcaccaaattttgagcctaaggctgaaccaaaaaggcagaggaggtaacaaactgtgagtggtaacatccatatgggtaaggggagatgtgctgcttctgtggtgaatcagcccttgccctttgctgtggtgagagcagaggtgtacagtgtactagaccagtgtttgctgttaggggaacgggttttgttcgatgtgtagaccgtgtggcatggcatgcagttgttggtagaggtcaaaagaacagtcgttgtgttcacttggtcagcttagcgccttagcccttgttaatgtgttaatgcactgtgttaactcagcgagccccccttgtggctgataatgcaagtcatgcagttgttgatacaaatgttgctgcggccatttcatcgactgtcattgttcagtggtactggagtttcggttttgccagctcagtgcagg

SEQ ID NO: 220646 - DNA, 807 bp, Zea Mays
cacacagccagtagtcagggcacctcgccgactggagctaggtgcttctgtgtgcagagggggggggggagccggcatcaagtggagctgttgcttcttctattggtgcgctgaggtggagagctggaattggacgatgctcgacaaggaggtactcttgtaactgcggcaggcagtagagaaggtctcagcctgctgctggcagtgttccgacgggtgttctgcgaggaacagcaagtctcaacaatgttccatccatcttgtgtggctatgaccattgaacaggccaaaaagctagatcactttgtttgctcagactgtttcaaagaaaatggttcaaagagactttcaaatgcatatgccacttcaccaaattttgagcctaaggctgaaccaaaaaggcagaggaggtaacaaactgtgagtggtaacatccatatgggtaaggggagatgtgctgcttctgtggtgaatcagcccttgccctttgctgtggtgagagcagaggtgtacagtgtactagaccagtgtttgctgttaggggaacgggttttgttcgatgtgtagaccgtgtggcatggcatgcagttgttggtagaggtcaaaagaacagtcgttgtgttcacttggtcagcttagcgccttagcccttgttaatgtgttaatgcactgtgttaactcagcgagccccccttgtggctgataatgcaagtcatgcagttgttgatacaaatgttgctgcggccatttcatcgactgtcattgttcagtggtactggagtttcggttttgccagctcagtgcagg

SEQ ID NO: 220647 - DNA, 1436 bp, Zea Mays
atggtgcagatcgcggctcctccccgacggcgcgatggccgcgccccctctccctcccccggcgtgatgcacgcaaccccaccccctcggtgccatggtgccctcgccttcgcccccgtcaaccacgggcgtcaatgtcgaaggcgtccacaaccgcgcccccacctgcccccgcccacgctctcccacgatctctgccgccacgtctccgcgtttggcggcccgtcctcatcctcatccgcgcttggcggcccgtcgtcatcctcaggtcagatctgcgtttggcggcccgtcctcatcctcatccgcgcgcccccgcccgcgatctccgctgccgcgtcttcaccaccctcgcccgtgatctccgtcgccgtccgcacttgggtcaggtcagatctgcgtttggtggccatccccgtcctcatcctcttccttgcgcccacgcccactcttcatcctatttccgacttgggggaggacgacaaggtcatcgtcgagcgttgtgccagggaacggagtcgcccaccggcagctcctcaccaccgacgggaagcaactcgtggagatgctcaagcggtcaccctatttcttctccacccgcgtccacctctaggtccgcgtgggcgagcaatccaacgaggcaccgttctccccatcaaggacacgtgtggtggagaagaagggctgctggccttggctttgtgggcaacacactggctgaaggtacgagggtcattttgtgatttagtagaaacataaattatatcaggcataactcttggatctagatcatctaacactccatgaaagcccagaagtatatatatatatattcaccagaaagtgaggaggaagagaaagaggaggaaggcgaataagaatagaagatgggcagtgcaaacaagattaatgagaggtacttgaaactacagaagagcaagaagagcaccaaaactaaggtttactgctcttgattatttatttgtactattacctttttgatgtgttttcctaatagttgttgaaactatcctttcacttgctttagcaaaatgtaattattgtttatatgggtgcccatgctatgattactggtgtttcttgacctttgtttattcaggaatatctgtaattggaaagttacttatctactttgttttgcttagcatttaaatggaccaaataatttagacataatccccatttaaaaaattgtattgcttgattaccatatttatgtttgcttagcatttcaagactaacatcctgatgcaattttcagttcagttgattactactaatttgttattattgtcatgaatatgcaccttgaggatgataaacgaaaggtgcgcccaacaaagcgctcttgtggatgcacggcaatctaaatctaaatctatcaaggctgcttggaaagatcttgccatcagctc

SEQ ID NO: 220648 - DNA, 1309 bp, Zea Mays
ctctagagtctagaccccactagtcagcgaacctgacagtatggacccactcttctcgatgacgcggcgtgcgtttccgcttctggaatccagttctttgctttgcccttcctccgcccccttcctccccccgcgctgcctgccgtaggtacgggaagggaaaaaagtcggcgccaaatctccgcatccattcgcacgccgcgattcttgtgcgcgatccgccgcgcgatgatgatcccgtggggcggcgtggggtgttgcctcagcgctgcggcgctgtatctcctcgggaggagcagcggaagggatgcggaggtgctgcggtcggtggcgagggctggcagcatgaaggatttagctgctatcttggacactgcaagtaaagtcctaccacttgtagttgccgtctctgggagagttggttcagacacaccacttatatgccaacaaagcggcatgagaggtgtgatcgttgaggaaacggcagaacaacacttcttgaagcacaacgatgctggatcctggattcaagattctgcagttatgctttctgttagcaaagaggttccatggtatctggatgatggaactggacgtgtatatatggttggtgctcgttctgcagctggtttaattttaactgttgccagtgaggtttttgaggagtcagggaggacacttgtacgtggaactctagattatttacaagggttgaagatgctgggagtaaaacgaactgaaagggttcttccaactggaatctcattgacagttgttggtgaggctattaaagatgatgttggaactattagaattcagcgaccgcataaaggacccttctatgtatcaccaaaaagcatcgatcaacttattatgaatcttggaaaatgggccaagttataccgccttgcttcaatgggctttgcaacatttggtgccttccttcttgcaaagcgtgcaatacaacattttctagaaagaaagcgccggcatgaactgcaaaaaagggttcttaatgcagcagcacaaaggcaagctagagaagctgaagggagcattggttcatcggacacagagcctaacagtaaaaaagaccaattagtgttggacatatgtgtcatatgccttgagcaagagtacaatgctgtttttgtgccggtctaaaagggttaaaaaactggataagcattgttttgcatcatacttcaccaagaagcccgaggaaatagtcgaactgcagatatgtgaaattcgttcataatttgtccttgctatcactgttgtcacccctgaaagtttctgtttggac

SEQ ID NO: 220649 - DNA, 1602 bp, Zea Mays
ctggaatccagttctttgctttgcccttcctccgcccccttcctccccccgcgctgcctgccgtaggtacgggaagggaaaaaagtcggcgccaaatctccgcatccattcgcacgccgcgattcttgtgcgcgatccgccgcgcgatgatgatcccgtggggcggcgtggggtgttgcctcagcgctgcggcgctgtatctcctcgggaggagcagcggaagggatgcggaggtgctgcggtcggtggcgagggctggcagcatgaaggatttagctgctatcttggacactgcaagtaaagtcctaccacttgtagttgccgtctctgggagagttggttcagacacaccacttatatgccaacaaagcggcatgagaggtgtgatcgttgaggaaacggcagaacaacacttcttgaagcacaacgatgctggatcctggattcaagattctgcagttatgctttctgttagcaaagaggttccatgtgaggtttttgaggagtcagggaggacacttgtacgtggaactctagattatttacaagggttgaagatgctgggagtaaaacgaactgaaagggttcttccaactggaatctcattgacagttgttggtgaggctattaaagatgatgttggaactattagaattcagcgaccgcataaaggacccttctatgtatcaccaaaaagcatcgatcaacttattatgaatcttggaaaatgggccaagttataccgccttgcttcaatgggctttgcaacatttggtgccttccttcttgcaaagcgtgcaatacaacattttctagaaagaaagcgccggcatgaactgcaaaaaagggttcttaatgcagcagcacaaaggcaagctagagaagctgaagggagcattggttcatcggacacagagcctaacagtaaaaaagaccaattagtgttggacatatgtgtcatatgccttgagcaagagtacaatgctgtttttgtgccgtgcggtcacatgtgttgctgtatggcatgctcttcacatttgacaaactgcccgctttgccggagaagaattgaccaagctgtcagaacattccgccattgacggtgataccacgtgcactgcttttgaaaccagttggctattggaagtgctggctcctgtcaaccaacgatatgaactgcaaaactgggtcgtagcagcttcttcatggagtttgcttttcgaacagaacagcgagtgatgcaagttgcaagctcatgattggcagttaagaaagataccctactgagatagtgccaatgggtgctcttgcatgtaatgtactactactacaactgtgtacaggacacttgtgtaaatgcacataggttagcagcttgcttcttgactaacacctaatgggcatttatgttgtgctaaccgaatgacaaaattagctcgtttagttgtgataatcgttttttctagtgagtggggaatgatacggatatctccgttcttttgtgctcacaggatcataagaaacagaaaagatttgtaacatgttctatattttactgctcattttgtaacctgaatgtgaggacaacatgttggcgcatta

SEQ ID NO: 220650 - DNA, 898 bp, Zea Mays
atgcccccaaccctagccgccactaccctgctccctctcccaagccgccgccactccttctccctccccctttctctctcttctctctctaccgccccaggccccccgatctcctcctcccactccgatcgcccgaccgatcgccgagcttccctgttccctccccgcccccgcgacgccatggagccgccgcacgccgagcaggccgtcgccgtcgcacgctgagcaggccgtcgccgctgtagcagcaggaggagagggtggcactgcaagcccgggcaccggcctcgaaggtgctgtctgcttaacgttttttgtttcgttcagatctatggccggacgaggcggactgtggctactacctccgcacgacgctgcgacgggcgctcctcagatcggcagagacctctttcgaacgcaagtagccgggagattcggaatcccgcgcgcgagttgggcctggccagcagataatcgaattgctttgccgtggaaacaggagaaggctgcaattgagtatattcattctttatcaagggcacagcctgctcgttctctcaatggtgctggcctttgtcctgctagtagatcacttagcacccaggccgccactacgtcaagcacaccacagttgaaagcacaccccacgtcaagcagccaggccgccactacgttaagcaaaacagaagacgagaagaactgatgtagccatgttcatgcttccactgttgaaatgcatattcagcatagcttacttagttcctatctgctgtttcaacgttgatttaaaagaagagctggtagttgtgagctatctgtaaatgatctagttgtgaatgatattataattgtgatgcttttgtgaatatataattgtggtgcttttgtgtttatgtga

SEQ ID NO: 220651 - DNA, 1445 bp, Zea Mays
gtagagttcatataggatgatggcgggaggaagttatccaatttcaattgtgaaagaggaaacctgggaagcagtaattgctgactcgttgctttatgcgaagggtttattgctggcagttactttggttattgattggtggctggcctttgcctactttctgggatttcttgttatatatgctgtagctcaacagccaccttatgatggcctaggccattcaaatcacttgaccccattgcaacttgaaagtttgctaactgaagagccaacatcacgattttggctggtatttctgtacatgtttttaatggaattctaatattgttatctcccaaatttccagtacattcctgcccgctttactattttgtcaagacttgtagcctgtaggtgcctacaattgttacaaatgtgtcactctcatcttatagaaggattagaggagcctgagaagaatttcatatggtttgatgggctgatggaaaccagttaaattccttgcccaactgcgcaacttgatttagagacacagttgctatataactttagtgcctatcattaaaaatatagtttgtctacttcgatagcaacggtatcaaaatctgactaccttatgaagtttggagtcttctcatttcttttggttagtgagggaacttgtagggggttcttttttaagaattgccccaaaagtttcttgcccataaagttaggtgtatgtttcaatttccctggttctttgatgactggatatttttatttcaatgcaaacaggtagaattccgaacttcattttcagcaaaatgtgtacaagcaagcagcattctgcctgaactttctatcgtgtactccaacaagaacatctcttttggaacaattgaccttgggcatttcccaaatgctgcagcaaagtttgggatatccatgtgggatcatctccccacttacatattgtttgacaaggtgactgaagtttctcggtttccagaaatcacaagtgaatcaaaagtatttgtgccaaaagttactaagaaacttctttgccagcattttgatctcgacagacgattgattggatacctatccacctgatctgacaccgatcccatatgcctcaaaggatggggacatctcccttttttgtcgctgaaccggacatctgtgtgtcagcagcaatcacttcaggggggtatcgtgagccttgtattattcggcgaactgcttattcccttttaattaaggcccagtaaactttgtggcggaaaaacacacacacacacacacaaccaatttctgtctaatctgtctgatactgaattatagaatttcactaccatgcagaggtttctgtaatgatttgccgactatgttttgtcacattgtgactgcagcagcagtcaattcagacagcatccacttccactgagccaggggtgtcccgg

SEQ ID NO: 220652 - DNA, 5192 bp, Zea Mays
aagggcattctggtggtggtggcttatggatagcatgatttttcaaaagcacatgatcaaccaaagttctctgcttcaaaatactaggtgtattataattttagaagcaactttatagattttgacgaatgattactcaaattatatgtatgcttagggttagtttggaaacttaaatctcctccgggattcccggagattgagtgggaaattagctcatcccccccccccccccccccccccaagtccccgggaatcccggaggggattaaagtttccaaactagcccttagtaaataaaagttgcatcaatagattcacatttgaacaaacagattttgaagcaattgatgacataatgtaagagtaatccaaaatcaacatcgaagtatgcttctaaatattttcccccaaatcctaacacaccttgtaaacagaaatagataagtgtagacacctgtatttcaagtttcaacatttagggtaccatatagtgcagcagtgcatgtaaatgtaggtgagaaaatagaataaaaactaaatcagtacaagaggggagatcctaaaactgtatgattaatatttgttgggattttcctctcctaagtttgaaaaactgtgcactaaaaagtaaaatccctatatataatgcatgtttccattccccaccaacatgtagccaactttatcagtatgacactaacaaaaggtgtgctttatcatgggagaggataagtggataaccaatctattggatatgagcattgtgtaactctatcacatgggaaaagaagaacatgatctgatagaaggcacatcaacaaacaccattgaacaaaatatgaagtatcctggtttaaaactgatactagcagaatctactaataaactaccacatctgttacaaattgtaagtcgttctggcttttataggtacatagattttgctacacacctacatatgcagtatgtcaagatacatagtaaaatctatgtatctaaaaaagataaaacaacttacaatttggaccagagggagtagattaataccccttgacgttattgttctaggttcgcagacaactacatttattttaacccatgaggcatgatccaattttcacatgctaccttcaacactagagagctagaagctatcaaaagtgccacaaactcagcaaaaaattccaccaatcagcgttgaactcaatcacgtcaatagccatactctagcttcatcattaaaatcaccaaaagtaaatcagaccttatcgattcacaaatttgcaaacccgaccaaggggtgagagtaccggtattatgtcccaacatggctaataaacccaaactgcaaacatgccggcactcgaactcatgacctctaaagttcctcatagtaacttgcttgtcaaagataaaaatccaacatattaaatggttaaaatgtattttcaattaggaaacttaatctgttggtccctgtttagacaatgttggtaatgtaggcatcaaaatcatcttgtaccctactgtactatgttctctgaatctctggagttatgttgggggtaagaagtccatagaccgatgatataaaattcttggaaatctgcatgcttatgttcaaaggggaactctctggcagcatcagatgagtgtttaagaaacattaccaattccacacgcacagatgccataaccagcctctaagcgtactgtactatactaatctaattacaaaacgaaacataaaactgtatgaatctaatgcagcagattattatacaataatccacacatcctaccatacccattgcatcgacttagctgggggcgaggcaacatacccgaaaacggtgacccactcctcctcgtcgacccgtccagcagccggagccgaatctctgggcatctccggccgcgccacctccctggggggcggcagcgtgatcagcgctaccttctgctgctgtgactgctgacccgacggcgtcgtcggggactgctgctggtactgcacgacgccatccatcggtgatccctccctgggattctcctccctcgagggggtccaccatgccgagggccccggcgagccgttggaccgcagcggcgaggagaagagaacggctccacgcgggggctgaggcgagggggtcgtcgtcgcctgcggaggcgtggccggctgcctggagggggagaggtgggagaggtcgtcgagggagagcagcggcggaggcggcggcggggtggaggcctgcgcctctcgccgcatcgaggccggtgggaggcgaaacgacgaggagatcggggacgagaggtcccgcaggaacggcgggtggcggcgacggtgatccggcctggaggcactcatgacggtggcggagagctgaaaccctagcaagagaaagcggagttccactgccgagtgcgccttgggtttttggaagcctcacgtgtgtgaatgtgaagaggcaaacagaacgcttgtgtcaccaacatgtggaccctagaactttacaggtcccacatgtcggagtgctggcgttttgattctcggctctactcgaaggcgatgaagaaattaagaatacgccaggctccttgtcgctcgtaaaatggaggtcgcgacggcgacggaggcgtctgcgccggcggcaagcggcggcgcggcggggcagggccacccgttcccgtggctagacgctgccatctctgagccctactacttcctgcatctcctcgccttcttctcttactttgcggcccgcagcgcggcgctctccgccgacgacggaggggagctccacgaccgcctcctccgtagggagatccaggcagtgctcgtgttcctggtgctcttcgtagtgaagattgtgaaagaggaaacctgggaagcagtaattgctgactcgttgctttatgcgaagggtttattgctggcagttactttggttattgattggtggctggcctttgcctactttctgggatttcttgttatatatgctgtagctcaacagccaccttatgatggcctaggtatgtatgctcatattgggtatagaatattataagtgcatgtcttatattaatagaatgtttatatgtaactctttgacagctgagaactgtattcttaagtgttggatactatgcttttaataaatattttgtatgattgtatctttggttgcacccttgggttgctcgttcttaatgtgtttttagctaaatttttttacccacacatcccatgagacactaaagcacatgtacctttcgcaaacgaaaaaagcatctgtaacttactagttaatggctttgtgatgggttataccagtataagaagttttacatttggtaaagtaagcggttgcacatcaatcattaggtaatcactgcatgtggcatttttattatcagttttctcagcgtctcttgtacaaatcatggactgcttatatgattgagtgcttgcattggggccttggtggtaagtggttctttactgaatggaacactgtccactgtcctttattaagggtgaagcggactttggttggtatcatctatcttatctgttactttgagtgcagttgatgaggcatatctgttcacaaatagatctaccagtttttaatgtgatattcctagactggattgtcccgaaataaattgatttaactgggattaccaacaatattattgcaaatgttggtactttactactttggataaactgtttgtgctcctgtatacactaaaagctaaaatgcaacagcatcagatattgacacactgccagtacagatgtgaaaagcatatctatttgttagacaaactgtttgtcattttcttacctagtccagaaagatttgtatccatcctttgttttctacccagattcaaacattgcttttgtttctctcagttgcactgatattttacttttcacgcaggccattcaaatcacttgaccccattgcaacttgaaagtttgctaactgaagagccaacatcacgattttggctggtatttctgtacatgtttttaatggaattctaatattgttatctcccaaatttccagtacattcctgcccgctttactattttgtcaagacttgtagcctgtaggtgcctacaattgttacaaatgtgtcactctcatcttatagaaggattagaggagcctgagaagaatttcatatggtttgatgggctgatggaaaccagttaaattccttgcccaactgcgcaacttgatttagagacacagttgctatataactttagtgcctatcattaaaaatatagtttgtctacttcgatagcaacggtatcaaaatctgactaccttatgaagtttggagtcttctcatttcttttggttagtgagggaacttgtagggggttcttttttaagaattgccccaaaagtttcttgcccataaagttaggtgtatgtttcaatttccctggttctttgatgactggatatttttatttcaatgcaaacaggtagaattccgaacttcattttcagcaaaatgtgtacaagcaagcagcattctgcctgaactttctatcgtgtactccaacaagaacatctcttttggaacaattgaccttgggcatttcccaaatgctgcagcaaagtttgggatatccatgtgggatcatctccccacttacatattgtttgacaaggtgactgaagtttctcggtttccagaaatcacaagtgaatcaaaagtatttgtgccaaaagttactaagaaacttctttgccagcattttgatctcgacagacgattgattggatacctatccacctgatctgacaccgatcccatatgcctcaaaggatggggacatctcccttttttgtcgctgaaccggacatctgtgtgtcagcagcaatcacttcaggggggtatcgtgagccttgtattattcggcgaactgcttattcccttttaattaaggcccagtaaactttgtggcggaaaaacacacacacacacacacaaccaatttctgtctaatctgtctgatactgaattatagaatttcactaccatgcagaggtttctgtaatgatttgccgactatgttttgtcacattgtgactgcagcagcagtcaattcagacagcatccacttccactgagccaggggtgtcccgg

SEQ ID NO: 220653 - DNA, 2945 bp, Zea Mays
ccaaccggtcagaccagcggaccggcgtctgcgtcgctagcagctgcggactgcggctgcggttgatgggccagtcggcccaaccacgcgtaccccttcgccttcctcagcgcgtcctcgtccggcttcctccgctcgatgcagcagcagcgactgcaggcggcgctcgacagaaaacaacacggctgcgaccggatctcaccggaaaagttgaggagtggagggtcttagctgccggagttgggtaatacctccctatatcccctattggtaggtccgccgctgctccaacctccaggtccaggcaccaggtcgctcctcccttctcttcccgtcgggttcttgtccatcgtagatagcctctccttcgccgaggtcaccagttcctcctcgtgtccttctcgctagtcgctacagtcctcctactctgcttggctcgagtggaatggggatccatcctgacctgagtggtttcttctttgcttggtagtcgcgcatatttggtagccgcgtccgcgtgacgtcgtcggtgcttgggtccattcagacattgttcttatttgatcagtacccctatttagcgcctgcaagatcgagatcgatcttacttgactccataagatgtattggggatttggagtgccttgtactccaacttaagactgggagtgaacccgcataccccaagcccgcccttccaccgaactgaactagacatcctcaagcgtcatcaattctaatggatgatgcagcagaaaatattcttgcatcacttggccgtgtgcatctcgttgatctaatggcctctgagggccttccttctgacagctataagatgtgtgtgtcgactctgatgcagtcactcgctcaatattcggcagccatcattcagctgtcaccagctgatggtgccttgttgaggtcaggtttggactcggctcgctttttcttccaccagcgagggtataattcaaatgaggctgtacactcggatgattcccgtgaatggtgcaagacctctggttactatgttgattctcagatgtgtctggaaatgtatgattacaggcctggtattactgcaactgatcccagcggtgaaatggaattacctccatcaggtttgcctgacatattttcggtgctgggtaaagtttctcgagatatattggacgcaatcagtttctcattgaatttacgtagctgtgcatttactgagatactcgacaacatacccttgagaagccaggaagtatcatcttctgttctttcagcatgttgtcattcaaggccatcgcttgaaggaggacatcagcatagcattgcttctcaagataatggtcacttgctcatgttttctgagcaggagcaacagattgataagactttgcttaccctagttaagtcagatatgtcaggtctatatattaaagacttacatggacactggattcttgttgatggagatattggtccacatgatgttattgtctattctggccttgcactttatcaggaaactgctggctatgtaaatccagctgtacataaaacagaggttggaatacatggatgtatgtttgggcgatgctctttgatgttcaagttcatgcctagatcagttgcaaggctgagtggttcagagatgagagctgctggccatggtgttgatgcccagtttcaggttcccatacaagttaatgatttcatgcagacagatcgtttttctgatcaactgtttcctaagactgaaccatcattacacacagaacaagattcagcatcattcaactccgtgatgaataaaaagaagggaaatacaagaacaaagccgctccctccttctaaaagacttcgccaagaagcacagagggtcctgaaggagcgtgttcaggacattgcagataagaaaggcgtcaagctgagattttgcaatctcaaggaatgtgaaagccacatcctgtcattggatagtccatgtgagaacacgagaactgaaattggatggccacaaggggttccgtttgtccatccacatgacctcccaaacaaggcaaagcttgggtttttggaagcttacgaacctggatggacggcctcccaacaagaaatggagttaagttctattgaaacatgatgagtgcattctcattttatctttctaattggcaaaggttggacaactgcttgcgacattgtgaacctcatcctgatcattccagcctgttctcaaaccaaattgttctaccagtccattgcaccctagcaaagtctgaaatttgtgttgattcagccttgtgctctgccctggagtatcagtcactccaaaaaaaaactgacttggatggcacctagccttctaaatgacattcgtaaaagtgtgctgacccaagattgtctaattcaaggagccagcctcagtaaattttgatgtattaccaaccttggatatgttttgaatttcggggctggtcatcaattcattccttcaacatgttgcagaagcagtaatgtatactgacgccaaataatttgtatacatagatgtagtatttgagaacgtgtaaatgcgactacccgctgcttagattgaaagttagattatataatctgggtagattataatcctaaacaaacaggcctttaatccataatgcattatacggaaatgtttgtaatatacttcgcaagttcgcatcaacaatgacaatgctgatgtggagatgtttagaaggagatggagaaaacacaattaaaagtcaagcaataagagcaacaagaaaagacacaagatcactctctcatgttactaatcattaataatcactagtcacaattatgacacttgaagagatttgaaagcttatgtcttatgaagtgcttgctcttgtattgaatgagaggcttggatcctatgaatggaggtggtttgagttgtatttata

SEQ ID NO: 220654 - DNA, 965 bp, Zea Mays
cgcacaccaaccctggcagggaaaacgcaacgcgccaacgcccgtccggtagcggctgccagatgcgcccccagctatctgccgcattagttagccggtccccatcccgcaccacccccaaaaagaaaagcgaagctcactcccctcgcctcctctgcactccacaccgacacgcgaccggcacggcctttaactacaccttcctaccacacaccacgggctactagctcaccccacacccccagcgcagcagccctgcctagccgcgcgagctagaggcccgaccagaccgaccgacggtcgctcgctcgctcgcaaatccgcaatggcgtccatcatcgtgcaggcggtggtgatcctcctggacgtgatcgccttcggcctgggcgtcgccgccgagcagcgccggagccgggccaccgtcaccccggacgccgccaaggagtacgactactgcgtctacgactccgacatcgccacgggggtggcattcctcatcgcggaggcgtgcctgctggcaggatcagtgcgcaacgcgtaccacacccggtacaggggcatattctacggcgactcgctctcatgtgagacggtgcggaagggcgtgttcgcggctggtgcggccttcaccttcttcacggccatcctgggcgaggtgtactacctcagctactccaagtcccgggacgccgccggtggtgccccctacggcggctccagcattggcatgggcccttacaactaactaaaggccggccccggtcgcttcatgctggaggaatgcagcagtgttctttttgacgttaccttagtagggacacggtgtaattggttattggatccgctgctttttgtttaggttcttgtatgaagttactacttggttgggctgtatactgtttggaatgttgggttggacgctggacatggatatacacgtatcgtagtatgctatgttttcgctc

SEQ ID NO: 220655 - DNA, 2095 bp, Zea Mays
gcgtgcccccctccctccctcagtccctctctctcgctctcggcgacgactgggcgaccgccgccgccgctgcgccgcccttgtccaggtgcccaggtcttcgcaggcgccttcgccaggtcttcgacggtaacgagcaccaaccggattcagggaatataagtaaaatgaggccagttttttgtgggaaccttgactatgatgttcgcatctcagaggttgagcgcctttttgggaagtatggaagggtggaacgagtggatctaaagacagagattgtcaatcttcacccatgcctggtgcaaagaagctgcaaaaggatcaagttgttacttcatccgttgtgaagccagaggagtttcaggaaaatcagattatgtttatgttttactgttataagtcattggacaagtgtatatcaggataaattagaagaaaaaagttctttcttcaaatttaggtccagtactcaattatttctttgccgcagggatatcatggagcatatgtgctcttcctggttgatggactggctctacctttactgcctctgcctgtgccccatctcatgccttgtccatctccaggagttcacaagtccaccgtggcatctgttcacatggaaacgaccacctcgtgactgatgtcttacttttacgatcaacattgcatcctcctcccccgcctcatcaccatttcctcgccaatccaaccatgccaatctcatggccggctggagagtggagagaagtggaggttgcaccaccaattctttgatgtgccacgaatgtttggattgttgtactctactactctgacatcatttagttcaacataaacaaggtctgttcctgtttattatagtgtatcagactgtagatttgtgaggtgatcttagaaaagtttaaaggagagactgcatcatggtttatcttgttgccttttctgtttatgttattggaccatactgtaatttctttgaacaagtcacttattctaccttgttcaacatgaagggtttgcatttgtctacatggaagatgaacgcgatgctgaagatgctatcagtagacttgatggaattgattttggcagaaaaggaaggaggatcagggttgagtggacaaaggaggatcgcactgttggccgaaaaagcagctcaaggaggtctccaaccaatacaaaaccgaccaaaaccttgtttgtgatcaactttgacccgatcaacacaagaatccgagatctggagaggcacttcgataaatatggcagggtcgcaaatgtaagaatcaaaaagaactttgcctttatccagtttgagatacaggaggatgctacaagagcattggagggtactaatggaagccatttcatggacagggtgatctctgttgagtatgcacttcgtgatgacgatgaaaaaggtgaaagagggaacgggtacagcccagacaggagaggtcgtgaaagatccccaggtagaaggcgttctcctagtccctacggtagaggacgggagagaggtagcccagattacgggagaagcaaggagagggggagcccagactatggcaggggaggacgcagccctgataatggcaggggagtaagcccagctggtggtggcagaggcgatcatgccaggggtggagggcgcagtcctgactatgatcgccagcgccgggaagctagtcctccaggttatgacaggtcccccagccgctcacctgggagggaggcgagagagtagaagcagcgttccattccatgcctgtgttcaagcatcagatgaatgtgcaagttggtaatgttagccagcaggaaacttgtctactatgcgcgttagctcgtgtttgactttccacccatttcagtatgaagcgacctcagaatgtaactcatgtagtagtattttttcaatggtagctttcagcactggtttgaacctgttgttggctttattttctgagtaaaatgcaccactcgaactttacgcattgtgtcacttgggtactgaactcagaaaaccagttaaacggatcatgaaactttgttggcccatgtaaaaccattcaaagtcagttctataaaccgg

SEQ ID NO: 220656 - DNA, 4866 bp, Zea Mays
ggctgtccccacttcccagcaacgcaacccagccatggcgacaccgccgccgcgaccgggaccggccgccgcatccgcggcggtctccctcctcgaccacctcgagcacgcgaatttcgctccaccccctccccctccgccgccgccctcccccaccaccgtcctcaccgcgtggtcgcgcctccgcgaccctaactccacctcccccgctgacgcactcgccgcgctagagacgctccaccaccaccgtcgcgcgctccgcctctcgtccgcgcacgcctcgctcctgctcccactgctcccgctacacccccgcctcgtggccacgctgctcgccgctgccccgcacctcggccccgcctccgtcccggcctccctccccttcgcccctcgcctcctcctcctcggcgcccgcgcctccgccaaggatctcccgggccgtgccagcttcggggaacccgcttccaccgcgaagaatcccgccggcagcggtgagcctgccgatggccaggacgacgaccctgttgtagctgtgggccgcattcttgaagatgtggagcggggcggtcagagcatcgatgatgtcgaccacctcgcccttgcaggggttggttacgcgctggcgtctgctgacgaggtgcagttcagaaggatcattgtgcccttgcttaggatctgtggcaggactgggaatctgtctgtcggtgttcgggtgcttaagctgatggaatggctggtaatgggattcatcgagtccaggaagatgaggaatgctcaggtgctctttgagatgacttcaccggaggagtgtgagggcgagaactattgtgtgctgttaccagcggtgatgttggcctgcggtgggttgcgggcactgagggttgcttcggctaggtaccggttggactttgatccacggctgaagcaggcgcctgagcggacaattcagtttgcagctgagcgggctgttttagaagggaggccggccgatgaccagcatatccttgttcagtgtgtcgcattggggctgtcacggtgtgggcaggtcgcgtttcacgaatcggtgttacggtgtgtctgtatgggattgctaaaggagctcctcccacttcctgattttcttaggaggtcggtccaaaacgcaggagggaactcaaatgaggttatcaaggctcaggtcaataaacaccttgatagtgttcttttcaaagaggcaggcccagtgactggggttctttgcaaccagtattcatatgccaatgacaaggctaaaagctttgtcgaaacttgtgtatgggagtacgcacaggagatttatcgtcatcttcgtgcagcagtgttgctgcaccgggggaagcaggatggcttgattacggcgattgacaagaatgctgaggcctcatttcttatggttgtagtctttgcagccgaggtcgctaaacacaggctaaatgctaagtcctccgaggggttccaacctgaggttgctgctagaatcttggtggcgttctcttgtgtggaacatcttaggcgactgcgtctccctgagtacactgaggcagtccggagtgctgtgcttgccaatcaagagaatgtagcagctactgctttgttcatcgagtcaataccttcatatactgaactgacaagtgaaccagatttactggccttggatagaccaacaacatataactggtacagagatgaggttcagacatcacgcatgctgttttacttgcgggttgtgccaacttgtgttagcctcattccagttcatacgatgcaggataaactggcctcaatcatgttcttatatctacaacatccaaatgagaaagttacaagtgcttcacactctgtgatggtatcgttcctgtcatctggcagtgatgctgatcaggatgatcgagcagctttgaaagagcgacttgccttttactacatcaagagatctttggaggcttatcctgggttaacaccgtttgacggattagcatcaggagttgcagcacttgtacggcatcttcccgcaggcagtgctgccattcttttttgtatccatagccttgctgtcaaggctaaagatctttgtgagactgcaaatgttcagaacaaatccttgtggaggtcatgggaagagagcacagatccatgtaagaaaacattggatctgttgctgagactaatcttccttgtggatattcagtcattcccttacctgttgaaggagctggcacagttggtgaccctgctaccaaaggaaggccaggatgcggtccttgatgacatgcacacccatgtcgcggagtctgacgatgtcactcggaagccggtactcgtgtcgtggctgcagtccctctcctacctaagctcacagtcgagccgtgaatctcacagcaaggccaagagtgctactgcatccgtagcaagcgatgagctgctggacagagccgtggcacgcttgtgataccatcttgtcggtaaattggatggatgcgtgttgcaaattcagggaatataagtaaaatgaggccagttttttgtgggaaccttgactatgatgttcgcatctcagaggttgagcgcctttttgggaagtatggaagggtggaacgagtggatctaaagacaggttagtctgttactctgttcattgttatgtcctcgaatttatttatgatctataatagcaaaacaatcgttgctcctgcagctatatgctgtttttggtcaaaggcagtgctctattttattaagtgaattacatccagtgtcagcaactgcagctttgaatcattctctctccaatttagatactgaagcattactgaatgtatatatccatccataagacaatgctgctggatttgcatttaaaaaaaatcaattatctagccatccaaaaacagagcaatgcctttgtttaaattttgtttttatcaattgatctgcaatatttgttcaatcacaaatacacgattttcacatgactcctctaagaatgtgatctttgtacggaaactactatcaccatgatgtggcagagattgtcaatcttcacccatgcctggtgcaaagaagctgcaaaaggatcaagttgttacttcatccgttgtgaagccagaggagtttcaggaaaatcagattatgtttatgttttactgttataagtcattggacaagtgtatatcaggataaattagaagaaaaaagttctttcttcaaatttaggtccagtactcaattatttctttgccgcagggatatcatggagcatatgtgctcttcctggttgatggactggctctacctttactgcctctgcctgtgccccatctcatgccttgtccatctccaggagttcacaagtccaccgtggcatctgttcacatggaaacgaccacctcgtgactgatgtcttacttttacgatcaacattgcatcctcctcccccgcctcatcaccatttcctcgccaatccaaccatgccaatctcatggccggctggagagtggagagaagtggaggttgcaccaccaattctttgatgtgccacgaatgtttggattgttgtactctactactctgacatcatttagttcaacataaacaaggtctgttcctgtttattatagtgtatcagactgtagatttgtgaggtgatcttagaaaagtttaaaggagagactgcatcatggtttatcttgttgccttttctgtttatgttattggaccatactgtaatttctttgaacaagtcacttattctaccttgttcaacatgaagggtttgcatttgtctacatggaagatgaacgcgatgctgaagatgctatcagtagacttgatggaattgattttggcagaaaaggaaggaggatcagggttgagtggacaaaggaggatcgcactgttggccgaaaaagcagctcaaggaggtctccaaccaatacaaaaccgaccaaaaccttgtttgtgatcaactttgacccgatcaacacaagaatccgagatctggagaggcacttcgataaatatggcagggtcgcaaatgtaagaatcaaaaagaactttgcctttatccagtttgagatacaggaggatgctacaagagcattggagggtactaatggaagccatttcatggacagggtgatctctgttgagtatgcacttcgtgatgacgatgaaaaaggtgaaagagggaacgggtacagcccagacaggagaggtcgtgaaagatccccaggtagaaggcgttctcctagtccctacggtagaggacgggagagaggtagcccagattacgggagaagcaaggagagggggagcccagactatggcaggggaggacgcagccctgataatggcaggggagtaagcccagctggtggtggcagaggcgatcatgccaggggtggagggcgcagtcctgactatgatcgccagcgccgggaagctagtcctccaggttatgacaggtcccccagccgctcacctgggagggaggcgagagagtagaagcagcgttccattccatgcctgtgttcaagcatcagatgaatgtgcaagttggtaatgttagccagcaggaaacttgtctactatgcgcgttagctcgtgtttgactttccacccatttcagtatgaagcgacctcagaatgtaactcatgtagtagtattttttcaatggtagctttcagcactggtttgaacctgttgttggctttattttctgagtaaaatgcaccactcgaactttacgcattgtgtcacttgggtactgaactcagaaaaccagttaaacggatcatgaaactttgttggcccatgtaaaaccattcaaagtcagttctataaaccgg

SEQ ID NO: 220657 - DNA, 2815 bp, Zea Mays
cttctccacccaacagcccgatggcgcacaaacctaccactcgttgagcacatgttaaatgacagattactgaattttgttgacattgatttgcatgatgtgaaggatgctcataagcgctttgacaaggctagcctctcatatgaccagattcgtgaaaagtacctatcattgaagaaaggtacccgaccggacataacaacagcaattgaagatgagcttcacagtgctagatcttcatttgagcaagctcgtttcaacctggtcacttcactttcccatgtcgaggcaaagaagagatttgaatttttggaggctgttagtgcgacaatggattcacatcttcgttattttaaacaaggatatgaactattgcatcaaatggagccatatattaatcagattcttgcttatgcacagcaatcacgagaaagagcaaacaaggaacaagcttctctcgtagagaggatgcatgagtacaaaaggcagatagaccgggaaagtcggtcttctataaatggtttgaatgattcttataatggtgatcgaatgcagacaattggcagaagttcacataaacagatcgaggcagttatgcagtcaacttcaaaaggcaaggtagagaccatccgtcaaggttatctttcgaaaagatcttcaaacttgagagccgactggaaaagaaggttcttcgtacttgatagtcgaggaatgctgtactactatcgaaaacaaattactcggccacctgctggttgttccatgcaaagaaacgttaacccccctgaacatggttctgggttgttgagcagattgttctcttctcattaccatatacatgatgaaaagtctgtcgcacgtcatactgtaaatttgttgacatcgaccattaaagttgatgctgagcaatcagatttgaggttctgtttcagaattatttcacccacaaagatctacacattgcaggcagagagtgcagtagatcagatggactggattgaaaagataactggtgttattgcctctttactgagctcacaatcgccagaacagtgttttatgtcaagccctaagggcagtggtcatgataggagtaccagtgatggaagctcctttacaagttcagtggaatttgaaccttccgtaatcgatgatttagtactggagaagtactctggaaatgggcagcatgatgtaataagaggcacacatcatcacagaaccagcatgaaacctgaaaaaccaattgacttgcttaggaaagttgatggcaataatatgtgtgctgactgtggtgctttggaacctgattgggcatcattaaaccttggcgcacttctatgcatagagtgttctggggtgcaccgaaatcttggagtgcatatatcaaaggttagatctctgacacttgatgtcagagtttgggagccatcagtaatcaatctctttcagtcattaggcaacatgtttgtcaacaatatttgggaagacatgttgccagatgataattcaagtgctgatggatcagacacatcacagtacctctctgttagcaagcctaaacacaaagatgtattctctgccaaggagaagtttattcatgccaagtatgtagacaaagagtttatacggaagcgtagcatggatgagaatcaattagctgagcagatgtggaatagtgtagctgcaaatgacaagaaaacagcatacagtctcattgtgagatcacgtgccaatgtaaatttagtttacggagagatgccttctagcccatttttgactcttggaaaggcacttcagcaagagcaaccggtttcaccgcctgatggaagtcctaaatttttcgattgcaattcacatgacaagatttctcctcgggagcccctttcccctgctagcacgagttcacgcacagatgacatggaggacggttgcgaaggtctttccttgctccatcttgcatgccgtgttgcagacgttgggatggttgaattacttttgcagtatggtgctagtgtaaatatgaatgattctaggggtcggacaccccttcatcactgcattttgaaaggaagacatcggcatgcaaagcttctcctctccagaggggctgattcacaagccatggatcgagatggtaggacagcattgcagtatgcaatcgatggtggaacaagcgacgaagacattcttgcattgttagaggatcatagtagatgatcttgcaaccacaccttcagtaaattgaggttctcttggtgtggtcaactcaactaagaccttgttcggttagctctcaatccatgtggattgagtgtgattgggtgggttcaaatcccaaacaagtcaaagttcttctaatttttttccaatcctatccaatccatgtataatgggaataaccgaacaagacctaacagggatccagccccgctcggtcctagcttgtcgtgcagacaatccgaattcatggcatgaaagcaacctatgtacatgtcgttctagggcttcagtatcatgatgcgcatgttgtttctttccccgccgtttgcttgtttagcatcagtggtccttatttagtcatctggcaaacggtttggttttgtttgctgcaggtgatgcatagtaagcttgtaaatggagttgcttctcttaattttctagtcatcttttatcatgaagtagatgtggcattctaatgaaagatggttgtacatattgagatgtgctgttgtggcatatatgaaatattggcatggtgtggatggtatatacgaaagttgtgcttgcttaatcagaatatattgcattgttg

SEQ ID NO: 220658 - DNA, 3052 bp, Zea Mays
tgaattctacttaccaattaaaagaatgagatacaatcacttgaggagagtgctgaattgctgagagagagatgtttgaagttccataaaggttgccgtaagtatactgaaggactaggggaagcatacgatggagatattgcatttgccagctcacttgaaacatttggaggaggccacaatgatccaatgagtgtcgcttttggtgggcctgtaatgaccaaatttacaattgccttaagagaaattggaacatacaaggaagtcctgcgctcccaggttgagcacatgttaaatgacagattactgaattttgttgacattgatttgcatgatgtgaaggatgctcataagcgctttgacaaggctagcctctcatatgaccagattcgtgaaaagtacctatcattgaagaaaggtacccgaccggacataacaacagcaattgaagatgagcttcacagtgctagatcttcatttgagcaagctcgtttcaacctggtcacttcactttcccatgtcgaggcaaagaagagatttgaatttttggaggctgttagtgcgacaatggattcacatcttcgttattttaaacaaggatatgaactattgcatcaaatggagccatatattaatcagattcttgcttatgcacagcaatcacgagaaagagcaaacaaggaacaagcttctctcgtagagaggatgcatgagtacaaaaggcagatagaccgggaaagtcggtcttctataaatggtttgaatgattcttataatggtgatcgaatgcagacaattggcagaagttcacataaacagatcgaggcagttatgcagtcaacttcaaaaggcaaggtagagaccatccgtcaaggttatctttcgaaaagatcttcaaacttgagagccgactggaaaagaaggttcttcgtacttgatagtcgaggaatgctgtactactatcgaaaacaaattactcggccacctgctggttgttccatgcaaagaaacgttaacccccctgaacatggttctgggttgttgagcagattgttctcttctcattaccatatacatgatgaaaagtctgtcgcacgtcatactgtaaatttgttgacatcgaccattaaagttgatgctgagcaatcagatttgaggttctgtttcagaattatttcacccacaaagatctacacattgcaggcagagagtgcagtagatcagatggactggattgaaaagataactggtgttattgcctctttactgagctcacaatcgccagaacagtgttttatgtcaagccctaagggcagtggtcatgataggagtaccagtgatggaagctcctttacaagttcagtggaatttgaaccttccgtaatcgatgatttagtactggagaagtactctggaaatgggcagcatgatgtaataagaggcacacatcatcacagaaccagcatgaaacctgaaaaaccaattgacttgcttaggaaagttgatggcaataatatgtgtgctgactgtggtgctttggaacctgattgggcatcattaaaccttggcgcacttctatgcatagagtgttctggggtgcaccgaaatcttggagtgcatatatcaaaggttagatctctgacacttgatgtcagagtttgggagccatcagtaatcaatctctttcagtcattaggcaacatgtttgtcaacaatatttgggaagacatgttgccagatgataattcaagtgctgatggatcagacacatcacagtacctctctgttagcaagcctaaacacaaagatgtattctctgccaaggagaagtttattcatgccaagtatgtagacaaagagtttatacggaagcgtagcatggatgagaatcaattagctgagcagatgtggaatagtgtagctgcaaatgacaagaaaacagcatacagtctcattgtgagatcacgtgccaatgtaaatttagtttacggagagatgccttctagcccatttttgactcttggaaaggcacttcagcaagagcaaccggtttcaccgcctgatggaagtcctaaatttttcgattgcaattcacatgacaagatttctcctcgggagcccctttcccctgctagcacgagttcacgcacagatgacatggaggacggttgcgaaggtctttccttgctccatcttgcatgccgtgttgcagacgttgggatggttgaattacttttgcagtatggtgctagtgtaaatatgaatgattctaggggtcggacaccccttcatcactgcattttgaaaggaagacatcggcatgcaaagcttctcctctccagaggggctgattcacaagccatggatcgagatggtaggacagcattgcagtatgcaatcgatggtggaacaagcgacgaagacattcttgcattgttagaggatcatagtagatgatcttgcaaccacaccttcagtaaattgaggttctcttggtgtggtcaactcaactaagaccttgttcggttagctctcaatccatgtggattgagtgtgattgggtgggttcaaatcccaaacaagtcaaagttcttctaatttttttccaatcctatccaatccatgtataatgggaataaccgaacaagacctaacagggatccagccccgctcggtcctagcttgtcgtgcagacaatccgaattcatggcatgaaagcaacctatgtacatgtcgttctagggcttcagtatcatgatgcgcatgttgtttctttccccgccgtttgcttgtttagcatcagtggtccttatttagtcatctggcaaacggtttggttttgtttgctgcaggtgatgcatagtaagcttgtaaatggagttgcttctcttaattttctagtcatcttttatcatgaagtagatgtggcattctaatgaaagatggttgtacatattgagatgtgctgttgtggcatatatgaaatattggcatggtgtggatggtatatacgaaagttgtgcttgcttaatcagaatatattgcattgttg

SEQ ID NO: 220659 - DNA, 3986 bp, Zea Mays
aaaatagcaaatttctcgcccctggagaggacgcggtcatggcgtgcccccaggcgccgcacgccgcgggacgaggaggatgggggcggggctggaccctagcccgagcttcggcggctgctcggaccccgtgttggtggagctatccatgggcggggactactaccgcgcctgctgcggcgagcccgactccgatatccccgaggggcccaagctgccctgcgttggggacaagacttgcactgatctagtgcaaattctagtcgtggccgtctgtaccgctctggggggatcagacagtgcagcggcgcagttgagtgttggttacttggtgttcaagttgtgctgtctaggacgaaaaggtggttattgctcaaaagggaactactcgacagtgaaactggttcaccatattcttgtaacaagtgaattgaagaatttgtcccataagttggccaaacaccacagggttcccactaaagagcctctttcctcttcagcagccgagtttcagtctggcagccccattttacaagagaaaattaagttgctcggcgaacaatatggtgctttaagacgggcacgtggagatggaaactgcttttatcgaagctttatttatgttttcctacctggtagtatctgcagtgtacttttcacaaatattatcgttcataattcaggctatgatcctttcttatatttgcttacaggaacacatcctagagagacaagacaaagctgaggttgatcacatcatggtaaaaattgaggaatgcaagaaagaagacactcctgtctcttggatatattgagttcacttttgaggatttctttgcgatacaatcacttgaggagagtgctgaattgctgagagagagatgtttgaagttccataaaggttgccgtaagtatactgaaggactaggggaagcatacgatggagatattgcatttgccagctcacttgaaacatttggaggaggccacaatgatccaatgagtgtcgcttttggtgggcctgtaatgaccaaatttacaattgccttaagagaaattggaacatacaaggaagtcctgcgctcccaggttgagcacatgttaaatgacagattactgaattttgttgacattgatttgcatgatgtgaaggatgctcataagcgctttgacaaggctagcctctcatatgaccagattcgtgaaaagtacctatcattgaagaaaggtacccgaccggacataacaacagcaattgaagatgagcttcacagtgctagatcttcatttgagcaagctcgtttcaacctggtcacttcactttcccatgtcgaggcaaagaagagatttgaatttttggaggctgttagtgcgacaatggattcacatcttcgttattttaaacaaggatatgaactattgcatcaaatggagccatatattaatcagattcttgcttatgcacagcaatcacgagaaagagcaaacaaggaacaagcttctctcgtagagaggatgcatgagtacaaaaggcagatagaccgggaaagtcggtcttctataaatggtttgaatgattcttataatggtgatcgaatgcagacaattggcagaagttcacataaacagatcgaggcagttatgcagtcaacttcaaaaggcaaggtagagaccatccgtcaaggttatctttcgaaaagatcttcaaacttgagagccgactggaaaagaaggttcttcgtacttgatagtcgaggaatgctgtactactatcgaaaacaaattactcggccacctgtaggtctccgatgtaacatttgttgttgaaatgctcattaagttggcataatattttgttccacgatgcatgatatattttaattcagatattttcctcaaccatttgcctttgatcatataggctggttgttccatgcaaagaaacgttaacccccctgaacatggttctgggttgttgagcagattgttctcttctcattaccatatacatgatgaaaagtctgtcgcacgtcatactgtaaatttgttgacatcgaccattaaagttgatgctgagcaatcagatttgaggttctgtttcagaattatttcacccacaaagatctacacattgcaggcagagagtgcagtagatcagatggactggattgaaaagataactggtgttattgcctctttactgagctcacaatcgccagaacagtgttttatgtcaagccctaagggcagtggtcatgataggagtaccagtgatggaagctcctttacaagttcagtggaatttgaaccttccgtaatcgatgatttagtactggagaagtactctggaaatgggcagcatgatgtaataagaggcacacatcatcacagaaccagcatgaaacctgaaaaaccaattgacttgcttaggaaagttgatggcaataatatgtgtgctgactgtggtgctttggaacctgattgggcatcattaaaccttggcgcacttctatgcatagagtgttctggggtgcaccgaaatcttggagtgcatatatcaaaggttagatctctgacacttgatgtcagagtttgggagccatcagtaatcaatctctttcagtcattaggcaacatgtttgtcaacaatatttgggaagacatgttgccagatgataattcaagtgctgatggatcagacacatcacagtacctctctgttagcaagcctaaacacaaagatgtattctctgccaaggagaagtttattcatgccaagtatgtagacaaagagtttatacggaagcgtagcatggatgagaatcaattagctgagcagatgtggaatagtgtagctgcaaatgacaagaaaacagcatacagtctcattgtgagatcacgtgccaatgtaaatttagtttacggagagatgccttctagcccatttttgactcttggaaaggcacttcagcaagagcaaccggtttcaccgcctgatggaagtcctaaatttttcgattgcaattcacatgacaagatttctcctcgggagcccctttcccctgctagcacgagttcacgcacagatgacatggaggacggttgcgaaggtctttccttgctccatcttgcatgccgtgttgcagacgttgggatggttgaattacttttgcagtatggtgctagtgtaaatatgaatgattctaggggtcggacaccccttcatcactgcattttgaaaggaagacatcggcatgcaaagcttctcctctccagaggggctgattcacaagccatggatcgagatggtaggacagcattgcagtatgcaatcgatggtggaacaagcgacgaagacattcttgcattgttagaggatcatagtagatgatcttgcaaccacaccttcagtaaattgaggttctcttggtgtggtcaactcaactaagaccttgttcggttagctctcaatccatgtggattgagtgtgattgggtgggttcaaatcccaaacaagtcaaagttcttctaatttttttccaatcctatccaatccatgtataatgggaataaccgaacaagacctaacagggatccagccccgctcggtcctagcttgtcgtgcagacaatccgaattcatggcatgaaagcaacctatgtacatgtcgttctagggcttcagtatcatgatgcgcatgttgtttctttccccgccgtttgcttgtttagcatcagtggtccttatttagtcatctggcaaacggtttggttttgtttgctgcaggtgatgcatagtaagcttgtaaatggagttgcttctcttaattttctagtcatcttttatcatgaagtagatgtggcattctaatgaaagatggttgtacatattgagatgtgctgttgtggcatatatgaaatattggcatggtgtggatggtatatacgaaagttgtgcttgcttaatcagaatatattgcattgttg

SEQ ID NO: 220660 - DNA, 1267 bp, Zea Mays
gtgacaacacccctcgtattctcaactaaaaccctagccccacagccccgactcccgacagttccttcggtctcatcgcaactgcgaagctccccccagttcccacggtttcccccacgacgccggcgatgggcaagcggaaacagcgcggcggcggcgacggagaacccgccgcggaaggcggtgctggcggaggacacagcccctccaccgtctcgaggcggtgtttagcgaggtcggcccagtgcggcgctgctttatggtcgcggagaaagggtcggagaagagtcgaggcttcgggttcgtgcaatttgcaactgttcaagatgctgatcgagctcttcaacaaaagaatggatctcctgttgctggtaggaaaatcagagttaagctagcaatgaatcgtgctccactgaaggaacgtttgcaaaaggggaatatgcaagtgaaggactctgatgcaaaagatgaagcagacgaaatttctcctgctgaaaagcataaggggaaatctcataaaacagatccagagcaactgcatttgttgtcaaatgatgctaaggtatcaaaggaagctcccattggcgactccgaaaaagtgaaaaattctgaaaagcaaagggttgcaaagacggtgatttttggtggcctgcaagactccgccatggcaaccgaggttttccgtcaagctcgagagattggttcagttgtatctgtaaactatccacttcccaaagaggaaatgagattcaatggacttgctcgagatggatgcacatcagatatggcagctgtactctttgcaagtgtcaaatcagcttgggattctgttgtccaactgcataataaggaagtcaagggagctactgtttgggctcgtcaacttggcggagagggctcaaagatcagaaaatggagagcgattgtcaggaacctgccattcaagattacagagaaggagatcgtggatatgtttagttcagcagggtttgtctgggatgtgacaattccacataagtctgatgaggggatatcaaaaggctttgcttttgtatctttcacacggaagcaagatgcagaaaatgctataaaaaatattaatggaaaagatgttgcaaagagaccagtggctgttgattgggctgttccgaaaaaagtctacactgttgctgcaaaagttgatgctaaggataatgggaacagggttatcttctgttaatttaaaaataatttagtcttattcctgattgtctaaacagatgttcgg

SEQ ID NO: 220661 - DNA, 1253 bp, Zea Mays
ccgactcccgacagttccttcggtctcatcgcaactgcgaagctccccccagttcccacggtttcccccacgacgccggcgatgggcaagcggaaacagcgcggcggcggcgacggagaacccgccgcggaaggcggtgctggcggaggacacagcccctccaccgtgttcgtttccaacctcccctacaccttcaagtcctccgatctcgaggcggtgtttagcgaggtcggcccagtgcggcgctgctttatggtcgcggagaaagggtcggagaagagtcgaggcttcgggttcgtgcaatttgcaactgttcaagatgctgatcgagctcttcaacaaaagaatggatctcctgttgctggtaggaaaatcagagttaagctagcaatgaatcgtgctccactgaaggaacgtttgcaaaaggggaatatgcaagtgaaggactctgatgcaaaagatgaagcagacgaaatttctcctgctgaaaagcataaggggaaatctcataaaacagatccagagcaactgcatttgttgtcaaatgatgctaaggtatcaaaggaagctcccattggcgactccgaaaaagtgaaaaattctgaaaagcaaagggttgcaaagacggtgatttttggtggcctgcaagactccgccatggcaaccgaggttttccgtcaagctcgagagattggttcagttgtatctgtaaactatccacttcccaaagaggaaatgagattcaatggacttgctcgagatggatgcacatcagatatggcagctgtactctttgcaagtgtcaaatcagcttgggattctgttgtccaactgcataataaggaagtcaagggagctactgtttgggctcgtcaacttggcggagagggctcaaagatcagaaaatggagagcgattgtcaggaacctgccattcaagagaaggagatcgtggatatgtttagttcagcagggtttgtctgggatgtgacaattccacataagtctgatgaggggatatcaaaaggctttgcttttgtatctttcacacggaagcaagatgcagaaaatgctataaaaaatattaatggaaaagatgttgcaaagagaccagtggctgttgattgggctgttccgaaaaaagtctacactgttgctgcaaaagttgatgctaaggataatgggaacagggttatcttctgttaatttaaaaataatttagtcttattcctgattgtctaaacagatgttcgg

SEQ ID NO: 220662 - DNA, 1234 bp, Zea Mays
cttcggtctcatcgcaactgcgaagctccccccagttcccacggtttcccccacgacgccggcgatgggcaagcggaaacagcgcggcggcggcgacggagaacccgccgcggaaggcggtgctggcggaggacacagcccctccaccgtgttcgtttccaacctcccctacaccttcaagtcctccgatctcgaggcggtgtttagcgaggtcggcccagtgcggcgctgctttatggtcgcggagaaagggtcggagaagagtcgaggcttcgggttcgtgcaatttgcaactgttcaagatgctgatcgagctcttcaacaaaagaatggatctcctgttgctggtaggaaaatcagagttaagctagcaatgaatcgtgctccactgaaggaacgtttgcaaaaggggaatatgcaagtgaaggactctgatgcaaaagatgaagcagacgaaatttctcctgctgaaaagcataaggggaaatctcataaaacagatccagagcaactgcatttgttgtcaaatgatgctaaggtatcaaaggaagctcccattggcgactccgaaaaagtgaaaaattctgaaaagcaaagggttgcaaagacggtgatttttggtggcctgcaagactccgccatggcaaccgaggttttccgtcaagctcgagagattggttcagttgtatctgtaaactatccacttcccaaagaggaaatgagattcaatggacttgctcgagatggatgcacatcagatatggcagctgtactctttgcaagtgtcaaatcagcttgggattctgttgtccaactgcataataaggaagtcaagggagctactgtttgggctcgtcaacttggcggagagatcagaaaatggagagcgattgtcaggaacctgccattcaagattacagagaaggagatcgtggatatgtttagttcagcagggtttgtctgggatgtgacaattccacataagtctgatgaggggatatcaaaaggctttgcttttgtatctttcacacggaagcaagatgcagaaaatgctataaaaaatattaatggaaaagatgttgcaaagagaccagtggctgttgattgggctgttccgaaaaaagtctacactgttgctgcaaaagttgatgctaaggataatgggaacagggttatcttctgttaatttaaaaataatttagtcttattcctgattgtctaaacagatgttcgg

SEQ ID NO: 220663 - DNA, 1480 bp, Zea Mays
gggcagtcatacattttacatgtagtacctgcttgacgacgggaaccaacacaacggcgcgccgcgaggagagtttgttccatttcctccgcctgcaggctagctgcagctaataaccccggccgccggatgttctccttctcgcatgctttttttttggggggttctttctccgcctcctgctcttcgtctgttctaccatcgtcgatcacacagcaatttgactgaccgcgtctgtccttccgaccttgccgttttgctttgcaggccgacgttctaccgcgtgtaccgcaagaagtcgacggaggggttccagtcgaccccgtacgtggtgacgctgttcagctgcatgctgtggatcttctacgcgctgctcaagtccggcgccggcctccgcgtgcgcgtgctcggctggatctgcgtcagcgtcgcgctcagcgtattcgccgcgccgctcagcatcatgcggcaggtggtccggaccaagagcgtggagttcatgcccatctcgctctccttcttcctggtgctgagcgccgtgatctggttcgcgtacggcgcgctgaagagggacgtgttcgtggcgttccccaacgtgctgggcttcgtcttcggcgtcgcgcagatagcgctgtacatggcgtacaggaacaaggagcccgcggcggtgacggtggaggaggcgaagctgccggagcacgccaaggaggtggtggtggccgcggcggcggccgaggccagggcgagctgcggtgctgaggtgcaccccatcgacatcgacatcgaagctacgccgacgccggtggaggaggtgcacgagccgcaggtggtcgtggtcgtcgacgtggacgtggagcctgtcacctgcgccggcgccgccgaggcagctgcgggagcaggggcagatgcgtccggcgtggccgacggcggcgtccctggacccatggcgccgccggagcagctggcgatcaagcccgacatggccatttccgtggaggcgtaggttggttaaagtgtaatagcagagtgagtcgatatcgatcagtagtagatttgtcgagtcaaggaaggggcctgctgctgctgctacgcgacagcagcggccagatgtactgcctgcatgcatgcagtccctcccgttgactcgacccgtagagaagggatgggatggaagtagccgggtccttgggcgagtagcggcgccttggcacccacgggccagccgtactggcctgtgtgatgaaccggcgagagagatgagataatgtgcgagcgagagagggttggttgggttgtggtagttgaagaagacggctagctagctgctgctgctgggctctctatctgtctctagatctgtgtatgtctgtgtaatcgaggattccctcaccttgcatgccgcctcccttttgtgtccttctagtctgatgattgttttcattccatccatgccggcgtcgcagtaataaaatttttttgg

SEQ ID NO: 220664 - DNA, 877 bp, Zea Mays
gaccgggaccaggcacaccacgcacgcagagccctagaggcattcccaagttcgagcaatcgagccccagaggaacgactcctgccggacgccgccacaccatctgaaactgacggcggcgggcggccgctgcttcctctcccttctccgttcagatccggctactggcgtccctcctccgccatcttccctacccccgacgtggcgacgagctgtgagccaggtcatctccgtcatcaccaacgatggccgcaacatcgtgggtacgctcaggggattcgatcaggccaccaacattatactcgacgagtcccatgagagggtctattctagaaaggagggagtccaacaacttgttcttggtctgtacattatcaggggtgacaacataagcgttgtgggcgaggttgatgaagagctggattcaagattggatatgtcgaagctaagggcgcacccactgaagcctgttattcactgaggtccgagtatgtctttgggtaatatgtggactggatggatgggtcactgttgaatgcaggatgtagcatcatcatggtgaggggactgagtaatatggacatgtatcttgcgtattgtgcaatgaatgtgttggctgttgggtcgcttgcctacgcattctgtaagattgcagttaccattaggaactgaactcaactcgactgaattaatatcatttggctctactcgtagatacagtatgcttgatttgactcgaaatttgaagaatgaaagaaataggactcggaaacagtgaaagtagcatagtaaattatttggatccacgcaaattaattccttggtagtaagttggctactttgttctaagaatatattataaggatatacttctctg

SEQ ID NO: 220665 - DNA, 928 bp, Zea Mays
actagggttacttaacagtcggatcgcagaggtatcctgccctgcagttcctcctcggcggaaaccaagaccctagctctcgtcgtcgtcggcgtcggcggcggcgaccgtggcggatccgacagccagccctcgtcgcagccgggccgccattgccgtcgtccagctcccaagacggcgtacctccttatgttctccagatccggaaccgtgcggatggtgttcggggttcggcgaccggaaagaaaaacgttttggcccggtctcagctacgtacttcccttattctttgaccaagcctactgaggagaggaaagagcatgatcgcaagagcccggtgacagcattggaggtctatcccagcaaaaaaacagaccaccgatctttttgataagaaacctcatcgctgatttacggccagcgtgtctgcatcggctcgatgtgcgcgtgaagtttctatcatcattggaagaccatcatcggtgttgaggtcaactgcaagcgtgccaatcaatctcaccatgccacacgagccgaggccaccaaccacgagccctgctgttgcggcatggattgctgtgtggattgcaacgtctttggtgaggtcattcgttgtgatgtgcctggcggcatgaacatctcagaggtggatctatggaaagaggagattggaaggctacgcttgaaagagagacgaaaggttgcgctgtgggatagacgaaaggttgtgcctgcgctacatttgggaactggaggaaaagtgaaaagaatgatgcattttctttgtgtaatcggtggtcatggtagttgtgctgcctcacccaaacctgttggtccaggattcgtcaaggacagggacagggtgccggtgccgatctgcaagataggaggaggatttaaaggttgttctaggtccttgcaggattaa

SEQ ID NO: 220666 - DNA, 933 bp, Zea Mays
actagggttacttaacagtcggatcgcagaggtatcctgccctgcagttcctcctcggcggaaaccaagaccctagctctcgtcgtcgtcggcgtcggcggcggcgaccgtggcggatccgacagccagccctcgtcgcagccgggccgccattgccgtcgtccagctcccaagacggcgtacctccttatgttctccagatccggaaccgtgcggatggtgttcggggttcggcgaccggaaagaaaaacgttttggcccggtctcagctacgtacttcccttattctttgaccaagcctactgaggagaggaaagagcatgatcgcaagagcccggtgacagcattggaggtctatcccagcaaaaaaacagaccaccgatctttttgataagaaacctcatcgctgatttacggccagcgtgtctgcatcggctcgatgaaaagtgcgcgtgaagtttctatcatcattggaagaccatcatcggtgttgaggtcaactgcaagcgtgccaatcaatctcaccatgccacacgagccgaggccaccaaccacgagccctgctgttgcggcatggattgctgtgtggattgcaacgtctttggtgaggtcattcgttgtgatgtgcctggcggcatgaacatctcagaggtggatctatggaaagaggagattggaaggctacgcttgaaagagagacgaaaggttgcgctgtgggatagacgaaaggttgtgcctgcgctacatttgggaactggaggaaaagtgaaaagaatgatgcattttctttgtgtaatcggtggtcatggtagttgtgctgcctcacccaaacctgttggtccaggattcgtcaaggacagggacagggtgccggtgccgatctgcaagataggaggaggatttaaaggttgttctaggtccttgcaggattaa

SEQ ID NO: 220667 - DNA, 1300 bp, Zea Mays
agtcggatcgcagaggtatcctgccctgcagttcctcctcggcggaaaccaagaccctagctctcgtcgtcgtcggcgtcggcggcggcgaccgtggcggatccgacagccagccctcgtcgcagccgggccgccattgccgtcgtccagctcccaagacggcgtacctccttatgttctccagatccggaaccgtgcggatggtgttcggggttcggcgaccggaaagaaaaacgttttggcccgggtatacagcgtcttttgttactctttcctcccatattatggttcgtttatttgaccctgcagctggactgtgaggagcctatatattctatattttcccccatcatgcagtcttgacataaggttggagagttggaatgactactcaagacgtcggttagcaatggactgttcggttagcactggattaaaaaggattgaaggaaattaaattactaacaaaataaatttcttgttagtaaaaaataattagaagaggatttaatcacttaccttaatcctcttcgatctaagaatttactgtccatgatcttcacgcgatgcttgtgttgatgccctcagtctcagctacgtacttcccttattctttgaccaagcctactgaggagaggaaagagcatgatcgcaagagcccggtgacagcattggaggtctatcccagcaaaaaaacagaccaccgatctttttgataagaaacctcatcgctgatttacggccagcgtgtctgcatcggctcgatgccttcggtgggaggatgactccaatccatcaaaaaagaacgaccaagtgcgcgtgaagtttctatcatcattggaagaccatcatcggtgttgaggtcaactgcaagcgtgccaatcaatctcaccatgccacacgagccgaggccaccaaccacgagccctgctgttgcggcatggattgctgtgtggattgcaacgtctttggtgaggtcattcgttgtgatgtgcctggcggcatgaacatctcagaggtggatctatggaaagaggagattggaaggctacgcttgaaagagagacgaaaggttgcgctgtgggatagacgaaaggttgtgcctgcgctacatttgggaactggaggaaaagtgaaaagaatgatgcattttctttgtgtaatcggtggtcatggtagttgtgctgcctcacccaaacctgttggtccaggattcgtcaaggacagggacagggtgccggtgccgatctgcaagataggaggaggatttaaaggttgttctaggtccttgcaggattaa

SEQ ID NO: 220668 - DNA, 765 bp, Zea Mays
ctgcagttcctcctcggcggaaaccaagaccctagctctcgtcgtcgtcggcgtcggcggcggcgaccgtggcggatccgacagccagccctcgtcgcagtctcagctacgtacttcccttattctttgaccaagcctactgaggagaggaaagagcatgatcgcaagagcccggtgacagcattggaggtctatcccagcaaaaaaacagaccaccgatctttttgataagaaacctcatcgctgatttacggccagcgtgtctgcatcggctcgatgtgcgcgtgaagtttctatcatcattggaagaccatcatcggtgttgaggtcaactgcaagcgtgccaatcaatctcaccatgccacacgagccgaggccaccaaccacgagccctgctgttgcggcatggattgctgtgtggattgcaacgtctttggtgaggtcattcgttgtgatgtgcctggcggcatgaacatctcagaggtggatctatggaaagaggagattggaaggctacgcttgaaagagagacgaaaggttgcgctgtgggatagacgaaaggttgtgcctgcgctacatttgggaactggaggaaaagtgaaaagaatgatgcattttctttgtgtaatcggtggtcatggtagttgtgctgcctcacccaaacctgttggtccaggattcgtcaaggacagggacagggtgccggtgccgatctgcaagataggaggaggatttaaaggttgttctaggtccttgcaggattaa

SEQ ID NO: 220669 - DNA, 1073 bp, Zea Mays
ccggtcttcacgcccgcgccacgccgcctggaccagagtcaccaaaccgcggacacgccacgaaagcacgaaccagggactcgcccgccattcgccaacccccacgaacccacggccctctccgacccgatcgccatcaccccacgcactcgcacccttcagggctaccccataaaaacgcccacgacggcgactggcctttcgattcgcccagggcaatattccccccggaccaaactagatcagcgaaacccactccgctctcccgagatcggacacatggcggcggcggcagtgacgtccaacggcggcgcagtggccgcgaacgggccggcgcccggcaggctggcctccgtgtacagcgaggtgcagacgagccggctcctgcacacgctgcccctcccctccgtcctccgctccaacttctcggtcgtcgacggccccgccagctccgccgcgggtaaccccgatgagatcgccaagctcttccccaacctgttcggccagccctcggcgtcgctggtgccttcggccgagcccgcggcgaccaggccgctaaaggtcggtgtcgtgctctctggtggacaggcgcccggcgggcacaatgtcatctgcggcatctttgattaccttcaggagcgtgcaaaaggtagcaccttgcttggattcaagggaggccctgctgggatcatgaagtgcaaatatgtggaactcacttcagactttgtgtatccctacagaaaccagggcggattcgatatgatctgcagtggaagggacaagattgaaacaccggagcagttcaagcaagctgaagacacagccaacaagcttgatttggatggacttgttgtcattggtggtgatgattcaaacaccaatgcctgccttcttggtgaatactttaggtcaaggaacctgaagactcttgttattggttgcccaaagactatcgatggagatctgaaaatgtaaggaggtaccaacaagctttggatttgatactgcttgcagggtatctaattcttgatccctttgctcacctcacagtatcatgcatgcaaaattatccc

SEQ ID NO: 220670 - DNA, 4058 bp, Zea Mays
gacgcgcctgcactgcacctgcactgcacacacgacgccgactcccacacacacacacaacgagctaagcttattagcttgcaagcatacgttgtcgatctgatcgacgtactagctagcgcgtagccaacagctagcaaggtcgtcgtcgagcgcggcggcggcaggcggcggcagcagcagcagctccgtcgtcgtccatggcggcgattgatcgggtggtgttcgcgttgaacgggcagcggtacgaggtgggcggagtggacccgtccacgaggctgctggagttcatccgcacccagacgcccttcacaggccccaagctcggctgcggcgaaggtggttgtggggcttgtgttgtccttatagcaaaatataacccaaagacggatgaagtgactgaatttacagcaagttcatgcctgacacttctttacactataaatttctgttcggttatcactactgagggtctgggtgatagccaatatggctttcatgctgttcaggaaaggatgtctgggtttcatgcctctcagtgtggcttctgcactcctggaatgtgcatgtctattttcacttcccttatcaaagctgacaaatccaagaggcctgaaccaccaaagggcttctcaaaactaaaagtatcagaagcaggaaaggctttctctggcaacttgtgcagatgcactggttatcgtccaattgttgatgcctgcaaaagttttgcatcagatgttgacttggaggatttgggccttaatatattctggaagaaaggtgataggaacccagatgttagtgaattgccaagttacacccttggtggtggagtctgcaccttcccagactttctaaaaactgagttaaaatcctcgcttgatcatctgaataatccttgtattgcagcctccggggagggttggtatcatccgaaaagtatcaaagaatattacgagttaataaattcttgtttatttagtgactcagtcaaagtggttgttggaaatactagcagtggtgtacctggatacaaggatcaagacatctacagtaagtatattgacataggaggcattccagaactttcaaatattgtaaggatggggtctggaattgaaattggagtagctacatcaatctctaggaccattgagatacttgaggaagaatgtgaatctatatcctctccaaacggaagtgtagttttcagaaaacttgcgaaccacatgagcaaagttgctacaccttttgttcgtaacacggctagtattggaggaaacatagttttggcacaaaaattcccatttccatcggacattgcaaccatactccttggtgctggtgcaactgtttgtcttcaggttgttgcagaacggagacaaattactttggaagagttcctagagcagcctcctatagatgctactactttactcctgagcatatttattccaaattggatttcagattccggggcaaatataagtttgctatttgaaacttacagagcagcgcctcgtcctcttggcaatgctgtttcatatgtaaattgtgctttcctgggacatgcttctttggatgaacaatcagatactcttgtattgagtaatctgcggttggcttttggtgcatatggaacagaacatgctattagagcaacgagggtggaggaattccttactggtaaatcactcactgcatcagttgtacttggtgcaattcaattacttagagaaacggttgtaccaatggagggaacatcacatcctgaatatagagtcagtgcagctgttggatttctctttagtttcctatctccattttctaaatgcatcccagagcctggaaagtctctggccagcagttctactgattcagcagatacagatgatgttcgtaatctgccattatcaacacgtcgagaaacattttctagtgacgaatataaaccagttggtgaaccaattaagaagtatggtgttgaacttcaagcatctggggaggcagtatatgtggatgatattcctgctccaaagaattgcctctatggagaatttatttacagcacacaaccccttgcttatgtcaaaagtataaaattcaaatcctctttagcatcagagaagatcatctcttttgtttccgcaaaggatattccaagtggaggactaaatattggatcatcctctacgtttggtgacgaaccactatttggtgatccaattgctgagtatgctggtcaagctcttggcattgtgattgcagaaacacaaaggtatgctgacatggcagccaagcaggttgttattgaatatgacacagaagatttgagcccaccgatcataactgtggagcaagcagtggaaaaaagtagctattttgatgttcccccagaattctatcctaaagaagttggtgatgtttccaagggcatggcagaagctgatcacaagatcccatcaacagaagtaaaacttgcctcagagtactacttctacatggaaacacagacagcactagcagttccagatgaagataacactttggtagtctacagttcgtcacagtaccctgaacttgcacaaagtgtcatagcaaggtgcttaggtattccattcagcaacgtgcgtgtcattacaagaagggttggaggaggcttcggtggaaaggcattcagatcattccaagttgcaacggcagctgcactttgtgcgtacaagttacggcgtcctgttcgaatgtaccttaatcgcaacaccgatatggtcatggttggtggtaggcacccagtgaaagctcattatactgtcggattcaagaacgatgggaacgttacggccttgcatctagatttattgattaacgctgggatatctccagatgcgagccccataataccaggcactattatatctagtgtgaagaagtacaactggggcgctctgtcatttgacatcaagctctgcagaacgaacaactcatctaaatccgtaatgcgtgctcctggagatacacaaggctctctaatcgcagatgctgtaatcgagcatgtggcgtctgtcctgtcactggatgccaacagcgtgagggaaaagaatttccacacctacggtactcttcagtcgttctaccctgacagcgcgggcgaagcttctacgtacacgttgcattctatttttgataggctggtctcaacttcaagctacctggatcgagccgaatccataaaggagttcaacagcaacagcaagtggcggaaacggggcatctcttgcgtgcccctcattttcaaagtggagccaagggcggccccaggaagggtttccgtgctcaaggacggctccgtagtggtggaggttggaggaatcgaaatcgggcaaggtctgtggaccaaagtgcagcagatgaccgccttcgctctgggaagactgtggcccgatgctgatggcggcggcgaatgtcttcttgggagagtgcgcgttctacaggctgacaccttgaacttggtacaaggtggactcactgctggcagcaccgcttctgaatctagctgcgcagcgaccctccaggcatgcaatacgctgtacgataggttaaagctagtcttggacaggctgcagcagcgatcagagaatgtctcgtgggataccttggtttcgcaggcctatgaagacgatgtcgatttgtccgcgagtgcgtactgggtacctggtcaagcttctaacaagtaccttaactacggagctggtataagcgaggtggagattgatcttcttacgggagcaatcactataataaggggcgatcttgtgtacgactgtgggaagagcttgaaccctgcagtggacttaggacagatcgaaggctcgtttgtacagggaatcggtttcttcgtatacgaagagtacaccacgaacagcgacggcctgatgatcagcaacagcacgtgggactacaagatcccaagcgtggacatcatcccgaggcagttcaacgccgaggtgctgaacaccggataccacaagaaccgtgtgctctcttcaaaagtctgtgtg

SEQ ID NO: 220671 - DNA, 2478 bp, Zea Mays
gtttacaccgagggttctctctttgtctgttcactgttctactgggacgaccccaaatccccaaatcgaaaggggccgtccggctcagggtttctcgacggctccttgccctctccgccatggacgcacagcgagccctccttgacgagctcatgggcacagctcgcaacctaacggaggaggagaagaaggggcacaaagagctgaagtgggacgatccggacgtgtgcggcccttacatggttcggttctgtcctcacgaccttttcgtcaacaccaagagcaatatcgggccgtgctcgaggatccacgatccgaagctcaaggaaagctttgagaagtctcctaggcacgatacttatatgcaaaggtttgaggcagagcttgcacaacaatgtgagaaattggtaatggacttagatagaaagataaggcgtggtcgagaaaggctggctcacgattctgctgtgccaatgccaatccctggaaaattagctgagctgctttcagtgcgaaaagaacaggtgaagaagctgctggagcaaattgaggagcttggtgaggctggtaaagtggatgaagctgaggcacttatgagaagggttgacattttaaacgctgagaagacagctttagctaacgaagcagacaacaaagtagctatgcttgagaagaagatggaactttgtgaaacatgtggatcattcttagttgctgatgatgctcttgagagaacgcagtcccatgtgactgggaaacaacacattggttatggcatggttagggatttcctggcagaatacaagcaaaagagaagacaaaagaggaagagcggcttgcaagggagcagaaagcagaggagcatcggaaacagaggggaaaagagtatgatagtgggggcagggatagagataccagaagggagaggtctggggagcgtgactttgaccgtgatcgtcagtatgagcgaagcagaggaagagatagggtttatgattacagggacagaggatcagaacaccgaagcaatcgctacagaaatgggagggattctgaaagaggtggacacagatacaggagtggtggtatgacaaatgaccgagggagaatgaggagcagatcacgttctccaaccaggcatggctatggaagatctagaagtccagatcattagctgcctagctggacatttagatagttttattcacagttgggactcatgagctctgttggaaccctacagtctccctattttgcatggggaaaaattcccaggtcggtatcgattgccatccccacattttttgtgtttctggcattctatatgcgctaaagctttgtttcaatatttggaatcggaagttaaatttagtaaggccggtactggatttcatatatggatgatgatgtttacagcttatagcaggtaaaccttgaacatcgatgtttcatgttacacactttttatctcccttaataactctgctagaaaccttagttctgctgtttggcttagatttttacactactcaggccaggtatctttttctaccaaaacttatgtgcataattatgattaatgtggctttagtagttgatccatgaaaattgtcaatcatcaaccatttcttttcctggaaccgttgtagtgtacaagagatcaagctttggtttgtagacaatggtgccctggctagaaccgcgaggattgggcctatttcctgactgtctagttattgtctcagaagtctggtttagataaggttctgtttccgcggcaaactattagatacctttgcagttgcggagttctgtaattgatgtattatttatgcagatagtgtagtctaactatgcaaactaatatatgatctgtttcagagttttgagatattccgtatgattggttgtctgcaccgtctcattttggatcactgtacgtgttgactttgtttgagcttctgtttagttgcctgcacgtggaaacatccacgctatatgagtagatgcaaagcaagccattttgatgttatttgtctgcatccatgcatatgccggaaacagccatatcctgtcccgcatcgcgcgagcctgcacctctgcgagcagccatctaatcagccggattatgttttggatcaattggcaccacaatcttgttggagcagcgtctactgaagttatgttgtttgcatgacatttctgattcctgtgccttttttcacttacagcctgtttggatgcctagaaatgaatctttttcaagaaataaattccaagaaatgaattatatagaattcaatcgactagaaagtgattgaattccattatttttatttggttgtacaagcaattgaattcctagaagtaaattctagatgttgtttggatactttgcacacagaatttgaatacaaacaaagatctcttgactttgcatctgcttaaaaatgagcatgaacaatttacaactatcag

SEQ ID NO: 220672 - DNA, 2309 bp, Zea Mays
ctcacacgatatgatactcgaataatattcatacggagttacggaccataccgtttacaccgagggttctctctttgtctgttcactgttctactgggacgaccccaaatccccaaatcgaaaggggccgtccggctcagggtttctcgacggctccttgccctctccgccatggacgcacagcgagccctccttgacgagctcatgggcacagctcgcaacctaacggaggaggagaagaaggggcacaaagagctgaagtgggacgatccggacgtgtgcggcccttacatggttcggttctgtcctcacgaccttttcgtcaacaccaagagcaatatcgggccgtgctcgaggatccacgatccgaagctcaaggaaagctttgagaagtctcctaggcacgatacttatatgcaaaggtttgaggcagagcttgcacaacaatgtgagaaattggtaatggacttagatagaaagataaggcgtggtcgagaaaggctggctcacgattctgctgtgccaatgccaatccctggaaaattagctgagctgctttcagtgcgaaaagaacaggtgaagaagctgctggagcaaattgaggagcttggtgaggctggtaaagtggatgaagctgaggcacttatgagaagggttgacattttaaacgctgagaagacagctttagctaacgaagcagacaacaaagtagctatgcttgagaagaagatggaactttgtgaaacatgtggatcattcttagttgctgatgatgctcttgagagaacgcagtcccatgtgactgggaaacaacacattggttatggcatggttagggatttcctggcagaatacaaggcagcaaaagagaagacaaaagaggaagagcggcttgcaagggagcagaaagcagaggagcatcggaaacagaggggaaaagagtatgatagtgggggcagggatagagataccagaagggagaggtctggggagcgtgactttgaccgtgatcgtcagtatgagcgaagcagaggaagagatagggtttatgattacagggacagaggatcagaacaccgaagcaatcgctacagaaatgggagggattctgaaagaggtggacacagatacaggagtggtggtatgacaaatgaccgagggagaatgaggagcagatcacgttctccaaccaggcatggctatggaagatctagaagtccagatcattagctgcctagctggacatttagatagttttattcacagttgggactcatgagctctgttggaaccctacagtctccctattttgcatggggaaaaattcccagtaaggccggtactggatttcatatatggatgatgatgtttacagcttatagcaggtaaaccttgaacatcgatgtttcatgttacacactttttatctcccttaataactctgctagaaaccttagttctgctgtttggcttagatttttacactactcaggccaggtatctttttctaccaaaacttatgtgcataattatgattaatgtggctttagtagttgatccatgaaaattgtcaatcatcaaccatttcttttcctggaaccgttgtagtgtacaagagatcaagctttggtttgtagacaatggtgccctggctagaaccgcgaggattgggcctatttcctgactgtctagttattgtctcagaagtctggtttagataaggttctgtttccgcggcaaactattagatacctttgcagttgcggagttctgtaattgatgtattatttatgcagatagtgtagtctaactatgcaaactaatatatgatctgtttcagagttttgagatattccgtatgattggttgtctgcaccgtctcattttggatcactccatatcctgtcccgcatcgcgcgagcctgcacctctgcgagcagccatctaatcagccggattatgttttggatcaattggcaccacaatcttgttggagcagcgtctactgaagttatgttgtttgcatgacatttctgattcctgtgccttttttcacttacagcctgtttggatgcctagaaatgaatctttttcaagaaataaattccaagaaatgaattatatagaattcaatcgactagaaagtgattgaattccattatttttatttggttgtacaagcaattgaattcctagaagtaaattctagatgttgtttggatactttgcacacagaatttgaatacaaacaaagatctcttgactttgcatctgcttaaaaatgagcatgaacaatttacaactatcag

SEQ ID NO: 220673 - DNA, 3036 bp, Zea Mays
atttgggcctctgcggcccgcttacgcacgttcttgccctgctttgctctctccaactccagcatcgccccaaacagcggagccagcaccaccaccaccgcggcggcgcgagcgtcactgccctgccctctcctcctcctgtcctactgctctaccgtcctctcccccccgcgccgctgccgcaaccaaaaccctaaaagtcgctttctatccacttgctccgccgcctccaccaccgggcgccatggcggacacagtgcagtaccgcctggagcggatgaccgacgaactggacgacctggagcgccggggcctcttcacgcgcggcgagctagctgacgtcgtccgcaaacgccgcgacttcgagtaccgcctccgccgccactccccgctccgccaggactttctcgactacatcgcctacgagctccgcctcgactccctccgcaacctccgcaagcgcgccatcatacgcgccgccgccgaagacgacgacgacgagcctcagcacgacgctcgcagcagcgacgacgagggaggccggaggaagaggaagaaggataaatccaagaagaagtggaagaagtccgtctccgacgtcgcgggcgtcctccgcgtcctcgacatctaccggatggccaccgtcaggttcaagggcgatctcgacctctggttccggtacctcgagttctgccgcgacaagcgacacggcaggatgaagcaggtatgccaccaccatcaacagtccaacaccagaccgattcatctttagttggttgctaagttcaaagttcacctctgtaacttgctgctgttctgctcgatttcacagatgtctcgttctggactatacactgacattctgctatgctcacaagaagatcggggaaacctgaaacctttctatgcctataatgtgctatattccagctacacatctagttctggcacaagccattcgcttccatcccaaggttcctgggctttggatctatgcagcagcatgggaattcgatcagaacctgaacgttgccgcggcacgtgcactgatgcagagcggtctcaggtcttgccctcagtcagaggatatgtggatcgagtatcttcgcatggagcttacctaccttaacaagctcaaggctcgaaaggttgctcttggagaggatgtcaagacgctgcaaaagaaagacaacgatgcgagccagtggaaagaggaaaacaaggaactgttcatgccactgaatgaacaggtcaaagatcctaaggagccaggctcggctggagatgccctggaggagaaggaagacctgttttggcgtcaagggttgttaatcattcagaccatatatcatggtgccgtggaagctcttccgtcaagcttaaccttgcggaagaaattcttggagatactaaacagtgttgacttggcacattctgatgagttaaaactggaggtcctggatgaccttaagagagatttctctcatagcgaggactactgggattggtttgctaggcttcagcttagcaacttgaacagttccagtaattcgaatagaaaggatgctatatcaaacaagttgaacagatcaattcaggtgtatgacgaagctatcaggaagctaccaaattccaaaatgtactcattgtatgcaaagttttggatggatgttatatatactgacagagaagattcagtcacattattccaggattctgaatttgatgcttcagagttcacttcatccatactgaaagtttatgaaaatgcagaatcatgtggatgtcttactgaggatcttgcttgccaatacatatcactttacttgaaactagaaagactggaggaagctaagactctcgcagaaaagctttgtgatggtcctctttcaaatgctgcaaatttgtggagcctgagatttactatggagataaattcaattgcaactgctcctggcagttcttccttgagcaaggagaacctgagctctctgcttgatctatttagcactgtactctccaagttgtctgtaactgaggctgagagactgtggcatatggccatgaagttgttttcccatgataaggtctgtttcgagaagctggtgaagtgtgcgatgctatcattaagtctggcaggtggcagtgattcaggagcatcagtttcttctgctatcgttggatggtatttgcaaagagatggtgtgaagcatgctaggaagatgtataagagattgcttgctttacctcggccaagcctcaagttcatgcaatactgcatagcgctggaggcgaaccttgcatcgctcggagacaacggcgccctcaaagatgctcggcggctatatgattcagcgctcgacctgtatccccaggaaagagaagtgtggcggagctactacgacctggagctgaagatgggaacatcggagtctgccaacgccgtgtactcgcgctctcgtaaggtgctgggtgactccactgccttgactgctccccggggctaggtcgcagcatgcaatgtattccaagatgcaatgtgattttttttgtttggatctgtgttttccaatcctctctgagtctgggtcagcaagcaattaagctgatgcatcgaaattttggctctaaatgggagacctacaatgtgctgctggggaacactgtatatcttgttcaaaaaacaagagtactgcagctgctggtggctgtctcctttgagaacacttgcctgtgtcccttttctttctttttcttttttgtttgagcagtagctgggctgttggtgatgctgttccttagtgttgaggtgctatggtgtaacagtgtcaattgcgacgtgaacaaattctgggatctcgaaccatttgttgagattttgaaagtgtactggtggtcataatttttgttgggacctcgaaccatttttttagattttgatgtgttccttttatttatttattttttgtatggttcatggatgagccacatttgcttttgtgtcagtcttgctgcagattcctggtattaataaat

SEQ ID NO: 220674 - DNA, 2778 bp, Zea Mays
ctttgctctctccaactccagcatcgccccaaacagcggagccagcaccaccaccaccgcggcggcgcgagcgtcactgccctgccctctcctcctcctgtcctactgctctaccgtcctctcccccccgcgccgctgccgcaaccaaaaccctaaaagtcgctttctatccacttgctccgccgcctccaccaccgggcgccatggcggacacagtgcagtaccgcctggagcggatgaccgacgaactggacgacctggagcgccggggcctcttcacgcgcggcgagctagctgacgtcgtccgcaaacgccgcgacttcgagtaccgcctccgccgccactccccgctccgccaggactttctcgactacatcgcctacgagctccgcctcgactccctccgcaacctccgcaagcgcgccatcatacgcgccgccgccgaagacgacgacgacgagcctcagcacgacgctcgcagcagcgacgacgagggaggccggaggaagaggaagaaggataaatccaagaagaagtggaagaagtccgtctccgacgtcgcgggcgtcctccgcgtcctcgacatctaccggatggccaccgtcaggttcaagggcgatctcgacctctggttccggtacctcgagttctgccgcgacaagcgacacggcaggatgaagcaggttctggcacaagccattcgcttccatcccaaggttcctgggctttggatctatgcagcagcatgggaattcgatcagaacctgaacgttgccgcggcacgtgcactgatgcagagcggtctcaggtcttgccctcagtcagaggatatgtggatcgagtatcttcgcatggagcttacctaccttaacaagctcaaggctcgaaaggttgctcttggagaggatgtcaagacgctgcaaaagaaagacaacgatgcgagccagtggaaagaggaaaacaaggaactgttcatgccactgaatgaacaggtcaaagatcctaaggagccaggctcggctggagatgccctggaggagaaggaagacctgttttggcgtcaagggttgttaatcattcagaccatatatcatggtgccgtggaagctcttccgtcaagcttaaccttgcggaagaaattcttggagatactaaacagtgttgacttggcacattctgatgagttaaaactggaggtcctggatgaccttaagagagatttctctcatagcgaggactactgggattggtttgctaggcttcagcttagcaacttgaacagttccagtaattcgaatagaaaggatgctatatcaaacaagttgaacagatcaattcaggtgtatgacgaagctatcaggaagctaccaaattccaaaatgtactcattgtatgcaaagttttggatggatgttatatatactgacagagaagattcagtcacattattccaggattctgaatttgatgcttcagagttcacttcatccatactgaaagtttatgaaaatgcagaatcatgtggatgtcttactgaggatcttgcttgccaatacatatcactttacttgaaactagaaagactggaggaagctaagactctcgcagaaaagctttgtgatggtcctctttcaaatgctgcaaatttgtggagcctgagatttactatggagataaattcaattgcaactgctcctggcagttcttccttgagcaaggagaacctgagctctctgcttgatctatttagcactgtactctccaagttgtctgtaactgaggctgagagactgtggcatatggccatgaagttgttttcccatgataaggtctgtttcgagaagctggtgaagtgtgcgatgctatcattaagtctggcaggtggcagtgattcaggagcatcagtttcttctgctatcgttggatggtatttgcaaagagatggtgtgaagcatgctaggaagatgtataagagattgcttgctttacctcggccaagcctcaagttcatgcaatactgcatagcgctggaggcgaaccttgcatcgctcggagacaacggcgccctcaaagatgctcggcggctatatgattcagcgctcgacctgtatccccaggaaagagaagtgtggcggagctactacgacctggagctgaagatgggaacatcggagtctgccaacgccgtgtactcgcgctctcgtaaggtgctgggtgactccactgccttgactgctccccggggctaggtcgcagcatgcaatgtattccaagatgcaatgtgattttttttgtttggatctgtgttttccaatcctctctgagtctgggtcagcaagcaattaagctgatgcatcgaaattttggctctaaatgggagacctacaatgtgctgctggggaacactgtatatcttgttcaaaaaacaagagtactgcagctgctggtggctgtctcctttgagaacacttgcctgtgtcccttttctttctttttcttttttgtttgagcagtagctgggctgttggtgatgctgttccttagtgttgaggtgctatggtgtaacagtgtcaattgcgacgtgaacaaattctgggatctcgaaccatttgttgagattttgaaagtgtactggtggtcataatttttgttgggacctcgaaccatttttttagattttgatgtgttccttttatttatttattttttgtatggttcatggatgagccacatttgcttttgtgtcagtcttgctgcagattcctggtattaataaat

SEQ ID NO: 220675 - DNA, 2667 bp, Zea Mays
gcggagccagcaccaccaccaccgcggcggcgcgagcgtcactgccctgccctctcctcctcctgtcctactgctctaccgtcctctcccccccgcgccgctgccgcaaccaaaaccctaaaagtcgctttctatccacttgctccgccgcctccaccaccgggcgccatggcggacacagtgcagtaccgcctggagcggatgaccgacgaactggacgacctggagcgccggggcctcttcacgcgcggcgagctagctgacgtcgtccgcaaacgccgcgacttcgagtaccgcctccgccgccactccccgctccgccaggactttctcgactacatcgcctacgagctccgcctcgactccctccgcaacctccgcaagcgcgccatcatacgcgccgccgccgaagacgacgacgacgagcctcagcacgacgctcgcagcagcgacgacgagggaggccggaggaagaggaagaaggataaatccaagaagaagtggaagaagtccgtctccgacgtcgcgggcgtcctccgcgtcctcgacatctaccggatggccaccgtcaggttctggcacaagccattcgcttccatcccaaggttcctgggctttggatctatgcagcagcatgggaattcgatcagaacctgaacgttgccgcggcacgtgcactgatgcagagcggtctcaggtcttgccctcagtcagaggatatgtggatcgagtatcttcgcatggagcttacctaccttaacaagctcaaggctcgaaaggttgctcttggagaggatgtcaagacgctgcaaaagaaagacaacgatgcgagccagtggaaagaggaaaacaaggaactgttcatgccactgaatgaacaggtcaaagatcctaaggagccaggctcggctggagatgccctggaggagaaggaagacctgttttggcgtcaagggttgttaatcattcagaccatatatcatggtgccgtggaagctcttccgtcaagcttaaccttgcggaagaaattcttggagatactaaacagtgttgacttggcacattctgatgagttaaaactggaggtcctggatgaccttaagagagatttctctcatagcgaggactactgggattggtttgctaggcttcagcttagcaacttgaacagttccagtaattcgaatagaaaggatgctatatcaaacaagttgaacagatcaattcaggtgtatgacgaagctatcaggaagctaccaaattccaaaatgtactcattgtatgcaaagttttggatggatgttatatatactgacagagaagattcagtcacattattccaggattctgaatttgatgcttcagagttcacttcatccatactgaaagtttatgaaaatgcagaatcatgtggatgtcttactgaggatcttgcttgccaatacatatcactttacttgaaactagaaagactggaggaagctaagactctcgcagaaaagctttgtgatggtcctctttcaaatgctgcaaatttgtggagcctgagatttactatggagataaattcaattgcaactgctcctggcagttcttccttgagcaaggagaacctgagctctctgcttgatctatttagcactgtactctccaagttgtctgtaactgaggctgagagactgtggcatatggccatgaagttgttttcccatgataaggtctgtttcgagaagctggtgaagtgtgcgatgctatcattaagtctggcaggtggcagtgattcaggagcatcagtttcttctgctatcgttggatggtatttgcaaagagatggtgtgaagcatgctaggaagatgtataagagattgcttgctttacctcggccaagcctcaagttcatgcaatactgcatagcgctggaggcgaaccttgcatcgctcggagacaacggcgccctcaaagatgctcggcggctatatgattcagcgctcgacctgtatccccaggaaagagaagtgtggcggagctactacgacctggagctgaagatgggaacatcggagtctgccaacgccgtgtactcgcgctctcgtaaggtgctgggtgactccactgccttgactgctccccggggctaggtcgcagcatgcaatgtattccaagatgcaatgtgattttttttgtttggatctgtgttttccaatcctctctgagtctgggtcagcaagcaattaagctgatgcatcgaaattttggctctaaatgggagacctacaatgtgctgctggggaacactgtatatcttgttcaaaaaacaagagtactgcagctgctggtggctgtctcctttgagaacacttgcctgtgtcccttttctttctttttcttttttgtttgagcagtagctgggctgttggtgatgctgttccttagtgttgaggtgctatggtgtaacagtgtcaattgcgacgtgaacaaattctgggatctcgaaccatttgttgagattttgaaagtgtactggtggtcataatttttgttgggacctcgaaccatttttttagattttgatgtgttccttttatttatttattttttgtatggttcatggatgagccacatttgcttttgtgtcagtcttgctgcagattcctggtattaataaat

SEQ ID NO: 220676 - DNA, 3082 bp, Zea Mays
ccgcacccgtcgccccaacaaaacctccgagcagatcacgacctccgctagcttcgtcatcccgcttaaccacaccacaccatcctacctttcctcacctctcactctttcagcactctgcttgcctaacgcttgctccccccacctcccactcccagatcgcgccgcggatcctcctcgcgatcgcgtcctgaactcctgatggctaccaggtcggtttcctgatccctcgatcctcaatcagtttcacggcttctcgcttattgatggatgtcgtggagctcgatgcggcgaggcatggatgcaaggtctgcggaaaaagcttcctgtccggccggtcgctcggaggacatatgagatcgcacatctcgctcggcgaggcagcgctggaggttcacgccgccgacgagctgacgcctgtttcgtcgaatggtggccggggctgtgacggactggtcgcgtacgggctgagggagaatcccaggaagactcggcgcctatccgactttgctgacgagaaggatgtcggccatggcgttgagtgcgggaagtcgtggaagtctttgttcggccacatacgcaatcatgcgtccggcgacaggtatcacgacgtcgacgacgacgaggacgtggaagaggatgaattctctgtagaggagggggaagcagaggaagcagaaatggtgaagccgacggaggcgcctgtggcggctctgacggtgctgtcggcgtcccctaggcggaggcgccgatcgatgcgcgtggcggctccgccgccgcgggtgctgagtgggctcgagaaagagactgaagacgtcgcgctctgtctactgatgctctcgcgcgacaccggtatgtgtagctcgccggccaagaacgagactttggagagcgcaaagaagatcaagatcaagatcaagggcggcgtcgccaagaacaggaagcgagcttcccggaagaatcaacacgatcccgtgcccgtggcgccgaagcggacccggtacgagtgtccgggatgccgcaaactgttcagctcgtatcaggcgctcggcggccatcgcgcgagccacaagcgcatgaacgccagctgcagctcccctaagaataagatcactcccgccgcgtcctccgcgccgccggagccaagcaccgagacgtacacgtcgttcaacacgatgtccccctccgcgtcaccggactcggtggccatcggcttcggcaagcccaaggacgacgaggcggtgcccgacgcggagttggagcacaagcggtcgcatctgatgtcctgcgagtccaacggcgtcgatctctactatgtcgccggcgccggcgcagaccatcaggagcagcattcagcagtcgccgacgggttacttgatctcaacttcccaccggctgcagcggaggagacctgaaccaagtttgccgcgaagtgatgaatgtggggctctgtacagattcatccaattcaatttatttttttcccccaagcttaccaagggagtcttgaagcaggagtcgggttttctatcaggatgctgcaaacaggaacatttccagacgatgaatcctacaatttggttgtaggcctgcttatcagacagaacctcgtcgattcatctctgaagtatttggatctgatgcttaaatcgggctacacgttatcactaactgttttcacagattatatccgagcatgtatgagatctgggaggttggacacgttgacatcaattatagagaaatgcaagacaactgataagaacaaagtcttgtgtccggaatggacttggtgcattgacatagcagatgctgcatttgaagctaacaacagcaaattagctctttttgctttggaatatcttgcaagatggattgctcgtggtgagaatgttaaacctcctgttcagctgtcagttaatgaaggtcttgtaatatcagctctgagtgctgctggcagaacttataatactgacctcttgaatgctgcttggtcgctattacggaaatccctgcgccagaaaagggcacccaccccagagacatatcttgccaagatctatgctcattcatcaattggccagcttcaaagggcttttggtacattgcgtgaatttgaaaatgcctatgggaactctgaggacattgatttagagctcttctcaccatttacttctttgcatcctcttgttgttgcttgctgcaaagatggctttagcacattggattcggtgtatggtcagttggagaatctgatacatgctgatccaccgtacaaatctcttgctgctctcaactgtgttgtattggggtgtgcaaacatttgggatattaatcgagcttatgaaacttttgtggctattaaggaaaaatttgacctcactccagacattcattcatacaatgctcttctgtgtgcatttgggaagttgaaacagacaggagaagcatgtaatgtgttccagcatgtattaactcttggtgttaagccaaatgcaacgacatactccttgcttgtcgatgcccatcttgcaaacaaagatccaaaagctgctcttgccataattgatgagatggttgatgctggcttcactccttccaaggataccctcaggaaggttcgaagacggtgctctcgtgaatcagacttcgacagtgacgagaaagtccagtccctggcaaagcagttcaactaccgaatgggtggtgagaaccgtagagagatgctttatagcatagaatacaatcctgtgtactgaaacattgctactgagtttgctagccattgggagagcacagacattgcagcttgtaaattacttggatgtaccaggattcttaagcaaattttcagtttctcgatcatcatttgtgctcgcagggttcgttttaggacttgctaataagatgacactttgagtctgtttggttgtcaggaccagcatatcctggtcaaagcccagatgcaggctgggcatagcctgcatgcattcgtgcaaatcaaaacaactctacttgtttggttgtttgtccacaattaaccaggatcagcagagcctctgtttggtttactgttttgttg

SEQ ID NO: 220677 - DNA, 1718 bp, Zea Mays
atcgtaaggcacctcatcacaaatcctccgattatttctcctcacagagatcgccatgtccgtcgtcggcttcccctcctggagcccttcgccttcctcaggaaccaaggtgccgtttgcttgtcgtcggcttcccctcctggagcccttcgtcttcctcaggaaccaaggatgctgcaaacaggaacatttccagacgatgaatcctacaatttggttgtaggcctgcttatcagacagaacctcgtcgattcatctctgaagtatttggatctgatgcttaaatcgggctacacgttatcactaactgttttcacagattatatccgagcatgtatgagatctgggaggttggacacgttgacatcaattatagagaaatgcaagacaactgataagaacaaagtcttgtgtccggaatggacttggtgcattgacatagcagatgctgcatttgaagctaacaacagcaaattagctctttttgctttggaatatcttgcaagatggattgctcgtggtgagaatgttaaacctcctgttcagctgtcagttaatgaaggtcttgtaatatcagctctgagtgctgctggcagaacttataatactgacctcttgaatgctgcttggtcgctattacggaaatccctgcgccagaaaagggcacccaccccagagacatatcttgccaagatctatgctcattcatcaattggccagcttcaaagggcttttggtacattgcgtgaatttgaaaatgcctatgggaactctgaggacattgatttagagctcttctcaccatttacttctttgcatcctcttgttgttgcttgctgcaaagatggctttagcacattggattcggtgtatggtcagttggagaatctgatacatgctgatccaccgtacaaatctcttgctgctctcaactgtgttgtattggggtgtgcaaacatttgggatattaatcgagcttatgaaacttttgtggctattaaggaaaaatttgacctcactccagacattcattcatacaatgctcttctgtgtgcatttgggaagttgaaacagacaggagaagcatgtaatgtgttccagcatgtattaactcttggtgttaagccaaatgcaacgacatactccttgcttgtcgatgcccatcttgcaaacaaagatccaaaagctgctcttgccataattgatgagatggttgatgctggcttcactccttccaaggataccctcaggaaggttcgaagacggtgctctcgtgaatcagacttcgacagtgacgagaaagtccagtccctggcaaagcagttcaactaccgaatgggtggtgagaaccgtagagagatgctttatagcatagaatacaatcctgtgtactgaaacattgctactgagtttgctagccattgggagagcacagacattgcagcttgtaaattacttggatgtaccaggattcttaagcaaattttcagtttctcgatcatcatttgtgctcgcagggttcgttttaggacttgctaataagatgacactttgagtctgtttggttgtcaggaccagcatatcctggtcaaagcccagatgcaggctgggcatagcctgcatgcattcgtgcaaatcaaaacaactctacttgtttggttgtttgtccacaattaaccaggatcagcagagcctctgtttggtttactgttttgttg

SEQ ID NO: 220678 - DNA, 2717 bp, Zea Mays
agtttttcgtttgggaggagagggagggaaggaaggaatcagattggcgcagatgaggctggagggagaagggaggccagatcagttcaccagtcgacgaagcaagcggcaggaggaggcggactagggagtggttggcgcgtcgccgtcgcgagccagtgagctgcctaggagcgctcctttttagtcgctgcgacgcccgcgcctgcgtaggcgccgtgtgctcctgccggccgcactgagcgtggcgagctctgggccagactcgagcgatcttatcaggtagttcattgtatttcgccattcgtttttccattctttttgacgtccctgtgtgagacgatgctgtttgttcggccccggcgagcggagcggtgggagaggtatacgagatttgtgttgattcccccctcccccacagttttctcgatccatctcgctgaaacttggccgcgggtagatatcgtgtcgtcttgttcagatcgctggtttcccctcgacctcgacgtatattgggatgcttctattccacgcaaccgtgcgatcttgttgctcttggctctgtggccgtggattccatttctgcgtttggggaaagttcttttggctgctcactttgcgctgcacggcagcagtgtgaaggacttggttcttcagctactctagcgctttgatttgcttggggttactaacgattaagtgaatgaatcaagctgcggcatctgggaaagaattgatggcatctgggaaaaaattgatggcactaatcgaatctttctgttcgtgttcatcattaacccagtagattcgtttgtatctaccttctgccagtctactaggactacttagatagtttgattatttctgtataaaactcgtactatcttttatttaacacggaaataaacaatttgcttcttttctattaagaatagtttttcttctaccctattatcttcctgtttatcgctggctgatacgcgatgcactgtgcctttaattctgcttaatctggggaaactgacaacgatttgtaccagaggacacagattatcagctgattgtcacggaagatgtcgctagccaagaaagaagaggtttgcagtcaccgacttgtaccgcgcttggacgagcctgcggttggtgtgcctattaagaagaggccatttttcttgtctgaccgatcggttgcatctgccataccgctctcgacaaagcccccatctccaacgaatacaatgcctgttgctgctacagggtcaggctgccgcgaggaacccttcttcaacatcgctaactcagacagaaaagtcatcaccaaaggtaagggaatccctgacactcagatccaagaccatgtcaacacgtcgcttactgcgctatccatgaccaacggcaacggggtgctatttaatgcatcaagtgagatcccttctattgcagacagtgctacaaggacgtctgcacccgatgatgaattgcaacttcaaaattttttggctctggatttacagttaccatctcgtcaaagtggcaaaaataataactatagctctcttaggaaggatgagaaactgggccagagtcgttcggaacactacaataacgttcctgttgcaaatgaaatcaatgcttctgggaatagtattgttgggagattgcctaacttggatctgaatatacctccggacccagctgattcacttgaaggtttgcctaaaatgcatgaaagtgggagtgggttctatcatcatagaacaattcaacatcagaaagctcaggtgaccccagccgcagccatttctacgataaacagtgggataggtcgaaatatgtgcagtactctgaacatgtctaattcatatgggctttctcataagtctggaccagctgatgttaccttagatttacaacttaaaccaccaactagacctgagctagggataaactggaaaggacttgctcctgctccagaactgagtctctctctatttggtaagcctatggacgagcctgagtttcctagcacccccaatgccttatttcattctggaactgctggaagttccaaaaaggtcagtggggaggctgctgctacacttgggtcagataaggcaccagttgagaagattgtaacacctgttccctgcaatgtaaatcctctgaatactacatcagcaactgtttctggaattgatcagctgccatctaataatttggtgaagaaagaacctgaagaaatatcccagcagcatattattgacggcgctaaaaagccaaatccattagaacgacaaagtgttggacaagttatcggttgtgctgaatctgaaaagacggacagtgcaccccaaggtgctcgtaaaattgggtttgatttgaattctgacatctttgcaaatagtagtatccataatgagtctgatgtagcagcagttgatgccccaataccagctaaaactttacctgatacttgccatgatacgagcatgcctgctgttcctgaagtagacaaatttgtgaagcatgaagaatccacaagtgccaccctcagtcctgttgtggaaacaggaaatggtcatactacactgttggtggaagcaaaatcacagcgttcgcaaggtaatgttgctagccctgctgttgggttatctgaatcctccagccagcccaccgtttctactgtttgcaagccaacagccggccatattcgtgct

SEQ ID NO: 220679 - DNA, 745 bp, Zea Mays
cgcgcgctccctggagcttctctcccagccgccgccaccgcctctatctctcccttccctcttctctctcccctcacatctctcctctctgtcccgaccgagcaacagcggccaagcactcaagtgttccgcgctcggcactttggcttcgggattcctgacctagcgcagccgccaccacagcgctgcccctgtcgcgatagctctgcgtcgccgctcaacggaggccgacgaggtgacgagaagcggaggccgagcagtcgcacttgcaggtccagtcctgctggtccgcagtccacagttcgccctctaccctctgctctgggatctgcagtaccgtctgcttcggcctcagcactgccatccgcttcagcctctgcactaccgtccaagtcaagtcgctgtatcaccttagcccatggacgctccccatgccttgacggcttgacctccgatggagaggaagcaagttcactgtatttgtagactacactacgccatgctttgccaatgaaccagccatcatgttctacaaaattggaggatgaactagccatgatactttgccaatgaaccagccgaagagatctcctctaccttggcagcacgatcaagaatgctgttgtcacggtccctgcctacttcaatgactcacagagacaggcaattaaaaaagagaattgatctttttatgggcgaagtgtcttgttagcatcaagtaagtggcgacatcacaacccctaca

SEQ ID NO: 220680 - DNA, 757 bp, Zea Mays
gcgcgctccctggagcttctctcccagccgccgccaccgcctctatctctcccttccctcttctctctcccctcacatctctcctctctgtcccgaccgagcaacagcggccaagcactcaagtgttccgcgctcggcactttggcttcgggattcctgacctagcgcagccgccaccacagcgctgcccctgtcgcgatagctctgcgtcgccgctcaacggaggccgacgaggtgacgagaagcggaggccgagcagtcgcacttgcaggtccagtcctgctggtccgcagtccacagttcgccctctaccctctgctctgggatctgcagtaccgtctgcttcggcctcagcactgccatccgcttcagcctctgcactaccgtccaagtcaagtcgctgtatcaccttagcccatggacgctccccatgccttgacggcttgacctccgatggagaggaagcaagttgtactgctgtaccagttcactgtatttgtagactacactacgccatgctttgccaatgaaccagccatcatgttctacaaaattggaggatgaactagccatgatactttgccaatgaaccagccgaagagatctcctctaccttggcagcacgatcaagaatgctgttgtcacggtccctgcctacttcaatgactcacagaggcaattaaaaaagagaattgatctttttatgggcgaagtgtcttgttagcatcaagtaagtggcgacatcacaacccctaca

SEQ ID NO: 220681 - DNA, 724 bp, Zea Mays
gcgcgctccctggagcttctctcccagccgccgccaccgcctctatctctcccttccctcttctctctcccctcacatctctcctctctgtcccgaccgagcaacagcggccaagcactcaagtgttccgcgctcggcactttggcttcgggattcctgacctagcgcagccgccaccacagcgctgcccctgtcgcgatagctctgcgtcgccgctcaacggaggccgacgaggtgacgagaagcggaggccgagcagtcgcacttgcaggtccagtcctgctggtccgcagtccacagttcgccctctaccctctgctctgggatctgcagtaccgtctgcttcggcctcagcactgccatccgcttcagcctctgcactaccgtccaagtcaagtcgctgtatcaccttagcccatggacgctccccatgccttgacggcttgacctccgatggagaggaagcaagactacactacgccatgctttgccaatgaaccagccatcatgttctacaaaattggaggatgaactagccatgatactttgccaatgaaccagccgaagagatctcctctaccttggcagcacgatcaagaatgctgttgtcacggtccctgcctacttcaatgactcacagaggcaattaaaaaagagaattgatctttttatgggcgaagtgtcttgttagcatcaagtaagtggcgacatcacaacccctaca

SEQ ID NO: 220682 - DNA, 3808 bp, Zea Mays
cacgatccattttttttcataattaaaacacaatttgtttttctctccctacctaccacaggcacaggcacagcccacccacgggagggaagaaaggagagagaaagagaggagaggcaacacagaaacaagagaagaagaagaagaaggggagatcgagatcgatcacgcaccgggggagcagatccttcgcctcgccatcagggataaggattcatgcgaaatgccacctgaacttggaatgtcttctagaactgttgctggtgctgttgtaaataggaggcctcgccgcctgtttgggagatcatcagagaggaagaacccactcaaccttcagtttgagcgtcaagtagctcgcctcgaggcaaggcagcagcaacagagattgcagaaaaaaatgtttgcaacaaagaattttacggtccacctggaagcaaaatgccattctaatgtttttcctctgccaatccttggtcggttatcctttgttaattaataattgtggtattcacttacttgccaggtgtgttattgtgacagttattcccttcaatttctgttacgacttcaaatcactatcgctcaccgagagtgcaaatgtatctcacagaagatggcaggataattcatcaaggctactggaagataagcccacaacatccaatagcatgtctgattcagatttcttagtcaacagctttaccaagccgagtgataatgcaaggccatcaagaaggaagagcaaaaagaaaagcaagaaacacaggcaacgctgtaggaagccgactgatggatctgaagctaaattcagagagggcaatggtgctgcctctgcagctgatgttggtgattgtgaagattcgacactttcgcctaagcatgttggtgacatacgctttgaggaaacttctcccagttcttctgtcaaggaagcttctgaagaggctcctgagagtgatgatgatgagtaccattgctgctcaggtggttcagtttcgagtgcgtcctactgtgatgagatggaactgtccaaatcaacaacttcgtgccctgcattgtgtggacaatgtcctagcagtaacttacagtatttggacaacactcaaaattctgcaccaacaggtccatctcaagaaacttgctatgctggcagtaaagcgaactgtaaccatgataccaagtccctgtttatattcagaaatgaacgtggatctgatccttgtgaggcaacagagttttgcagctctagcagtggatttgatgagaactggatagagaagtttgactatgatagtggcatttgttcgccaaaaagtgttggtacatatggtggagaccaggctgcccacttgtgcagtgacacaactggtgacaatgatttctgtcttgtaatatctagaaagagggccagaaaggagaagaaaatgtcattgtggaagagttatggagcgcatgcatccacacctgcacttgatcgaaataaaaaatatgttggccattcttcaatgcagatgaccaacgaattcaacagtaacgactggtcccatagacaaaatcatgttagcaggatacaccctcagcatggaaatgcactgaaaagctccaccaaaaatttcatgcagaggccaagcattggttgcagggagactcaatatgggtttccagctaaagaatccaagttaggagcaagtctcaatcattctacaggtccaagagaaaaaacttgtggaaaattaactggcggttttgataagacagcacaacagctttatttggacagagacctatccaatgctcttaacagcagtgaatcaatacgttgtgagacgagatcaatttcctcttctgaaccgacaactccaaagtctttaaaaggcaattatacttcagagtctggtgaatcaacagatattacaataggagctcttcccatgcagaaaagaagattgcaggatttagttcgaactgatgatgccagtgaaactatttctgggcgatcatcaccttgttctgagtcatcgacaactgaattaattgctggacatagtacagattcatctattgaagggaaccatggctgtcaagggctctgtaactctagaacacatctagcccagatgctcagggttgtaaacgatgcctgtaaagttcaggttggtgcagatgttctccttgctgctggttatccaatttctgatcttgagaaatttatatgctctgcaactcccgttattggtcgtgcaccttgcatgataagcaacacttgttcattggaccaagtagttagtgactcagtttgtcagcatgacatctctaatgtttccttgaggagaatatgggagtggtatgaagagccagggtgctatggattggaagtaaaagctcttagcaatctcagctctaaaacatccagcagcagcagttcagagttctttgcatactttgtgccttatctatctgctattcagttgtttgggttgtctaggaataacatgcatcacagttttggtgtgcaagggagggaattactgatatcatcaaatactgcaagctctatgagctctcatcctgtgcatgcaaaagcgcatacactgcttgaggaaagtaatgcatgcttgccagagtcatctttagttgtagaagatcctggagaactcatatttgagtactttgaaacagagcaaccttctctccggcctccattatttgaaaagatcaaggagcttgttagcagtgcaaatgtttctgaccaccgggtttttggggacactgaaaaattgcaaaatgcgaaattgtgtgagcttcatccagcttcctggttctgtgttgcctggtatcctgtttatcgtgtgcctcgtgggaatttccgtgcggcatttcttacttatcattcactggggaagttggttcataaaaaatgctccatggatacgaatgacgggcatacacaagtagtttcaccagttgttggtctccagagttacaacgacaagggagagcagtggtttcagctgagatgcccagatttgaagcaattgccaatagaagattctttaaaaaccagtcctgctgaagttcataaagagaggctgaggacgctgaagatgggtgcattggccatggcaagagctgttgtcccaaagggaagtggggagtcggtgaaccaccatcctgattacgagttcttcctgtctcgttgcgcctaggctaagcggttgtgatatgaaggaagaggggcttttctgcttctagctcctgaatgtagtagtgaccatgaaaatgaaaaaaaaacccagagtagtgactaaccagagaccggctatagatacagtttatcttagagagaggagagcctggggtgatgcatatcactgactgtataggagatagactcgaatattagatactctaacctgattccggattaccaatgcaaaccaagttggtgagctgttgaagtatggcagtacccgcgggatgggtgctttattggggctgggggcaaagatgagaagataccacagatgagatgacgctgcaggtgttcatcttttgtacaaagaccacaccagaggagcagcaagaaatttgctaccagcaagaaatttgttaacacatttgcgaggttgggcttttgttgtggcttgtttgctttgcagacttgcagtgttgctgtttctaatcatgatactgtgctgcttctgtttctaatcatgatattgtacatgaatgtgtcaacgtctggtgctgtgctgctagcaaacgcaagtgaaagcgtgcgagtaattagaggcgtgcaacctcattg

SEQ ID NO: 220683 - DNA, 3692 bp, Zea Mays
gatccattttttttcataattaaaacacaatttgtttttctctccctacctaccacaggcacaggcacagcccacccacgggagggaaggataaggattcatgcgaaatgccacctgaacttggaatgtcttctagaactgttgctggtgctgttgtaaataggaggcctcgccgcctgtttgggagatcatcagagaggaagaacccactcaaccttcagtttgagcgtcaagtagctcgcctcgaggcaaggcagcagcaacagagattgcagaaaaaaatgtttgcaacaaagaattttacggtccacctggaagcaaaatgccattctaatgtttttcctctgccaatccttggtcggttatcctttgttaattaataattgtggtattcacttacttgccaggtgtgttattgtgacagttattcccttcaatttctgttacgacttcaaatcactatcgctcaccgagagtgcaaatgtatctcacagaagatggcaggataattcatcaaggctactggaagataagcccacaacatccaatagcatgtctgattcagatttcttagtcaacagctttaccaagccgagtgataatgcaaggccatcaagaaggaagagcaaaaagaaaagcaagaaacacaggcaacgctgtaggaagccgactgatggatctgaagctaaattcagagagggcaatggtgctgcctctgcagctgatgttggtgattgtgaagattcgacactttcgcctaagcatgttggtgacatacgctttgaggaaacttctcccagttcttctgtcaaggaagcttctgaagaggctcctgagagtgatgatgatgagtaccattgctgctcaggtggttcagtttcgagtgcgtcctactgtgatgagatggaactgtccaaatcaacaacttcgtgccctgcattgtgtggacaatgtcctagcagtaacttacagtatttggacaacactcaaaattctgcaccaacaggtccatctcaagaaacttgctatgctggcagtaaagcgaactgtaaccatgataccaagtccctgtttatattcagaaatgaacgtggatctgatccttgtgaggcaacagagttttgcagctctagcagtggatttgatgagaactggatagagaagtttgactatgatagtggcatttgttcgccaaaaagtgttggtacatatggtggagaccaggctgcccacttgtgcagtgacacaactggtgacaatgatttctgtcttgtaatatctagaaagagggccagaaaggagaagaaaatgtcattgtggaagagttatggagcgcatgcatccacacctgcacttgatcgaaataaaaaatatgttggccattcttcaatgcagatgaccaacgaattcaacagtaacgactggtcccatagacaaaatcatgttagcaggatacaccctcagcatggaaatgcactgaaaagctccaccaaaaatttcatgcagaggccaagcattggttgcagggagactcaatatgggtttccagctaaagaatccaagttaggagcaagtctcaatcattctacaggtccaagagaaaaaacttgtggaaaattaactggcggttttgataagacagcacaacagctttatttggacagagacctatccaatgctcttaacagcagtgaatcaatacgttgtgagacgagatcaatttcctcttctgaaccgacaactccaaagtctttaaaaggcaattatacttcagagtctggtgaatcaacagatattacaataggagctcttcccatgcagaaaagaagattgcaggatttagttcgaactgatgatgccagtgaaactatttctgggcgatcatcaccttgttctgagtcatcgacaactgaattaattgctggacatagtacagattcatctattgaagggaaccatggctgtcaagggctctgtaactctagaacacatctagcccagatgctcagggttgtaaacgatgcctgtaaagttcaggttggtgcagatgttctccttgctgctggttatccaatttctgatcttgagaaatttatatgctctgcaactcccgttattggtcgtgcaccttgcatgataagcaacacttgttcattggaccaagtagttagtgactcagtttgtcagcatgacatctctaatgtttccttgaggagaatatgggagtggtatgaagagccagggtgctatggattggaagtaaaagctcttagcaatctcagctctaaaacatccagcagcagcagttcagagttctttgcatactttgtgccttatctatctgctattcagttgtttgggttgtctaggaataacatgcatcacagttttggtgtgcaagggagggaattactgatatcatcaaatactgcaagctctatgagctctcatcctgtgcatgcaaaagcgcatacactgcttgaggaaagtaatgcatgcttgccagagtcatctttagttgtagaagatcctggagaactcatatttgagtactttgaaacagagcaaccttctctccggcctccattatttgaaaagatcaaggagcttgttagcagtgcaaatgtttctgaccaccgggtttttggggacactgaaaaattgcaaaatgcgaaattgtgtgagcttcatccagcttcctggttctgtgttgcctggtatcctgtttatcgtgtgcctcgtgggaatttccgtgcggcatttcttacttatcattcactggggaagttggttcataaaaaatgctccatggatacgaatgacgggcatacacaagtagtttcaccagttgttggtctccagagttacaacgacaagggagagcagtggtttcagctgagatgcccagatttgaagcaattgccaatagaagattctttaaaaaccagtcctgctgaagttcataaagagaggctgaggacgctgaagatgggtgcattggccatggcaagagctgttgtcccaaagggaagtggggagtcggtgaaccaccatcctgattacgagttcttcctgtctcgttgcgcctaggctaagcggttgtgatatgaaggaagaggggcttttctgcttctagctcctgaatgtagtagtgaccatgaaaatgaaaaaaaaacccagagtagtgactaaccagagaccggctatagatacagtttatcttagagagaggagagcctggggtgatgcatatcactgactgtataggagatagactcgaatattagatactctaacctgattccggattaccaatgcaaaccaagttggtgagctgttgaagtatggcagtacccgcgggatgggtgctttattggggctgggggcaaagatgagaagataccacagatgagatgacgctgcaggtgttcatcttttgtacaaagaccacaccagaggagcagcaagaaatttgctaccagcaagaaatttgttaacacatttgcgaggttgggcttttgttgtggcttgtttgctttgcagacttgcagtgttgctgtttctaatcatgatactgtgctgcttctgtttctaatcatgatattgtacatgaatgtgtcaacgtctggtgctgtgctgctagcaaacgcaagtgaaagcgtgcgagtaattagaggcgtgcaacctcattg

SEQ ID NO: 220684 - DNA, 1547 bp, Zea Mays
attttttttcataattaaaacacaatttgtttttctctccctacctaccacaggcacaggcacagcccacccacgggagggaaggtctctccctctttctcttcgtcttcttcctcctccttttggtttccttttgattgattgatctagtagaacacagaaaggagagagaaagagaggagaggcaacacagaaacaagagaagaagaagaagaaggggagatcgagatcgatcacgcaccgggggagcagatccttcgcctcgccatcagggataaggattcatgcgaaatgccacctgaacttggaatgtcttctagaactgttgctggtgctgttgtaaataggaggcctcgccgcctgtttgggagatcatcagagaggaagaacccactcaaccttcagtttgagcgtcaagtagctcgcctcgaggcaaggcagcagcaacagaggatcaaggagcttgttagcagtgcaaatgtttctgaccaccgggtttttggggacactgaaaaattgcaaaatgcgaaattgtgtgagcttcatccagcttcctggttctgtgttgcctggtatcctgtttatcgtgtgcctcgtgggaatttccgtgcggcatttcttacttatcattcactggggaagttggttcataaaaaatgctccatggatacgaatgacgggcatacacaagtagtttcaccagttgttggtctccagagttacaacgacaagggagagcagtggtttcagctgagatgcccagatttgaagcaattgccaatagaagattctttaaaaaccagtcctgctgaagttcataaagagaggctgaggacgctgaagatgggtgcattggccatggcaagagctgttgtcccaaagggaagtggggagtcggtgaaccaccatcctgattacgagttcttcctgtctcgttgcgcctaggctaagcggttgtgatatgaaggaagaggggcttttctgcttctagctcctgaatgtagtagtgaccatgaaaatgaaaaaaaaacccagagtagtgactaaccagagaccggctatagatacagtttatcttagagagaggagagcctggggtgatgcatatcactgactgtataggagatagactcgaatattagatactctaacctgattccggattaccaatgcaaaccaagttggtgagctgttgaagtatggcagtacccgcgggatgggtgctttattggggctgggggcaaagatgagaagataccacagatgagatgacgctgcaggtgttcatcttttgtacaaagaccacaccagaggagcagcaagaaatttgctaccagcaagaaatttgttaacacatttgcgaggttgggcttttgttgtggcttgtttgctttgcagacttgcagtgttgctgtttctaatcatgatactgtgctgcttctgtttctaatcatgatattgtacatgaatgtgtcaacgtctggtgctgtgctgctagcaaacgcaagtgaaagcgtgcgagtaattagaggcgtgcaacctcattg

SEQ ID NO: 220685 - DNA, 3455 bp, Zea Mays
ggcacaggcacagcccacccacgggagggaaggataaggattcatgcgaaatgccacctgaacttggaatgtcttctagaactgttgctggtgctgttgtaaataggaggcctcgccgcctgtttgggagatcatcagagaggaagaacccactcaaccttcagtttgagcgtcaagtagctcgcctcgaggcaaggcagcagcaacagaggtgtgttattgtgacagttattcccttcaatttctgttacgacttcaaatcactatcgctcaccgagagtgcaagtgaggatccttcatctcgacctacatctccagaagagaaccctgaaacatcgtcctcaccatcgattttgttcctgcaccttaatgctcaagatgtatctcacagaagatggcaggataattcatcaaggctactggaagataagcccacaacatccaatagcatgtctgattcagatttcttagtcaacagctttaccaagccgagtgataatgcaaggccatcaagaaggaagagcaaaaagaaaagcaagaaacacaggcaacgctgtaggaagccgactgatggatctgaagctaaattcagagagggcaatggtgctgcctctgcagctgatgttggtgattgtgaagattcgacactttcgcctaagcatgttggtgacatacgctttgaggaaacttctcccagttcttctgtcaaggaagcttctgaagaggctcctgagagtgatgatgatgagtaccattgctgctcaggtggttcagtttcgagtgcgtcctactgtgatgagatggaactgtccaaatcaacaacttcgtgccctgcattgtgtggacaatgtcctagcagtaacttacagtatttggacaacactcaaaattctgcaccaacaggtccatctcaagaaacttgctatgctggcagtaaagcgaactgtaaccatgataccaagtccctgtttatattcagaaatgaacgtggatctgatccttgtgaggcaacagagttttgcagctctagcagtggatttgatgagaactggatagagaagtttgactatgatagtggcatttgttcgccaaaaagtgttggtacatatggtggagaccaggctgcccacttgtgcagtgacacaactggtgacaatgatttctgtcttgtaatatctagaaagagggccagaaaggagaagaaaatgtcattgtggaagagttatggagcgcatgcatccacacctgcacttgatcgaaataaaaaatatgttggccattcttcaatgcagatgaccaacgaattcaacagtaacgactggtcccatagacaaaatcatgttagcaggatacaccctcagcatggaaatgcactgaaaagctccaccaaaaatttcatgcagaggccaagcattggttgcagggagactcaatatgggtttccagctaaagaatccaagttaggagcaagtctcaatcattctacaggtccaagagaaaaaacttgtggaaaattaactggcggttttgataagacagcacaacagctttatttggacagagacctatccaatgctcttaacagcagtgaatcaatacgttgtgagacgagatcaatttcctcttctgaaccgacaactccaaagtctttaaaaggcaattatacttcagagtctggtgaatcaacagatattacaataggagctcttcccatgcagaaaagaagattgcaggatttagttcgaactgatgatgccagtgaaactatttctgggcgatcatcaccttgttctgagtcatcgacaactgaattaattgctggacatagtacagattcatctattgaagggaaccatggctgtcaagggctctgtaactctagaacacatctagcccagatgctcagggttgtaaacgatgcctgtaaagttcaggttggtgcagatgttctccttgctgctggttatccaatttctgatcttgagaaatttatatgctctgcaactcccgttattggtcgtgcaccttgcatgataagcaacacttgttcattggaccaagtagttagtgactcagtttgtcagcatgacatctctaatgtttccttgaggagaatatgggagtggtatgaagagccagggtgctatggattggaagtaaaagctcttagcaatctcagctctaaaacatccagcagcagcagttcagagttctttgcatactttgtgccttatctatctgctattcagttgtttgggttgtctaggaataacatgcatcacagttttggtgtgcaagggagggaattactgatatcatcaaatactgcaagctctatgagctctcatcctgtgcatgcaaaagcgcatacactgcttgaggaaagtaatgcatgcttgccagagtcatctttagttgtagaagatcctggagaactcatatttgagtactttgaaacagagcaaccttctctccggcctccattatttgaaaagatcaaggagcttgttagcagtgcaaatgtttctgaccaccgggtttttggggacactgaaaaattgcaaaatgcgaaattgtgtgagcttcatccagcttcctggttctgtgttgcctggtatcctgtttatcgtgtgcctcgtgggaatttccgtgcggcatttcttacttatcattcactggggaagttggttcataaaaaatgctccatggatacgaatgacgggcatacacaagtagtttcaccagttgttggtctccagagttacaacgacaagggagagcagtggtttcagctgagatgcccagatttgaagcaattgccaatagaagattctttaaaaaccagtcctgctgaagttcataaagagaggctgaggacgctgaagatgggtgcattggccatggcaagagctgttgtcccaaagggaagtggggagtcggtgaaccaccatcctgattacgagttcttcctgtctcgttgcgcctaggctaagcggttgtgatatgaaggaagaggggcttttctgcttctagctcctgaatgtagtagtgaccatgaaaatgaaaaaaaaacccagagtagtgactaaccagagaccggctatagatacagtttatcttagagagaggagagcctggggtgatgcatatcactgactgtataggagatagactcgaatattagatactctaacctgattccggattaccaatgcaaaccaagttggtgagctgttgaagtatggcagtacccgcgggatgggtgctttattggggctgggggcaaagatgagaagataccacagatgagatgacgctgcaggtgttcatcttttgtacaaagaccacaccagaggagcagcaagaaatttgctaccagcaagaaatttgttaacacatttgcgagcaaacgcaagtgaaagcgtgcgagtaattagaggcgtgcaacctcattg

SEQ ID NO: 220686 - DNA, 2265 bp, Zea Mays
atccattatccatgtagccgccgcgaccgcgagctgcggtacccgatgcacgcatccgaattccgacgcacaacaactctggcaccctgcagtctcgaaccgcgccagcgccaagccggatccccgatcacaacccctacaccacaccacaagtccacaggccacaccgaatcgatctgcaccaacaccaaccgaacacatacatgcacaccaaaagcagtcgcagcatccgatattccgatcccggcaaaaacaattctcccagaaagagattatttcgccccctcaccaatcctgctcccgaaattcctaatcttttaatccgcgtttttcctccgtccgtcccccggcttgcagcagtaatgaagcggaggaggaaaaggagaaaacgaaaaagcgcagggaaaacaacacaccagcacccgcagagagcaggcacacatcaactcatcaagctgagcgatgcgtgtgattgcgagcatgtgagcaggcaggcgggcagggcgaaaatccgaggaggaaaagtccgcgagaatctccggactggcctccccacacatcgtcaaaaatccaatcttgacgcctccctggtcgagccgagactgttccaaagtttctgcctctgtgatgcgtgcgggattgttgccagttggttggttgccgctgctaatgaggcccgcccgcccgatccccgtggtcgccgtctccggttaatcccgcttcagttcttgtaccggttcttggagagagatttttttccgcctctccccccctgtggattgcgccgtgtgtgtttgtctggatcgtgatgggggcgtgggccgattcgccaccaccacaagcacgactcctcttttttattgcctccgcactgggatttgctttcgcgttgttgcagtagctatttccgcgaatcgtcttctagggctccgtgtgttctcgcgcactttaccctctgttttccccattcacccgcaccgaatccacccccttcccggtcgcgtccggccgtcgattgaggccgtgccgccgccgattacgccgcaaaatcgcgtcttgggtttggtgcatgaagaagtggggttgatttcgaggggaggtttttctcctgcttggctgccgtcgggaaggctccggccggccagtcatgtctcaaatccaaagcttctcgaggaacaactgtgcgctcctcgcggtgctgtgtgggaagtatgctgagaaccgcacaccagcagcgaggtctgggctggaggcgaagcggccgcggccggcttacccgttcccggagctcagctcggctgggcgattggaggtccacaccctgttcaatcctacaccagagcagttcctcgaggcgcagcgggtggtgcaacctaacttcttgtacatccagggccagcagctcgaggatgagaaggagattggctcacttgtatggggggacgccgatgtctctgatccgcaggcatttagcactcttatcagcccaccattcccaacaatagtatatctggaagttcctattggtgaaaaacttgctcaagcagttcactcaaaggggatcccatatgtaatatactggagaaattcattctcgtcttatgcagcatctcattttcgccatgcgttgatgtcagcaattcaaagcttgctcatgcatccttccgtctatattgtgtaagaaacaatcatgtgcaaagtgttaagcttggtccgcgtctccttggggatgctccaaaaataaatataagcccacctgagacagaaatggttgatgaagaaggttcatctgaagtgaccccggctataaaaatatatgatgaagaaatcaacatgaaattactcttatgtggagtgccatgcaccttggatccttgtttattgggctctttagaggacggtctgaatgcacttctgaatattgaaattcgtgggagcaaactgcagaatcgaatcagctgcatctctaccacgtgggatggttactatgcgctgtgatatcagtacttgcagttcttcccatgtgtcactcctcgtttctggtagcgcacaaacttgttttgatgaccagcttctagagagccacatcaagaatgaaattattgagaagagccagttagtccgtgctctatcaaatagtgaggacaagttaccatcaagcgagcctttaacttccatgtccacggcttgtggggcttctacctttgaagtttggatgtcccttcctaagtgggcagcacaggtctgtttctgacattgtttgca

SEQ ID NO: 220687 - DNA, 2355 bp, Zea Mays
attttgcacatccattatccatgtagccgccgcgaccgcgagctgcggtacccgatgcacgcatccgaattccgacgcacaacaactctggcaccctgcagtctcgaaccgcgccagcgccaagccggatccccgatcacaacccctacaccacaccacaagtccacaggccacaccgaatcgatctgcaccaacaccaaccgaacacatacatgcacaccaaaagcagtcgcagcatccgatattccgatcccggcaaaaacaattctcccagaaagagattatttcgccccctcaccaatcctgctcccgaaattcctaatcttttaatccgcgtttttcctccgtccgtcccccggcttgcagcagtaatgaagcggaggaggaaaaggagaaaacgaaaaagcgcagggaaaacaacacaccagcacccgcagagagcaggcacacatcaactcatcaagctgagcgatgcgtgtgattgcgagcatgtgagcaggcaggcgggcagggcgaaaatccgaggaggaaaagtccgcgagaatctccggactggcctccccacacatcgtcaaaaatccaatcttgacgcctccctggtcgagccgagactgttccaaagtttctgcctctgtgatgcgtgcgggattgttgccagttggttggttgccgctgctaatgaggcccgcccgcccgatccccgtggtcgccgtctccggttaatcccgcttcagttcttgtaccggttcttggagagagatttttttccgcctctccccccctgtggattgcgccgtgtgtgtttgtctggatcgtgatgggggcgtgggccgattcgccaccaccacaagcacgactcctcttttttattgcctccgcactgggatttgctttcgcgttgttgcagtagctatttccgcgaatcgtcttctagggctccgtgtgttctcgcgcactttaccctctgttttccccattcacccgcaccgaatccacccccttcccggtcgcgtccggccgtcgattgaggccgtgccgccgccgattacgccgcaaaatcgcgtcttgggtttggtgcatgaagaagtggggttgatttcgaggggaggtttttctcctgcttggctgccgtcgggaaggctccggccggccagtcatgtctcaaatccaaagcttctcgaggaacaactgtgcgctcctcgcggtgctgtgtgggaagtatgctgagaaccgcacaccagcagcgaggtctgggctggaggcgaagcggccgcggccggcttacccgttcccggagctcagctcggctgggcgattggaggtccacaccctgttcaatcctacaccagagcagttcctcgaggcgcagcgggtggtgcaacctaacttcttgtacatccagggccagcagctcgaggatgagaaggagattggctcacttgtatggggggacgccgatgtctctgatccgcaggcatttagcactcttatcagcccaccattcccaacaatagtatatctggaagttcctattggtgaaaaacttgctcaagcagttcactcaaaggggatcccatatgtaatatactggagaaattcattctcgtcttatgcagcatctcattttcgccatgcgttgatgtcagcaattcaaagttcagtgagccatacttgggatgcttttcagcttgctcatgcatccttccgtctatattgtgtaagaaacaatcatgtgcaaagtgttaagcttggtccgcgtctccttggggatgctccaaaaataaatataagcccacctgagacagaaatggttgatgaagaaggttcatctgaagtgaccccggctataaaaatatatgatgaagaaatcaacatgaaattactcttatgtggagtgccatgcaccttggatccttgtttattgggctctttagaggacggtctgaatgcacttctgaatattgaagtatgaatgaaagattctagctatgcaattcgtgggagcaaactgcagaatcgaatcagtgcttctccaccacctcttgaagctgcatctctaccacgtgggatggttactatgcgctgtgatatcagtacttgcagttcttcccatgtgtcactcctcgtttctggtagcgcacaaacttgttttgatgaccagcttctagagagccacatcaagaatgaaattattgagaagagccagttagtccgtgctctatcaaatagtgaggacaagttaccatcaagcgagcctttaacttccatgtccacggcttgtggggcttctacctttgaagtttggatgtcccttcctaagtgggcagcacaggtctgtttctgacattgtttgca

SEQ ID NO: 220688 - DNA, 2305 bp, Zea Mays
attttgcacatccattatccatgtagccgccgcgaccgcgagctgcggtacccgatgcacgcatccgaattccgacgcacaacaactctggcaccctgcagtctcgaaccgcgccagcgccaagccggatccccgatcacaacccctacaccacaccacaagtccacaggccacaccgaatcgatctgcaccaacaccaaccgaacacatacatgcacaccaaaagcagtcgcagcatccgatattccgatcccggcaaaaacaattctcccagaaagagattatttcgccccctcaccaatcctgctcccgaaattcctaatcttttaatccgcgtttttcctccgtccgtcccccggcttgcagcagtaatgaagcggaggaggaaaaggagaaaacgaaaaagcgcagggaaaacaacacaccagcacccgcagagagcaggcacacatcaactcatcaagctgagcgatgcgtgtgattgcgagcatgtgagcaggcaggcgggcagggcgaaaatccgaggaggaaaagtccgcgagaatctccggactggcctccccacacatcgtcaaaaatccaatcttgacgcctccctggtcgagccgagactgttccaaagtttctgcctctgtgatgcgtgcgggattgttgccagttggttggttgccgctgctaatgaggcccgcccgcccgatccccgtggtcgccgtctccggttaatcccgcttcagttcttgtaccggttcttggagagagatttttttccgcctctccccccctgtggattgcgccgtgtgtgtttgtctggatcgtgatgggggcgtgggccgattcgccaccaccacaagcacgactcctcttttttattgcctccgcactgggatttgctttcgcgttgttgcagtagctatttccgcgaatcgtcttctagggctccgtgtgttctcgcgcactttaccctctgttttccccattcacccgcaccgaatccacccccttcccggtcgcgtccggccgtcgattgaggccgtgccgccgccgattacgccgcaaaatcgcgtcttgggtttggtgcatgaagaagtggggttgatttcgaggggaggtttttctcctgcttggctgccgtcgggaaggctccggccggccagtcatgtctcaaatccaaagcttctcgaggaacaactgtgcgctcctcgcggtgctgtgtgggaagtatgctgagaaccgcacaccagcagcgaggtctgggctggaggcgaagcggccgcggccggcttacccgttcccggagctcagctcggctgggcgattggaggtccacaccctgttcaatcctacaccagagcagttcctcgaggcgcagcgggtggtgcaacctaacttcttgtacatccagggccagcagctcgaggatgagaaggagattggctcacttgtatggggggacgccgatgtctctgatccgcaggcatttagcactcttatcagcccaccattcccaacaatagtatatctggaagttcctattggtgaaaaacttgctcaagcagttcactcaaaggggatcccatatgtaatatactggagaaattcattctcgtcttatgcagcatctcattttcgccatgcgttgatgtcagcaattcaaagttcagtgagccatacttgggatgcttttcagcttgctcatgcatccttccgtctatattgtgtaagaaacaatcatgtgcaaagtgttaagcttggtccgcgtctccttggggatgctccaaaaataaatataagcccacctgagacagaaatggttgatgaagaaggttcatctgaagtgaccccggctataaaaatatatgatgaagaaatcaacatgaaattactcttatgtggagtgccatgcaccttggatccttgtttattgggctctttagaggacggtctgaatgcacttctgaatattgaaattcgtgggagcaaactgcagaatcgaatcagctgcatctctaccacgtgggatggttactatgcgctgtgatatcagtacttgcagttcttcccatgtgtcactcctcgtttctggtagcgcacaaacttgttttgatgaccagcttctagagagccacatcaagaatgaaattattgagaagagccagttagtccgtgctctatcaaatagtgaggacaagttaccatcaagcgagcctttaacttccatgtccacggcttgtggggcttctacctttgaagtttggatgtcccttcctaagtgggcagcacaggtctgtttctgacattgtttgca

SEQ ID NO: 220689 - DNA, 1886 bp, Zea Mays
atccattatccatgtagccgccgcgaccgcgagctgcggtacccgatgcacgcatccgaattccgacgcacaacaactctggcaccctgcagtctcgaaccgcgccagcgccaagccggatccccgatcacaacccctacaccacaccacaagtccacaggccacaccgaatcgatctgcaccaacaccaaccgaacacatacatgcacaccaaaagcagtcgcagcatccgatattccgatcccggcaaaaacaattctcccagaaagagattatttcgccccctcaccaatcctgctcccgaaattcctaatcttttaatccgcgtttttcctccgtccgtcccccggcttgcagcagtaatgaagcggaggaggaaaaggagaaaacgaaaaagcgcagggaaaacaacacaccagcacccgcagagagcaggcacacatcaactcatcaagctgagcgatgcgtgtgattgcgagcatgtgagcaggcaggcgggcagggcgaaaatccgaggaggaaaagtccgcgagaatctccggactggcctccccacacatcgtcaaaaatccaatcttgacgcctccctggtcgagccgagactgttccaaagtttctgcctctgtgatgcgtgcgggattgttgccagttggttggttgccgctgctaatgaggcccgcccgcccgatccccgtggtcgccgtctccggttaatcccgcttcagttcttgtaccggttcttggagagagatttttttccgcctctccccccctgtggattgcgccgtgtgtgtttgtctggatcgtgatgggggcgtgggccgattcgccaccaccacaagcacgactcctcttttttattgcctccgcactgggatttgctttcgcgttgttgcagtagctatttccgcgaatcgtcttctagggctccgtgtgttctcgcgcactttaccctctgttttccccattcacccgcaccgaatccacccccttcccggtcgcgtccggccgtcgattgaggccgtgccgccgccgattacgccgcaaaatcgcgtcttgggtttggtgcatgaagaagtggggttgatttcgaggggaggtttttctcctgcttggctgccgtcgggaaggctccggccggccagtcatgtctcaaatccaaagcttctcgaggaacaactgtgcgctcctcgcggtgctgtgtgggaagtatgctgagaaccgcacaccagcagcgaggtctgggctggaggcgaagcggccgcggccggcttacccgttcccggagctcagctcggctgggcgattggaggtccacaccctgttcaatcctacaccagagcagttcctcgaggcgcagcgggtggtgcaacctaacttcttgtacatccagggccagcagctcgaggatgagaaggagattggctcacttgtatggggggacgccgatgtctctgatccgcaggtatatctggaagttcctattggtgaaaaacttgctcaagcagttcactcaaaggggatcccatatgtaatatactggagaaattcattctcgtcttatgcagcatctcattttcgccatgcgttgatgtcagcaattcaaagttcagtgagccatacttgggatgcttttcagcttgctcatgcatccttccgtctatattgtgtaagaaacaatcatgtgcaaagtgttaagcttggtccgcgtctccttggggatgctccaaaaataaatataagcccacctgagacagaaatggttgatgaagaaggttcatctgaagtgaccccggctataaaaatatatgatgaagaaatcaacatgaaattactcttatgtggagtgccatgcaccttggatccttgtttattgggctctttag

SEQ ID NO: 220690 - DNA, 1672 bp, Zea Mays
atccattatccatgtagccgccgcgaccgcgagctgcggtacccgatgcacgcatccgaattccgacgcacaacaactctggcaccctgcagtctcgaaccgcgccagcgccaagccggatccccgatcacaacccctacaccacaccacaagtccacaggccacaccgaatcgatctgcaccaacaccaaccgaacacatacatgcacaccaaaagcagtcgcagcatccgatattccgatcccggcaaaaacaattctcccagaaagagattatttcgccccctcaccaatcctgctcccgaaattcctaatcttttaatccgcgtttttcctccgtccgtcccccggcttgcagcagtaatgaagcggaggaggaaaaggagaaaacgaaaaagcgcagggaaaacaacacaccagcacccgcagagagcaggcacacatcaactcatcaagctgagcgatgcgtgtgattgcgagcatgtgagcaggcaggcgggcagggcgaaaatccgaggaggaaaagtccgcgagaatctccggactggcctccccacacatcgtcaaaaatccaatcttgacgcctccctggtcgagccgagactgttccaaagtttctgcctctgtgatgcgtgcgggattgttgccagttggttggttgccgctgctaatgaggcccgcccgcccgatccccgtggtcgccgtctccggttaatcccgcttcagttcttgtaccggttcttggagagagatttttttccgcctctccccccctgtggattgcgccgtgtgtgtttgtctggatcgtgatgggggcgtgggccgattcgccaccaccacaagcacgactcctcttttttattgcctccgcactgggatttgctttcgcgttgttgcagtagctatttccgcgaatcgtcttctagggctccgtgtgttctcgcgcactttaccctctgttttccccattcacccgcaccgaatccacccccttcccggtcgcgtccggccgtcgattgaggccgtgccgccgccgattacgccgcaaaatcgcgtcttgggtttggtgcatgaagaagtggggttgatttcgaggggaggtttttctcctgcttggctgccgtcgggaaggctccggccggccagtcatgtctcaaatccaaagcttctcgaggaacaactgtgcgctcctcgcggtgctgtgtgggaagtatgctgagaaccgcacaccagcagcgaggtctgggctggaggcgaagcggccgcggccggcttacccgttcccggagctcagctcggctgggcgattggaggtccacaccctgttcaatcctacaccagagcagttcctcgaggcgcagcgggtggtgcaacctaacttcttgtacatccagggccagcagctcgaggatgagaaggagattggctcacttgtatggggggacgccgatgtctctgatccgcaggcatttagcactcttatcagcccaccattcccaacaatagtatatctggaagttcctattggtgaaaaacttgctcaagcagttcactcaaaggggatcccatatgtaatatactggagaaattcattctcgtcttatgcagcatctcattttcgccatgcgttgatgtcagcaattcaaaggatccttgtttattgggctctttag

SEQ ID NO: 220691 - DNA, 1275 bp, Zea Mays
atgaggttcacatcctgacttaggttgcagggcagcgatcaagtctccactctccggggatataacggcgatccgaatcgatttactcagctgaggatctctaaccacacgacatatgtagcacttaacccttgcatatgtctaccgttcccacggatcctctactgcatgaacaggtccgcgccacccgagagcgcaccaccccttttaggcggtcctttgccaagagggtacgtgccactctcgccatctctccactcccagtgcgcgattgtcttttcatgtatggaataaccgggttcaagcttaccctgtcccatatccagggcatgtggccagttaagatagtccttgatcatacaggcctacatacgcatccaatccttaattaacctgggtagaacatcacttgttcctagcccaagtcccgatttaagtacttccatccttagaattgtttgtgttccttaggatgaaaagagcacattatagagaactttgcagtaagatcccaccatgctcccaatgaaaatattcttgcaggtagaagccatccttcctcatgataacccctgagctaggcattaatgcaaaagacaacctctatccacaagatctaagcagagctaagcatttttgtaaatcatattttgatacttcaccagaagtatctataaaggtatggatatcaaggtaggcaatgcatccaataatttccaagcaactcctataaacttaatgctcatttcactagacttaaatgtataaaagtctttttaaaaatacaaggaaggggtaaatgcaccggggcttgcctttgttgcagagacggaggtctaaatccctctattaaaccccagttagatggctcccatcacttgatgagcaggcactgaagcagactcctcttcagaaaccacttcttgaattttatcatcttcttctgggaattctaaactttggtgctcacaaggaatcgaccggagaaagcgtgagttgttcggtcaacgcagaggctgttcacggctccggtctgcggtggcacaactccgttctgggtaacaaacttctcgagatactctgaccatggcgaggtggaaggatggttgctgtggcaccagagtaccagacaatggaatggcacttgatgaactgaacaaagccgacgcggaggctaaggagatgaactcaggcttgtacacaccttcacagagatgcccaaggatccaactaaagcttgagacaacagggctccctggacaaacacttaaataa

SEQ ID NO: 220692 - DNA, 2500 bp, Zea Mays
ttttgttcctcgtcgagctcctcgctccgcagccaatcatcctcagccaaaatttctagaacctcgcgcagtcgcccgcaccacgccaatctgctgctgctctcgatggtgcgcctccatcagctcctctctcgcacgcttgcatctcaccaaatcctcgcttctgccacctccagcgtccgctccaccccgcggctgcttctccctctccggttgccgccgcctgctcctcctccccatggccgtactctgcttcccatcatcgtagccgcgtcgcgtcaatacgcctcgtcgaccttcgggaggcgagggcgctcgacgcggccgccgatgttgctgaggcgcaagagagccaggagtccgacgcggaagggccctggcgagctccgcgtgcaaattggcatagaggaggcccttcccgacgaccctggaatcctgagcattgcagaaactcttcggacggatgttgggaaggcagtgaagctggccctcaacgaccttgaaggctcggattacatgaccagagatccttctatatgcaatgtggacaagtatgctagcattgaggtctctgtgttgctttgtgatgatgatttcatcaggaagctcaacaaagaatggagggatgaggatcatgctactgatgttctgtcaatgtctcagcatatcccagagcttgatattcccattctcgacggcaagcagaagaaaggggacacacacttgttgatgagataagaatcctcatggtgcatgggctattgcatttattgggctttgaccatgaagtcagcaaggtggctgaagaagagatggagaaggaagaagaacatattttaaatactcttgaatggagaggaaagggattaattaagagtgcttatgatattgctactgttatggaacatttacaaaattctgttgaggctgatagcaatatagagaaagtgatcctacaagagaaacatcaacccaaactaagccatatcatctgtgatatagatggtactatcatggattatgaaggtggtctgcatgaaaaatcaataggatctttgagagaggcaattgcaacaggagtaaatgttatcatggttactggaaagagtcgggcttccactattagaaccttcaagcttcttgatttccgcgaaaaaggtgattttatttcagagacttcacctggtgtatttttgcagggttcacttatctatggaagggatggcaaaaaagttcatagagcagaattggatttagatgtctgcaaggaggcattgctgtactccttgaagcatagaattcctcttgttgcgtactgtgaggaacaatgtctaacattgtttgaacacccatttgttgaattgttgcacactgtacataatgaaaacaaggtaaaagtgatgcattcaattgaggaccttttggaatattcatctattcagaaattacttctttttgatagtaccaaagaggattcatctgtcctaaggcagcatttttcagaactgagcagagggaaagcacatgttatcaaaatgcattcaaatacaattgatattgttcccctcaatacttcaaaaggtggtggtttaagaattctacttgatcatcttggaataacaaaagattgcgatcttgattctattggagactataccagatggctaagcaataaatgattcaactgacatgattactgggtcgttcttaagaaaaaaatgtggaatcgtaggcgcgccaaaggaacaaaactattgctctgaagcgaggataactcatacaggggaccctcggcgtccagatgcaacgtgctcgaagatgctgaggatggctcagagcgatggccaggtggggaagaagttgcatcatcagacacgttggaagctgatgagcacaaggacccactggacgcgcccgagaaggaattgtaagactcggagctttcgtcacctggtttattgcaaatctccttgtgacacgagggtactccatgaggtgctaagttgtaaggctctgccattcaatgttttgacatcaaagggacgcagcttatgtggatatatataggagaaaaagggagagctatccaagtggttggataagcgtcttgtttagtcggagaaattttgtgaactcacggccggagagcgagtgatagttgcccttactccatgtgatcttgatagattagtacattaatatttcttcatttcttgtgctattttattacttatgaactccgtctcttcgttgttgacatgaagcaagaaatggacatctgtcacttatttggataaatcaatgataacttagctgatggggagcatgcggaacaacgcccttcgggctgagacagacaagcatgttacctccggccaagaaaaagagagttatcccagcggattaggaaggataaggtagattatggcggcaagaaggtgctttctgttagcctggggctcatgcctagggtgttaataatgttaaataagagtgagat

SEQ ID NO: 220693 - DNA, 2578 bp, Zea Mays
gttctataatcacaaaaatctcggttaaacctatcttcccattttgttcctcgtcgagctcctcgctccgcagccaatcatcctcagccaaaatttctagaacctcgcgcagtcgcccgcaccacgccaatctgctgctgctctcgatggtgcgcctccatcagctcctctctcgcacgcttgcatctcaccaaatcctcgcttctgccacctccagcgtccgctccaccccgcggctgcttctccctctccggttgccgccgcctgctcctcctccccatggccgtactctgcttcccatcatcgtagccgcgtcgcgtcaatacgcctcgtcgaccttcgggaggcgagggcgctcgacgcggccgccgatgttgctgaggcgcaagagagccaggagtccgacgcggaagggccctggcgagctccgcgtgcaaattggcatagaggaggcccttcccgacgaccctggaatcctgagcattgcagaaactcttcggacggatgttgggaaggcagtgaagctggccctcaacgaccttgaaggctcggattacatgaccagagatccttctatatgcaatgtggacaagtatgctagcattgaggtctctgtgttgctttgtgatgatgatttcatcaggaagctcaacaaagaatggagggatgaggatcatgctactgatgttctgtcaatgtctcagcatatcccagagcttgatattcccattctgcagttgggtgacatagtaatttctgttgacacagctcgacggcaagcagaagaaaggggacacacacttgttgatgagataagaatcctcatggtgcatgggctattgcatttattgggctttgaccatgaagtcagcaaggtggctgaagaagagatggagaaggaagaagaacatattttaaatactcttgaatggagaggaaagggattaattaagagtgcttatgatattgctactgttatggaacatttacaaaattctgttgaggctgatagcaatatagagaaagtgatcctacaagagaaacatcaacccaaactaagccatatcatctgtgatatagatggtactatcatggattatgaaggtggtctgcatgaaaaatcaataggatctttgagagaggcaattgcaacaggagtaaatgttatcatggttactggaaagagtcgggcttccactattagaaccttcaagcttcttgatttccgcgaaaaaggtgattttatttcagagacttcacctggtgtatttttgcagggttcacttatctatggaagggatggcaaaaaagttcatagagcagaattggatttagatgtctgcaaggaggcattgctgtactccttgaagcatagaattcctcttgttgcgtactgtgaggaacaatgtctaacattgtttgaacacccatttgttgaattgttgcacactgtacataatgaaaacaaggtaaaagtgatgcattcaattgaggaccttttggaatattcatctattcagaaattacttctttttgatagtaccaaagaggattcatctgtcctaaggcagcatttttcagaactgagcagagggaaagcacatgttatcaaaatgcattcaaatacaattgatattgttcccctcaatacttcaaaaggtggtggtttaagaattctacttgatcatcttggaataacaaaagattgcgatcttgattctattggagactataccagatggctaagcaataaatgattcaactgacatgattactgggtcgttcttaagaaaaaaatgtggaatcgtaggcgcgccaaaggaacaaaactattgctctgaagcgaggataactcatacaggggaccctcggcgtccagatgcaacgtgctcgaagatgctgaggatggctcagagcgatggccaggtggggaagaagttgcatcatcagacacgttggaagctgatgagcacaaggacccactggacgcgcccgagaaggaattgtaagactcggagctttcgtcacctggtttattgcaaatctccttgtgacacgagggtactccatgaggtgctaagttgtaaggctctgccattcaatgttttgacatcaaagggacgcagcttatgtggatatatataggagaaaaagggagagctatccaagtggttggataagcgtcttgtttagtcggagaaattttgtgaactcacggccggagagcgagtgatagttgcccttactccatgtgatcttgatagattagtacattaatatttcttcatttcttgtgctattttattacttatgaactccgtctcttcgttgttgacatgaagcaagaaatggacatctgtcacttatttggataaatcaatgataacttagctgatggggagcatgcggaacaacgcccttcgggctgagacagacaagcatgttacctccggccaagaaaaagagagttatcccagcggattaggaaggataaggtagattatggcggcaagaaggtgctttctgttagcctggggctcatgcctagggtgttaataatgttaaataagagtgagat

SEQ ID NO: 220694 - DNA, 439 bp, Zea Mays
aatttcagacgtggacagtgtgatgatgaacttattattgtcaccaacaaaaactcattattcaagctgcaagctaggtatgtggttgagagaatggatggtgatctgtgggataaagttcttcagcctgagaatgaatatagaaggcaactcattgaccaagtggtttccactgcattacctgagagcaagagccctgagcaagtgtctgctgctgttaaggctttcatgactgctgacctgccacatgaactgattgagcttcttgaaaaaattgttcttcaaaattctgctttcagtggaaatttcaatctgcaaaacctgctcatcttgactgctatcaaggcagatccatccagagtcatggattatgtcaacagacttgataactttgatgggcctgctgttggagaagttgctgttgaagcacaactgtatg

SEQ ID NO: 220695 - DNA, 412 bp, Zea Mays
cgccgatgggaatgaatggacacttggatctcaacgcgggaggatcacagctagcagagtgcagactgcagagacggacggggctgaaccttcttcttcttctctgtggacgttcagcgagcctagcggcagatgatgcagaggacgacggcgacgatgatgatgagtatgagcagcggcagcgagatgatgagcacgaactccatctgacgacctccctgcgcgcggatggagctcttgctggatcggagcagcgaggtggggaagagaggaggcgacagagcgcagtgcagtaatggggactgcgatggagctggcggaagagctgggcgagaagatgccagagccgataaagcgaacgcgaaggcgatggccgatgaccgaccggtggggtggtgtgcggctgcggcag

SEQ ID NO: 220696 - DNA, 300 bp, Zea Mays
gctttctgttagcaaagaggttccatggtatctggatgatggaactggacgtgtttatgtggtcggtgctcgttctgcagctggtttaattttaactgttgccagtgaggtttttgaggaatcagggaggacacttgtacgtggaactctagattatttacaaggatgctgggagtaaagcgaactgaaagggttcttccaactggaacctcattgacagttgttggtgaggccattaaagatgatgttggaactattcgaattcagcgaccgcacaaaggacccttttatgcatcatca

SEQ ID NO: 220697 - DNA, 324 bp, Zea Mays
atgctttctgttagcaaagaggttccatggtatctggatgatggaactggacgtgtttatgtggtcggtgctcgttctgcagctggtttaattttaactgttgccagtgaggtttttgaggaatcagggaggacacttgtacgtggaactctagattatttacaaggatgctgggagtaaagcgaactgaaagggttcttccaactggaacctcattgacagttgttggtgaggtattatttctattatccattggccattaaagatgatgttggaactattcgaattcagcgaccgcacaaaggacccttttatgcatcatca

SEQ ID NO: 220698 - DNA, 295 bp, Zea Mays
gatgctttctgttagcaaagaggttccatggtatctggatgatggaactggacgtgtttatgtggtcggtgctcgttctgcagctggtttaattttaactgttgccagtgaggtttttgaggaatcagggaggacacttgtacgtggaactctagattatttacaagggttgaagcgaactgaaagggttcttccaactggaacctcattgacagttgttggtgaggccattaaagatgatgttggaactattcgaattcagcgaccgcacaaaggacccttttatgcatcatca

SEQ ID NO: 220699 - DNA, 291 bp, Zea Mays
attcaagattcggtattgatgctttctgttagcaaagaggttccatggtatctggatgatggaactggacgtgtttatgtggtcggtgctcgttctgcagctggtttaattttaactgttgccagtgaggtttttgaggaatcagggaggacacttatgctgggagtaaagcgaactgaaagggttcttccaactggaacctcattgacagttgttggtgaggccattaaagatgatgttggaactattcgaattcagcgaccgcacaaaggacccttttatgcatcatca

SEQ ID NO: 220700 - DNA, 750 bp, Zea Mays
cacctctcccaatgggcggccacagtttcttcctccgacaattcgtcacgcccatgccgccctcccctccgaccacctaacttcgctccgcccatggccgtcgtcgcccatgccggcctcccacggcctcgcctctttctccctttctccttccacggaagccccatctattcatcatgcctgtcattggctctgccttcggttgctgtagattatgaccatgggaacccatggtgtcgccctgacactcctcacaacggtgcttctcgaggccaccatcccagtgtcagcagtggatggccttgcgtgggtcgtgcaagaagccacgagttcctcatcaagatcaggtagaagcaaggccatgaggaacctgaagcccaacttggagaagtacatgtagttgcacccaaaaggtcaagaacatgtaccactgaaggaacatgaaggatgctatgatgagttcagagaggtctaggccatcatctcccagtcaactaaggttgtcgacgatcgttgtcgtcaatgatgtaattatttagctattttgtatagaacccctatgatataataaagatgtgacattgatttctataccatgcatgagtcatcgtatgtgtgagacttgatcctagcacacatttgagacgcacctggatttgtccttaaatctgggtgtgatagttttgaactagcactgggatgtaaacttgtgtatgcacgttttaggccagatggtgtgctcagtgggtg

SEQ ID NO: 220701 - DNA, 509 bp, Zea Mays
cacctctcccaatgggcggccacagtttcttcctccgacaattcgtcacgcccatgccgccctcccctccgaccacctaacttcgctccgcccatggccgtcgtcgcccatgccggcctcccacggcctcgcctctttctccctttctccttccacggaagccccatctattcatcatgcctgtcattggctctgccttcggttgctgtagattatgaccatgggaacccatggtgtcgccctgacactcctcacaacggtgcttctcgaggccaccatcccagtgtcagcagtggatggccttgcgtgggtcgtgcaagaagccacgagttcctcatcaagatcagatgcaattattggtcttggtgaagcagaggaccgggtaggattgttgggtacacttgccaccttgcctacacactgagaaagtgtccatattaatgaaggcactcctcttgaggatcagaagaggtcaaagcagaggcccttgacggagcagacgtagtgtg

SEQ ID NO: 220702 - DNA, 967 bp, Zea Mays
cacctctcccaatgggcggccacagtttcttcctccgacaattcgtcacgcccatgccgccctcccctccgaccacctaacttcgctccgcccatggccgtcgtcgcccatgccggcctcccacggcctcgcctctttctccctttctccttccacggaagccccatctattcatcatgcctgtcattggctctgccttcggttgctgtagattatgaccatgggaacccatggtgtcgccctgacactcctcacaacggtgcttctcgaggccaccatcccagtgtcagcagtggatggccttgcgtgggtcgtgcaagaagccacgagttcctcatcaagatcagaggaccgggtaggattgttgggtacacttgccaccttgcctacacactgagaaagtgtccatattaatgaaggcactcctcttgaggatcagaagcgagaaacttctcacacttgcaaacaacaactttgacacggaccagacgatgttcaagatccttgggcctaatccccaatgctctaagcttttgctagcaagaagtggtggtgatgctgcttgcaccaataggtctgagctacacatattttatagtctgggatgtttaatattgtagcttttcagctaatccttatatatatactagatgagtgcccgtgcgttgcaacggaaacgtataataatacgataacttatgtacaaatgtgtgttatattattatgagaaaatgtttcggaatccattgtgatcctacccatatataaatttggttatttaatctagctatttcaccattacattgcaaccattagtaacatattgatttctatatatgattttaataatgtcattgagttataatgacagcacaattgagaaagtgttatttataactcaaatatcagaaaaagggtactaagaaagcacagaaataaggtaattaactctatcacaagaaccaag

SEQ ID NO: 220703 - DNA, 1982 bp, Zea Mays
cacaaacaacccatccgctccatctgcgagcaagctctagcgatctagcagcatgcaggccctatgacgctcgccatcctcatccgggagcgtggccatgcctccgcccgcctcttcccccacccccggtgccccttccacacaccccccgcaccgctgtcctgcccctctcccctcgcacacccactcccttctaccatctccatgcttggcgccctcaccacctccccgaccgcctctgagctcatcgccttcccccatagcccgaacgagatatttgcgtccgacccgcccatcgacgtggacgccatcatggagaacgagctacggaagaaggacggcggtgcggatgtggaacatctcagatctgtcactctatctccggcgacctgggtcgggcgaggcacttcttttatgtgatgcctgagtggaacttggtatcctggaacaaaatgttgggcgcgtatgcctgtggcaggatgctcaccgaggcgcgggacctgttcgacgcaatgcttgccaggaacagcgccaccttccgataattattagctcgcctcccctcccattttctcagtacaatctactccatgttgttgctgtatgatcagacaaaattcttctatcaggttcgcccgatgagaagaaaggaaaaaaagtactctgaattctgctttctcacgctcgctgttcatcgattcccgagccgattagcagagagtctgctgtttcttctctctgaatttggatggagagactgagctccgaattcagtttcgacacggacgcgggatgatgaatcagttggtcttttttcttgtgctgctgttgggttttcttagattgaggtggtggcacgcccaaagttcttccttccctcactctgcccaaccacgtagtatctcggttcctttgaattctctctctgtttctagcgttggggccctcggggttggatttatgacctggatggatgaattctctgaattcccccttcctctttggatgtttctaccattggaagaaagccaagctctgttccctttactcctgccccctttttttatgtggttctacttgtgctgtgttgcaattacttattactgcaccccaagtgcgttttcgaccaaggaaatcttacgtcttttcatcttcttacttattactgcaccccaagtggtccactccacatgatggccatgtctgcgttgtttgaggctatattattactcattctaaaggatggtcaaggtggtgatgaaaggaaggtatcagaagtccaaaagcacttagtgcccagccgacagcgatgaggagcatgccgcagggcaccgagcaagcgaaaaaagatgggccagctgtctgtgctcacgaggatgcacatcttctgacgttagttaagcctgacaagcacggggatgaacatcgaatggaggcccctctcttgtcctacaagtgtgaggtcgatgacaaggggttttggacgaaactgaagactctatccactagtttatcaaggagctgatggcaccaccaccatatctacggtagctattttaatccagctgaaggcatctcaaatatgtattcctataataaaacaaccacaattaaactttacatagccaactaagttactaaagagaatctgcattatgtagctgagaacacctaaaaaaagaacagatgatcgacaggtatttgtacaaacaaagaatcagaattcaagatatcaaactcttatatgtgtcagtggtccatgtccaagagaatgttggaaatgttaccatttatcattacatgccaaatacatgtagcccaccaacagtatagtgaatttcagccatagtagttttccccctttggagtaagatcgatcacagtacattaacatgtagctagaggaacttcacacggtgcaactaagttttaggactaaatttccttcttctcatgtttgaggcaaggacattcttcgccga

SEQ ID NO: 220704 - DNA, 2011 bp, Zea Mays
ctcgttcccctcacccagcctttcgcacaaacaacccatccgctccatctgcgagcaagctctagcgatctagcagcatgcaggccctatgacgctcgccatcctcatccgggagcgtggccatgcctccgcccgcctcttcccccacccccggtgccccttccacacaccccccgcaccgctgtcctgcccctctcccctcgcacacccactcccttctaccatctccatgcttggcgccctcaccacctccccgaccgcctctgagctcatcgccttcccccatagcccgaacgagatatttgcgtccgacccgcccatcgacgtggacgccatcatggagaacgagctacggaagaaggacggcggtgcggatgtggaacatctcagatctgtcactctatctccggcgacctgggtcgggcgaggcacttcttttatgtgatgcctgagtggaacttggtatcctggaacaaaatgttgggcgcgtatgcctgtggcaggatgctcaccgaggcgcgggacctgttcgacgcaatgcttgccaggaacagcgccaccttccgataattattagctcgcctcccctcccattttctcagtacaatctactccatgttgttgctgtatgatcagacaaaattcttctatcaggttcgcccgatgagaagaaaggaaaaaaagtactctgaattctgctttctcacgctcgctgttcatcgattcccgagccgattagcagagagtctgctgtttcttctctctgaatttggatggagagactgagctccgaattcagtttcgacacggacgcgggatgatgaatcagttggtcttttttcttgtgctgctgttgggttttcttagattgaggtggtggcacgcccaaagttcttccttccctcactctgcccaaccacgtagtatctcggttcctttgaattctctctctgtttctagcgttggggccctcggggttggatttatgacctggatggatgaattctctgaattcccccttcctctttggatgtttctaccattggaagaaagccaagctctgttccctttactcctgccccctttttttatgtggttctacttgtgctgtgttgcaattacttattactgcaccccaagtgcgttttcgaccaaggaaatcttacgtcttttcatcttcttacttattactgcaccccaagtggtccactccacatgatggccatgtctgcgttgtttgaggctatattattactcattctaaaggatggtcaaggtggtgatgaaaggaaggtatcagaagtccaaaagcacttagtgcccagccgacagcgatgaggagcatgccgcagggcaccgagcaagcgaaaaaagatgggccagctgtctgtgctcacgaggatgcacatcttctgacgttagttaagcctgacaagcacggggatgaacatcgaatggtaggaggcccctctcttgtcctacaagtgtgaggtcgatgacaaggggttttggacgaaactgaagactctatccactagtttatcaaggagctgatggcaccaccaccatatctacggtagctattttaatccagctgaaggcatctcaaatatgtattcctataataaaacaaccacaattaaactttacatagccaactaagttactaaagagaatctgcattatgtagctgagaacacctaaaaaaagaacagatgatcgacaggtatttgtacaaacaaagaatcagaattcaagatatcaaactcttatatgtgtcagtggtccatgtccaagagaatgttggaaatgttaccatttatcattacatgccaaatacatgtagcccaccaacagtatagtgaatttcagccatagtagttttccccctttggagtaagatcgatcacagtacattaacatgtagctagaggaacttcacacggtgcaactaagttttaggactaaatttccttcttctcatgtttgaggcaaggacattcttcgccga

SEQ ID NO: 220705 - DNA, 2034 bp, Zea Mays
ctcgcgcccgccctcgttcccctcacccagcctttcgcacaaacaacccatccgctccatctgcgagcaagctctagcgatctagcagcatgcaggccctatgacgctcgccatcctcatccgggagcgtggccatgcctccgcccgcctcttcccccacccccggtgccccttccacacaccccccgcaccgctgtcctgcccctctcccctcgcacacccactcccttctaccatctccatgcttggcgccctcaccacctccccgaccgcctctgagctcatcgccttcccccatagcccgaacgagatatttgcgtccgacccgcccatcgacgtggacgccatcatggagaacgagctacggaagaaggacggcggtgcggatgtggaacatctcagatctgtcactctatctccggcgacctgggtcgggcgaggcacttcttttatgtgatgcctgagtggaacttggtatcctggaacaaaatgttgggcgcgtatgcctgtggcaggatgctcaccgaggcgcgggacctgttcgacgcaatgcttgccaggaacagcgccaccttccgataattattagctcgcctcccctcccattttctcagtacaatctactccatgttgttgctgtatgatcagacaaaattcttctatcaggttcgcccgatgagaagaaaggaaaaaaagtactctgaattctgctttctcacgctcgctgttcatcgattcccgagccgattagcagagagtctgctgtttcttctctctgaatttggatggagagactgagctccgaattcagtttcgacacggacgcgggatgatgaatcagttggtcttttttcttgtgctgctgttgggttttcttagattgaggtggtggcacgcccaaagttcttccttccctcactctgcccaaccacgtagtatctcggttcctttgaattctctctctgtttctagcgttggggccctcggggttggatttatgacctggatggatgaattctctgaattcccccttcctctttggatgtttctaccattggaagaaagccaagctctgttccctttactcctgccccctttttttatgtggttctacttgtgctgtgttgcaattacttattactgcaccccaagtgcgttttcgaccaaggaaatcttacgtcttttcatcttcttacttattactgcaccccaagtggtccactccacatgatggccatgtctgcgttgtttgaggctatattattactcattctaaaggatggtcaaggtggtgatgaaaggaaggtatcagaagtccaaaagcacttagtgcccagccgacagcgatgaggagcatgccgcagggcaccgagcaagcgaaaaaagatgggccagctgtctgtgctcacgaggatgcacatcttctgacgttagttaagcctgacaagcacggggatgaacatcgaatggtaggaggcccctctcttgtcctacaagtgtgaggtcgatgacaaggggttttggacgaaactgaagactctatccactagtttatcaaggagctgatggcaccaccaccatatctacggtatgtttcaggtagctattttaatccagctgaaggcatctcaaatatgtattcctataataaaacaaccacaattaaactttacatagccaactaagttactaaagagaatctgcattatgtagctgagaacacctaaaaaaagaacagatgatcgacaggtatttgtacaaacaaagaatcagaattcaagatatcaaactcttatatgtgtcagtggtccatgtccaagagaatgttggaaatgttaccatttatcattacatgccaaatacatgtagcccaccaacagtatagtgaatttcagccatagtagttttccccctttggagtaagatcgatcacagtacattaacatgtagctagaggaacttcacacggtgcaactaagttttaggactaaatttccttcttctcatgtttgaggcaaggacattcttcgccga

SEQ ID NO: 220706 - DNA, 1201 bp, Zea Mays
ctcagtcgaggtcaagttgtcttttttactgtaatagattggtgagggtgaaaaacttgttcgggcactttttggtgtggccagttgtcgtcaacctgctgtcatatttgtggatgagatagactcattattatctcagcgcaaatcagatggtgaacatgaatcaagcaggagactgaaaacacagtttctaattgagatggaaggttttgacaccggaaatgaacagatcttacttataggagcaacaaacagaccccaggaactggatgaagcagcgcgcaggcgactcacgaaacgtctatacatcccccttccttcattaggctactcaggatctgacatgaaaaacttggtgaaagatgcctcaatgggaccactaagagaggctcttcagacgggcgttgaaatcgcaaagctcagcaaggaggatatgcggccagtgatgctgaaggatttcgagaatgctatgcgggaggtaagaccttctgtttcctcaagcgagctggggacttatgaagaatggaacaggcagtttgggagcctatcgatctagtctgtcggcaggcatcaacgaatacaatcatgtcggcactatagaaaaaggagctcaacgattttagccggaacatgacatgcataacacagctctacagtttaacaatcttttgaagcatcaaaatttgaactgtctatttggagtgctgagtaatatccaggagcctacatatcaaatagtttcaattgtttttaaatcttcacttttctgtaaatttgtttgccttggttttgattgacatatgactagcgcggaagtcaaatactccgttccaaattataaaatgttttagcttttccgcatacagttttttagatgaataaaaaaattaatgtatctataaaaagcaatatgtaaagagatggtacaacattgacaacaaagaagaagatttgtgggtccaactcagacctagaccgtcttcatgggtagtgtaaaatagagaatgcggaactgtagatgatattgtttgatactgtttgtaaagtaaagtttgtttgatactgtttgtaaagtaaagtttgatatataggatgagataggagattggataatagatctgctagagataaccttctcatgctctcgaggatcgaaatagataatgttccatgggatcgaaatagataacgaagaggactc

SEQ ID NO: 220707 - DNA, 1368 bp, Zea Mays
cttctttggagtctggctggggctagaggaatttctcatctcactctagtgccaagtgcaaactagggctcctcagtcgaggtcaagttgtcttttttactgtaatagattggtgagggtgaaaaacttgttcgggcactttttggtgtggccagttgtcgtcaacctgctgtcatatttgtggatgagatagactcattattatctcagcgcaaatcagatggtgaacatgaatcaagcaggagactgaaaacacagtttctaattgagatggaaggttttgacaccggaaatgaacagatcttacttataggagcaacaaacagaccccaggaactggatgaagcagcgcgcaggcgactcacgaaacgtctatacatcccccttccttcattagaagcacgggcttggataattcgcaatctattggagaaagatggacttttcatgctctcggaagaagaaacaagtgccatctgtaaattaactgaaggctactcaggatctgacatgaaaaacttggtgaaagatgcctcaatgggaccactaagagaggctcttcagacgggcgttgaaatcgcaaagctcagcaaggaggatatgcggccagtgatgctgaaggatttcgagaatgctatgcgggaggtaagaccttctgtttcctcaagcgagctggggacttatgaagaatggaacaggcagtttgggagcctatcgatctagtctgtcggcaggcatcaacgaatacaatcatgtcggcactatagaaaaaggagctcaacgattttagccggaacatgacatgcataacacagctctacagtttaacaatcttttgaagcatcaaaatttgaactgtctatttggagtgctgagtaatatccaggagcctacatatcaaatagtttcaattgtttttaaatcttcacttttctgtaaatttgtttgccttggttttgattgacatatgactagcgcggaagtcaaatactccgttccaaattataaaatgttttagcttttccgcatacagttttttagatgaataaaaaaattaatgtatctataaaaagcaatatgtaaagagatggtacaacattgacaacaaagaagaagatttgtgggtccaactcagacctagaccgtcttcatgggtagtgtaaaatagagaatgcggaactgtagatgatattgtttgatactgtttgtaaagtaaagtttgtttgatactgtttgtaaagtaaagtttgatatataggatgagataggagattggataatagatctgctagagataaccttctcatgctctcgaggatcgaaatagataatgttccatgggatcgaaatagataacgaagaggactc

SEQ ID NO: 220708 - DNA, 1912 bp, Zea Mays
cggtgaattgtgaagtggtcaggacgcgaagaacgcggacatcgccgacaaccacacgagcgcgggcgaaatgaaggggttggatgttgtgcaaaagccagcacaaaatggtccacaaggtgcttctgtatcaccacaatgtgataacaactatagtacacggaattatggcgtgagaccaagttggaattctcgtcgtggaccacgtggtagttttataccccctatcagaaacaatggaggatcaggtacaacgatctcacgggtcactggtaaaaatgacgagtccatggaagattcaacaaggaaatgtattgaaatgctttgtgctcctgatggtgagcttcctgagaagctgaggaatctagaacctcgccttattgaacatgtcagtaatgaaataatggatagggatcctaatgtccgctggaatgacatagctggtttggaacatgcaaagaagtgtgtgacagagatggtgatatggccactgctacgtcctgatatattccgtggttgtcggtctcctggaagaggtctactgttgtttggacctcctggaacaggcaaaaccatgattggaaaggcaatagctggtgaagccaaggcaacatttttctacatatctgctagttcactaacaagcaaatggattggtgagggtgaaaaacttgttcgggcactttttggtgtggccagttgtcgtcaacctgctgtcatatttgtggatgagatagactcattattatctcagcgcaaatcagatggtgaacatgaatcaagcaggagactgaaaacacagtttctaattgagatggaaggttttgacaccggaaatgaacagatcttacttataggagcaacaaacagaccccaggaactggatgaagcagcgcgcaggcgactcacgaaacgtctatacatcccccttccttcattagaagcacgggcttggataattcgcaatctattggagaaagatggacttttcatgctctcggaagaagaaacaagtgccatctgtaaattaactgaaggctactcaggatctgacatgaaaaacttggtgaaagatgcctcaatgggaccactaagagaggctcttcagacgggcgttgaaatcgcaaagctcagcaaggaggatatgcggccagtgatgctgaaggatttcgagaatgctatgcgggaggtaagaccttctgtttcctcaagcgagctggggacttatgaagaatggaacaggcagtttgggagcctatcgatctagtctgtcggcaggcatcaacgaatacaatcatgtcggcactatagaaaaaggagctcaacgattttagccggaacatgacatgcataacacagctctacagtttaacaatcttttgaagcatcaaaatttgaactgtctatttggagtgctgagtaatatccaggagcctacatatcaaatagtttcaattgtttttaaatcttcacttttctgtaaatttgtttgccttggttttgattgacatatgactagcgcggaagtcaaatactccgttccaaattataaaatgttttagcttttccgcatacagttttttagatgaataaaaaaattaatgtatctataaaaagcaatatgtaaagagatggtacaacattgacaacaaagaagaagatttgtgggtccaactcagacctagaccgtcttcatgggtagtgtaaaatagagaatgcggaactgtagatgatattgtttgatactgtttgtaaagtaaagtttgtttgatactgtttgtaaagtaaagtttgatatataggatgagataggagattggataatagatctgctagagataaccttctcatgctctcgaggatcgaaatagataatgttccatgggatcgaaatagataacgaagaggactc

SEQ ID NO: 220709 - DNA, 4946 bp, Zea Mays
catgggtgctgcggacggcgccaccaacgtgtgcttggtaggcggcgatggcgacaactgcaagtacggcaccagcctgcagcgcatctcagatctcggatttttttgccatcaatcagcaagcgcggcaggagggagcagagccggagatggggcggtgctggtgctgctgccggtacctaaagctgctatgcttggttctcctcccaccgctcaacttatgcctgcaccacagctgctgctccaatctgtccccattctcaccgccgaagattcgctccattttctatggcacctagagttggccttcaggggaagaccgctccacaggccaagaagtcgtggggttccgagattgccagtagcggtggccggagctcctccgatgtttccacgccatatgctacgacgtcttgtgcttccacgccggatgccacaatagacaagcatattaagactgtcatgtctctcaatctctgcccatacttgaagccaatctggctgatcacaaaagacagtcatcaccctttaccgcacgtagcagcccagtattcgagattaaatcctgaatttgattgttaaaagatatcatcatatcaacgaagctaggccacaagactagcctgatacactgtgatgcctgcaccacttaaggtactactttcctgaagaaagtcaatttgctgacaatgcaatgaccattcccttgcctattcacatggagaaacttgatgttcatatagaaataaatatttctagacacttcaagtaataaaaatacaaaacaacttaagactacgtatgaatggctcaaaataatcattagtcacaaagctgaaaatacaccgtgacctaacttttttaattgtggtctcacagtttgatgtatatagtgcaaaatttctttcaatctttgcttacttcaacttctttctataaagtggacataatctaactttccaggcacatgccctagaagatgagatcttttcttcattgcatgaattcttgagaacctttatttgaattctagtgttaatttcttttcaattgattttctccctgctgatatacatgcttataaagaaaaataaaattatttctttttcacttatatatgtttaaccttttcatgagagcagctttatatattcacgatttcttgttgggttgccaacgttatgtttatattgaccaactttattaggacactgcattctggtatttggcacttaacagttccactttgcaggaagaaaggttcagattgtgagacaaaggatatatgtaccatatcactgctcctctatcaagcatcagttctcattatgtatatagttttaccattatgacatccattttccttatcaaatgaatatccattttatccctaggaagaatgggataactgttagtattaattaggtatgtgatattcgtgaaaggcactgtgactttactacatgaatatgctcaaatcactttaatataaaacccttcatataacacatggtaacagaactgttacttatatttcctctaaccattctagacgatttaccctacaatctttcagttccttcattaatacttttcttttcaattcatgcctgtgttcttatacaacacacaaatgactacttatgttttatagctccgtctagtttagaatcgtagaatttcctgcccgtgcaagcattagattgttttttggattggttaactaacagttatcgataattatttgttgtagtcactgttgttttcttttttcctttttttacttgattcaaggactgctagtggccgaagggcactgcctcctccttttgcttttacgtgctgcaagaccattgttatgtatttcatgtttattattacttcgaatacggctagaatacaatgttttaacaaggtatggtgatggattactctcggttgttgattaatcttgtagcacgtcctttactaaatattgtgtttaaatggcgaaggatgatggagatacaatgaacacgaaagtcattattatttttagccttggcgctatatgtttgttagcagaggttacatgattcttctttcggaataggcggaaaaatgagagccttcactgttgtttatttagtagaggttgagatcgtatttcaaattattaagaacactattgttttagattctttcacatattcatacgtttgaaaaaaaaccgcattctccatgatgttttggtcatagagaatgtaataaaagtccattaaatagcattgatactcccatactatagtattttcctttgtgttgaggattaatgcaaccacagtgttgtggtttgaacactaatcgagaaggcctctttactgttgtctaggtcagttataactttcatatatgtgcttccatacactttaatgttagtagtacaattgctgttagcagattaaaaacttagttaaacatatgcgtactcacatatttattatttctctttacatcaaggattcccatggacatgtggttgtccattacacagatgttgatacaaatgttcagctcctttttaggtaccgttgctcatgttgcagcccgaggttgtagctacacaggaacacaaattcagcttttgagcttgcaagaacggatgttggctgtgtttttgcaaatcagggtgacaataatgttgaaagaatccagcgttcgaagtatttccaagctcttcttcagaagtctaaagcaaatgtttctgaacaacggaatgcaacatgtcaagagttctcagttcaatgggctccatgcgtcgatgaaagccaagctgaaatggaaaatgagaagctaagcatcagggcttcaaagttaatgatgcaaacgaagttgacatcattgtatagcagtaagtccttgaagacaaatggcgtacccaacaaaaatatgttcaaatcagagaactcatctaaagtgtgtgccggtgttgaaaatagaacaagtcaaaatagtaacaggcggcatgcttacctggacgttgaggaggatgagaaatcccatgggcaattgcagaatgcaaagtggaaacatacagggttcagaagtcctatatttgaggttgcaaattctccatcaagtaatgatgaagctgatgctcctgccaatgagtttacgactgccaagagaatgatggggttggatgttgtgcaaaagccagcacaaaatggtccacaaggtgcttctgtatcaccacaatgtgataacaactatagtacacggaattatggcgtgagaccaagttggaattctcgtcgtggaccacgtggtagttttataccccctatcagaaacaatggaggatcagtattgaaatgctttgtgctcctgatggtgagcttcctgagaagctgaggaatctagaacctcgccttattgaacatgtcagtaatgaaataatggatagggatcctaatgtccgctggaatgacatagctggtttggaacatgcaaagaagtgtgtgacagagatggtgatatggccactgctacgtcctgatatattccgtggttgtcggtctcctggaagaggtctactgttgtttggacctcctggaacaggcaaaaccatgattggaaaggcaatagctggtgaagccaaggcaacatttttctacatatctgctagttcactaacaagcaaatggattggtgagggtgaaaaacttgttcgggcactttttggtgtggccagttgtcgtcaacctgctgtcatatttgtggatgagatagactcattattatctcagcgcaaatcagatggtgaacatgaatcaagcaggagactgaaaacacagtttctaattgagatggaaggttttgacaccggaaatgaacagatcttacttataggagcaacaaacagaccccaggaactggatgaagcagcgcgcaggcgactcacgaaacgtctatacatcccccttccttcattagaagcacgggcttggataattcgcaatctattggagaaagatggacttttcatgctctcggaagaagaaacaagtgccatctgtaaattaactgaaggctactcaggatctgacatgaaaaacttggtgaaagatgcctcaatgggaccactaagagaggctcttcagacgggcgttgaaatcgcaaagctcagcaaggaggatatgcggccagtgatgctgaaggatttcgagaatgctatgcgggaggtaagaccttctgtttcctcaagcgagctggggacttatgaagaatggaacaggcagtttgggagcctatcgatctagtctgtcggcaggcatcaacgaatacaatcatgtcggcactatagaaaaaggagctcaacgattttagccggaacatgacatgcataacacagctctacagtttaacaatcttttgaagcatcaaaatttgaactgtctatttggagtgctgagtaatatccaggagcctacatatcaaatagtttcaattgtttttaaatcttcacttttctgtaaatttgtttgccttggttttgattgacatatgactagcgcggaagtcaaatactccgttccaaattataaaatgttttagcttttccgcatacagttttttagatgaataaaaaaattaatgtatctataaaaagcaatatgtaaagagatggtacaacattgacaacaaagaagaagatttgtgggtccaactcagacctagaccgtcttcatgggtagtgtaaaatagagaatgcggaactgtagatgatattgtttgatactgtttgtaaagtaaagtttgtttgatactgtttgtaaagtaaagtttgatatataggatgagataggagattggataatagatctgctagagataaccttctcatgctctcgaggatcgaaatagataatgttccatgggatcgaaatagataacgaagaggactc

SEQ ID NO: 220710 - DNA, 5001 bp, Zea Mays
cgatgcggcatcatgggtgctgcggacggcgccaccaacgtgtgcttggtaggcggcgatggcgacaactgcaagtacggcaccagcctgcagcgcatctcagatctcggatttttttgccatcaatcagcaagcgcggcaggagggagcagagccggagatggggcggtgctggtgctgctgccggtacctaaagctgctatgcttggttctcctcccaccgctcaacttatgcctgcaccacagctgctgctccaatctgtccccattctcaccgccgaagattcgctccattttctatggcacctagagttggccttcaggggaagaccgctccacaggccaagaagtcgtggggttccgagattgccagtagcggtggccggagctcctccgatgtttccacgccatatgctacgacgtcttgtgcttccacgccggatgccacaatagacaagcatattaagactgtcatgtctctcaatctctgcccatacttgaagccaatctggctgatcacaaaagacagtcatcaccctttaccgcacgtagcagcccagtattcgagattaaatcctgaatttgattgttaaaagatatcatcatatcaacgaagctaggccacaagactagcctgatacactgtgatgcctgcaccacttaaggtactactttcctgaagaaagtcaatttgctgacaatgcaatgaccattcccttgcctattcacatggagaaacttgatgttcatatagaaataaatatttctagacacttcaagtaataaaaatacaaaacaacttaagactacgtatgaatggctcaaaataatcattagtcacaaagctgaaaatacaccgtgacctaacttttttaattgtggtctcacagtttgatgtatatagtgcaaaatttctttcaatctttgcttacttcaacttctttctataaagtggacataatctaactttccaggcacatgccctagaagatgagatcttttcttcattgcatgaattcttgagaacctttatttgaattctagtgttaatttcttttcaattgattttctccctgctgatatacatgcttataaagaaaaataaaattatttctttttcacttatatatgtttaaccttttcatgagagcagctttatatattcacgatttcttgttgggttgccaacgttatgtttatattgaccaactttattaggacactgcattctggtatttggcacttaacagttccactttgcaggaagaaaggttcagattgtgagacaaaggatatatgtaccatatcactgctcctctatcaagcatcagttctcattatgtatatagttttaccattatgacatccattttccttatcaaatgaatatccattttatccctaggaagaatgggataactgttagtattaattaggtatgtgatattcgtgaaaggcactgtgactttactacatgaatatgctcaaatcactttaatataaaacccttcatataacacatggtaacagaactgttacttatatttcctctaaccattctagacgatttaccctacaatctttcagttccttcattaatacttttcttttcaattcatgcctgtgttcttatacaacacacaaatgactacttatgttttatagctccgtctagtttagaatcgtagaatttcctgcccgtgcaagcattagattgttttttggattggttaactaacagttatcgataattatttgttgtagtcactgttgttttcttttttcctttttttacttgattcaaggactgctagtggccgaagggcactgcctcctccttttgcttttacgtgctgcaagaccattgttatgtatttcatgtttattattacttcgaatacggctagaatacaatgttttaacaaggtatggtgatggattactctcggttgttgattaatcttgtagcacgtcctttactaaatattgtgtttaaatggcgaaggatgatggagatacaatgaacacgaaagtcattattatttttagccttggcgctatatgtttgttagcagaggttacatgattcttctttcggaataggcggaaaaatgagagccttcactgttgtttatttagtagaggttgagatcgtatttcaaattattaagaacactattgttttagattctttcacatattcatacgtttgaaaaaaaaccgcattctccatgatgttttggtcatagagaatgtaataaaagtccattaaatagcattgatactcccatactatagtattttcctttgtgttgaggattaatgcaaccacagtgttgtggtttgaacactaatcgagaaggcctctttactgttgtctaggtcagttataactttcatatatgtgcttccatacactttaatgttagtagtacaattgctgttagcagattaaaaacttagttaaacatatgcgtactcacatatttattatttctctttacatcaaggattcccatggacatgtggttgtccattacacagatgttgatacaaatgttcagctcctttttaggtaccgttgctcatgttgcagcccgaggttgtagctacacaggaacacaaattcagcttttgagcttgcaagaacggatgttggctgtgtttttgcaaatcagggtgacaataatgttgaaagaatccagcgttcgaagtatttccaagctcttcttcagaagtctaaagcaaatgtttctgaacaacggaatgcaacatgtcaagagttctcagttcaatgggctccatgcgtcgatgaaagccaagctgaaatggaaaatgagaagctaagcatcagggcttcaaagttaatgatgcaaacgaagttgacatcattgtatagcagtaagtccttgaagacaaatggcgtacccaacaaaaatatgttcaaatcagagaactcatctaaagtgtgtgccggtgttgaaaatagaacaagtcaaaatagtaacaggcggcatgcttacctggacgttgaggaggatgagaaatcccatgggcaattgcagaatgcaaagtggaaacatacagggttcagaagtcctatatttgaggttgcaaattctccatcaagtaatgatgaagctgatgctcctgccaatgagtttacgactgccaagagaatgatggggttggatgttgtgcaaaagccagcacaaaatggtccacaaggtgcttctgtatcaccacaatgtgataacaactatagtacacggaattatggcgtgagaccaagttggaattctcgtcgtggaccacgtggtagttttataccccctatcagaaacaatggaggatcaggtacaacgatctcacgggtcactggtaaaaatgacgagtccatggaagattcaacaaggaaatgtattgaaatgctttgtgctcctgatggtgagcttcctgagaagctgaggaatctagaacctcgccttattgaacatgtcagtaatgaaataatggatagggatcctaatgtccgctggaatgacatagaagtgtgtgacagagatggtgatatggccactgctacgtcctgatatattccgtggttgtcggtctcctggaagaggtctactgttgtttggacctcctggaacaggcaaaaccatgattggaaaggcaatagctggtgaagccaaggcaacatttttctacatatctgctagttcactaacaagcaaatggattggtgagggtgaaaaacttgttcgggcactttttggtgtggccagttgtcgtcaacctgctgtcatatttgtggatgagatagactcattattatctcagcgcaaatcagatggtgaacatgaatcaagcaggagactgaaaacacagtttctaattgagatggaaggttttgacaccggaaatgaacagatcttacttataggagcaacaaacagaccccaggaactggatgaagcagcgcgcaggcgactcacgaaacgtctatacatcccccttccttcattagaagcacgggcttggataattcgcaatctattggagaaagatggacttttcatgctctcggaagaagaaacaagtgccatctgtaaattaactgaaggctactcaggatctgacatgaaaaacttggtgaaagatgcctcaatgggaccactaagagaggctcttcagacgggcgttgaaatcgcaaagctcagcaaggaggatatgcggccagtgatgctgaaggatttcgagaatgctatgcgggaggtaagaccttctgtttcctcaagcgagctggggacttatgaagaatggaacaggcagtttgggagcctatcgatctagtctgtcggcaggcatcaacgaatacaatcatgtcggcactatagaaaaaggagctcaacgattttagccggaacatgacatgcataacacagctctacagtttaacaatcttttgaagcatcaaaatttgaactgtctatttggagtgctgagtaatatccaggagcctacatatcaaatagtttcaattgtttttaaatcttcacttttctgtaaatttgtttgccttggttttgattgacatatgactagcgcggaagtcaaatactccgttccaaattataaaatgttttagcttttccgcatacagttttttagatgaataaaaaaattaatgtatctataaaaagcaatatgtaaagagatggtacaacattgacaacaaagaagaagatttgtgggtccaactcagacctagaccgtcttcatgggtagtgtaaaatagagaatgcggaactgtagatgatattgtttgatactgtttgtaaagtaaagtttgtttgatactgtttgtaaagtaaagtttgatatataggatgagataggagattggataatagatctgctagagataaccttctcatgctctcgaggatcgaaatagataatgttccatgggatcgaaatagataacgaagaggactc

SEQ ID NO: 220711 - DNA, 5027 bp, Zea Mays
ccgatgcggcatcatgggtgctgcggacggcgccaccaacgtgtgcttggtaggcggcgatggcgacaactgcaagtacggcaccagcctgcagcgcatctcagatctcggatttttttgccatcaatcagcaagcgcggcaggagggagcagagccggagatggggcggtgctggtgctgctgccggtacctaaagctgctatgcttggttctcctcccaccgctcaacttatgcctgcaccacagctgctgctccaatctgtccccattctcaccgccgaagattcgctccattttctatggcacctagagttggccttcaggggaagaccgctccacaggccaagaagtcgtggggttccgagattgccagtagcggtggccggagctcctccgatgtttccacgccatatgctacgacgtcttgtgcttccacgccggatgccacaatagacaagcatattaagactgtcatgtctctcaatctctgcccatacttgaagccaatctggctgatcacaaaagacagtcatcaccctttaccgcacgtagcagcccagtattcgagattaaatcctgaatttgattgttaaaagatatcatcatatcaacgaagctaggccacaagactagcctgatacactgtgatgcctgcaccacttaaggtactactttcctgaagaaagtcaatttgctgacaatgcaatgaccattcccttgcctattcacatggagaaacttgatgttcatatagaaataaatatttctagacacttcaagtaataaaaatacaaaacaacttaagactacgtatgaatggctcaaaataatcattagtcacaaagctgaaaatacaccgtgacctaacttttttaattgtggtctcacagtttgatgtatatagtgcaaaatttctttcaatctttgcttacttcaacttctttctataaagtggacataatctaactttccaggcacatgccctagaagatgagatcttttcttcattgcatgaattcttgagaacctttatttgaattctagtgttaatttcttttcaattgattttctccctgctgatatacatgcttataaagaaaaataaaattatttctttttcacttatatatgtttaaccttttcatgagagcagctttatatattcacgatttcttgttgggttgccaacgttatgtttatattgaccaactttattaggacactgcattctggtatttggcacttaacagttccactttgcaggaagaaaggttcagattgtgagacaaaggatatatgtaccatatcactgctcctctatcaagcatcagttctcattatgtatatagttttaccattatgacatccattttccttatcaaatgaatatccattttatccctaggaagaatgggataactgttagtattaattaggtatgtgatattcgtgaaaggcactgtgactttactacatgaatatgctcaaatcactttaatataaaacccttcatataacacatggtaacagaactgttacttatatttcctctaaccattctagacgatttaccctacaatctttcagttccttcattaatacttttcttttcaattcatgcctgtgttcttatacaacacacaaatgactacttatgttttatagctccgtctagtttagaatcgtagaatttcctgcccgtgcaagcattagattgttttttggattggttaactaacagttatcgataattatttgttgtagtcactgttgttttcttttttcctttttttacttgattcaaggactgctagtggccgaagggcactgcctcctccttttgcttttacgtgctgcaagaccattgttatgtatttcatgtttattattacttcgaatacggctagaatacaatgttttaacaaggtatggtgatggattactctcggttgttgattaatcttgtagcacgtcctttactaaatattgtgtttaaatggcgaaggatgatggagatacaatgaacacgaaagtcattattatttttagccttggcgctatatgtttgttagcagaggttacatgattcttctttcggaataggcggaaaaatgagagccttcactgttgtttatttagtagaggttgagatcgtatttcaaattattaagaacactattgttttagattctttcacatattcatacgtttgaaaaaaaaccgcattctccatgatgttttggtcatagagaatgtaataaaagtccattaaatagcattgatactcccatactatagtattttcctttgtgttgaggattaatgcaaccacagtgttgtggtttgaacactaatcgagaaggcctctttactgttgtctaggtcagttataactttcatatatgtgcttccatacactttaatgttagtagtacaattgctgttagcagattaaaaacttagttaaacatatgcgtactcacatatttattatttctctttacatcaaggattcccatggacatgtggttgtccattacacagatgttgatacaaatgttcagctcctttttaggtaccgttgctcatgttgcagcccgaggttgtagctacacaggaacacaaattcagtgcagcttttgagcttgcaagaacggatgttggctgtgtttttgcaaatcagggtgacaataatgttgaaagaatccagcgttcgaagtatttccaagctcttcttcagaagtctaaagcaaatgtttctgaacaacggaatgcaacatgtcaagagttctcagttcaatgggctccatgcgtcgatgaaagccaagctgaaatggaaaatgagaagctaagcatcagggcttcaaagttaatgatgcaaacgaagttgacatcattgtatagcagtaagtccttgaagacaaatggcgtacccaacaaaaatatgttcaaatcagagaactcatctaaagtgtgtgccggtgttgaaaatagaacaagtcaaaatagtaacaggcggcatgcttacctggacgttgaggaggatgagaaatcccatgggcaattgcagaatgcaaagtggaaacatacagggttcagaagtcctatatttgaggttgcaaattctccatcaagtaatgatgaagctgatgctcctgccaatgagtttacgactgccaagagaatgatggggttggatgttgtgcaaaagccagcacaaaatggtccacaaggtgcttctgtatcaccacaatgtgataacaactatagtacacggaattatggcgtgagaccaagttggaattctcgtcgtggaccacgtggtagttttataccccctatcagaaacaatggaggatcaggtacaacgatctcacgggtcactggtaaaaatgacgagtccatggaagattcaacaaggaaatgtattgaaatgctttgtgctcctgatggtgagcttcctgagaagctgaggaatctagaacctcgccttattgaacatgtcagtaatgaaataatggatagggatcctaatgtccgctggaatgacatagctggtttggaacatgcaaagaagtgtgtgacagagatggtgatatggccactgctacgtcctgatatattccgtggttgtcggtctcctggaagaggtctactgttgtttggacctcctggaacaggcaaaaccatgattggaaaggcaatagctggtgaagccaaggcaacatttttctacatatctgctagttcactaacaagcaaatggattggtgagggtgaaaaacttgttcgggcactttttggtgtggccagttgtcgtcaacctgctgtcatatttgtggatgagatagactcattattatctcagcgcaaatcagatggtgaacatgaatcaagcaggagactgaaaacacagtttctaattgagatggaaggttttgacaccggaaatgaacagatcttacttataggagcaacaaacagaccccaggaactggatgaagcagcgcgcaggcgactcacgaaacgtctatacatcccccttccttcattagaagcacgggcttggataattcgcaatctattggagaaagatggacttttcatgctctcggaagaagaaacaagtgccatctgtaaattaactgaaggctactcaggatctgacatgaaaaacttggtgaaagatgcctcaatgggaccactaagagaggctcttcagacgggcgttgaaatcgcaaagctcagcaaggaggatatgcggccagtgatgctgaaggatttcgagaatgctatgcgggaggtaagaccttctgtttcctcaagcgagctggggacttatgaagaatggaacaggcagtttgggagcctatcgatctagtctgtcggcaggcatcaacgaatacaatcatgtcggcactatagaaaaaggagctcaacgattttagccggaacatgacatgcataacacagctctacagtttaacaatcttttgaagcatcaaaatttgaactgtctatttggagtgctgagtaatatccaggagcctacatatcaaatagtttcaattgtttttaaatcttcacttttctgtaaatttgtttgccttggttttgattgacatatgactagcgcggaagtcaaatactccgttccaaattataaaatgttttagcttttccgcatacagttttttagatgaataaaaaaattaatgtatctataaaaagcaatatgtaaagagatggtacaacattgacaacaaagaagaagatttgtgggtccaactcagacctagaccgtcttcatgggtagtgtaaaatagagaatgcggaactgtagatgatattgtttgatactgtttgtaaagtaaagtttgtttgatactgtttgtaaagtaaagtttgatatataggatgagataggagattggataatagatctgctagagataaccttctcatgctctcgaggatcgaaatagataatgttccatgggatcgaaatagataacgaagaggactc

SEQ ID NO: 220712 - DNA, 4955 bp, Zea Mays
ccgcgacgtgctgctccgatgcggcatcatgggtgctgcggacggcgccaccaacgtgtgcttgcaagcgcggcaggagggagcagagccggagatggggcggtgctggtgctgctgccggtacctaaagctgctatgcttggttctcctcccaccgctcaacttatgcctgcaccacagctgctgctccaatctgtccccattctcaccgccgaagattcgctccattttctatggcacctagagttggccttcaggggaagaccgctccacaggccaagaagtcgtggggttccgagattgccagtagcggtggccggagctcctccgatgtttccacgccatatgctacgacgtcttgtgcttccacgccggatgccacaatagacaagcatattaagactgtcatgtctctcaatctctgcccatacttgaagccaatctggctgatcacaaaagacagtcatcaccctttaccgcacgtagcagcccagtattcgagattaaatcctgaatttgattgttaaaagatatcatcatatcaacgaagctaggccacaagactagcctgatacactgtgatgcctgcaccacttaaggtactactttcctgaagaaagtcaatttgctgacaatgcaatgaccattcccttgcctattcacatggagaaacttgatgttcatatagaaataaatatttctagacacttcaagtaataaaaatacaaaacaacttaagactacgtatgaatggctcaaaataatcattagtcacaaagctgaaaatacaccgtgacctaacttttttaattgtggtctcacagtttgatgtatatagtgcaaaatttctttcaatctttgcttacttcaacttctttctataaagtggacataatctaactttccaggcacatgccctagaagatgagatcttttcttcattgcatgaattcttgagaacctttatttgaattctagtgttaatttcttttcaattgattttctccctgctgatatacatgcttataaagaaaaataaaattatttctttttcacttatatatgtttaaccttttcatgagagcagctttatatattcacgatttcttgttgggttgccaacgttatgtttatattgaccaactttattaggacactgcattctggtatttggcacttaacagttccactttgcaggaagaaaggttcagattgtgagacaaaggatatatgtaccatatcactgctcctctatcaagcatcagttctcattatgtatatagttttaccattatgacatccattttccttatcaaatgaatatccattttatccctaggaagaatgggataactgttagtattaattaggtatgtgatattcgtgaaaggcactgtgactttactacatgaatatgctcaaatcactttaatataaaacccttcatataacacatggtaacagaactgttacttatatttcctctaaccattctagacgatttaccctacaatctttcagttccttcattaatacttttcttttcaattcatgcctgtgttcttatacaacacacaaatgactacttatgttttatagctccgtctagtttagaatcgtagaatttcctgcccgtgcaagcattagattgttttttggattggttaactaacagttatcgataattatttgttgtagtcactgttgttttcttttttcctttttttacttgattcaaggactgctagtggccgaagggcactgcctcctccttttgcttttacgtgctgcaagaccattgttatgtatttcatgtttattattacttcgaatacggctagaatacaatgttttaacaaggtatggtgatggattactctcggttgttgattaatcttgtagcacgtcctttactaaatattgtgtttaaatggcgaaggatgatggagatacaatgaacacgaaagtcattattatttttagccttggcgctatatgtttgttagcagaggttacatgattcttctttcggaataggcggaaaaatgagagccttcactgttgtttatttagtagaggttgagatcgtatttcaaattattaagaacactattgttttagattctttcacatattcatacgtttgaaaaaaaaccgcattctccatgatgttttggtcatagagaatgtaataaaagtccattaaatagcattgatactcccatactatagtattttcctttgtgttgaggattaatgcaaccacagtgttgtggtttgaacactaatcgagaaggcctctttactgttgtctaggtcagttataactttcatatatgtgcttccatacactttaatgttagtagtacaattgctgttagcagattaaaaacttagttaaacatatgcgtactcacatatttattatttctctttacatcaaggattcccatggacatgtggttgtccattacacagatgttgatacaaatgttcagctcctttttaggtaccgttgctcatgttgcagcccgaggttgtagctacacaggaacacaaattcagcttttgagcttgcaagaacggatgttggctgtgtttttgcaaatcagggtgacaataatgttgaaagaatccagcgttcgaagtatttccaagctcttcttcagaagtctaaagcaaatgtttctgaacaacggaatgcaacatgtcaagagttctcagttcaatgggctccatgcgtcgatgaaagccaagctgaaatggaaaatgagaagctaagcatcagggcttcaaagttaatgatgcaaacgaagttgacatcattgtatagcagtaagtccttgaagacaaatggcgtacccaacaaaaatatgttcaaatcagagaactcatctaaagtgtgtgccggtgttgaaaatagaacaagtcaaaatagtaacaggcggcatgcttacctggacgttgaggaggatgagaaatcccatgggcaattgcagaatgcaaagtggaaacatacagggttcagaagtcctatatttgaggttgcaaattctccatcaagtaatgatgaagctgatgctcctgccaatgagtttacgactgccaagagaatgatggggttggatgttgtgcaaaagccagcacaaaatggtccacaaggtgcttctgtatcaccacaatgtgataacaactatagtacacggaattatggcgtgagaccaagttggaattctcgtcgtggaccacgtggtagttttataccccctatcagaaacaatggaggatcaggtacaacgatctcacgggtcactggtaaaaatgacgagtccatggaagattcaacaaggaaatgtattgaaatgctttgtgctcctgatggtgagcttcctgagaagctgaggaatctagaacctcgccttattgaacatgtcagtaatgaaataatggatagggatcctaatgtccgctggaatgacatagctggtttggaacatgcaaagaagtgtgtgacagagatggtgatatggccactgctacgtcctgatatattccgtggttgtcggtctcctggaagaggtctactgttgtttggacctcctggaacaggcaaaaccatgattggaaaggcaatagctggtgaagccaaggcaacatttttctacatatctgctagttcactaacaagcaaatggattggtgagggtgaaaaacttgttcgggcactttttggtgtggccagttgtcgtcaacctgctgtcatatttgtggatgagatagactcattattatctcagcgcaaatcagatggtgaacatgaatcaagcaggagactgaaaacacagtttctaattgagatggaaggttttgacaccggaaatgaacagatcttacttataggagcaacaaacagaccccaggaactggatgaagcagcgcgcaggcgactcacgaaacgtctatacatcccccttccttcattagaagcacgggcttggataattcgcaatctattggagaaagatggacttttcatgctctcggaagaagaaacaagtgccatctgtaaattaactgaaggctactcaggatctgacatgaaaaacttggtgaaagatgcctcaatgggaccactaagagaggctcttcagacgggcgttgaaatcgcaaagctcagcaaggaggatatgcggccagtgatgctgaaggatttcgagaatgctatgcgggaggtaagaccttctgtttcctcaagcgagctggggacttatgaagaatggaacaggcagtttgggagcctatcgatctagtctgtcggcaggcatcaacgaatacaatcatgtcggcactatagaaaaaggagctcaacgattttagccggaacatgacatgcataacacagctctacagtttaacaatcttttgaagcatcaaaatttgaactgtctatttggagtgctgagtaatatccaggagcctacatatcaaatagtttcaattgtttttaaatcttcacttttctgtaaatttgtttgccttggttttgattgacatatgactagcgcggaagtcaaatactccgttccaaattataaaatgttttagcttttccgcatacagttttttagatgaataaaaaaattaatgtatctataaaaagcaatatgtaaagagatggtacaacattgacaacaaagaagaagatttgtgggtccaactcagacctagaccgtcttcatgggtagtgtaaaatagagaatgcggaactgtagatgatattgtttgatactgtttgtaaagtaaagtttgtttgatactgtttgtaaagtaaagtttgatatataggatgagataggagattggataatagatctgctagagataaccttctcatgctctcgaggatcgaaatagataatgttccatgggatcgaaatagataacgaagaggactc

SEQ ID NO: 220713 - DNA, 2329 bp, Zea Mays
tgtgcttccacgccggatgccacaatagacaaggaagaaaggttcagattgtgagacaaaggatatatgtaccatatcactgctcctctatcaagcatcagttctcattatgtatatagttttaccattatgacatccattttccttatcaaatgaatatccattttatccctaggaagaatgggataactgttagtattaattaggtatgtgatattcgtgaaaggcactgtgactttactacatgaatatgctcaaatcactttaatataaaacccttcatataacacatggtaacagaactgttacttatatttcctctaaccattctagacgatttaccctacaatctttcagttccttcattaatacttttcttttcaattcatgcctgtgttcttatacaacacacaaatgactacttatgttttatagctccgtctagtttagaatcgtagaatttcctgcccgtgcaagcattagattgttttttggattggttaactaacagttatcgataattatttgttgtagtcactgttgttttcttttttcctttttttacttgattcaaggactgctagtggccgaagggcactgcctcctccttttgcttttacgtgctgcaagaccattgttatgtatttcatgtttattattacttcgaatacggctagaatacaatgttttaacaaggtatggtgatggattactctcggttgttgattaatcttgtagcacgtcctttactaaatattgtgtttaaatggcgaaggatgatggagatacaatgaacacgaaagtcattattatttttagccttggcgctatatgtttgttagcagaggttacatgattcttctttcggaataggcggaaaaatgagagccttcactgttgtttatttagtagaggttgagatcgtatttcaaattattaagaacactattgttttagattctttcacatattcatacgtttgaaaaaaaaccgcattctccatgatgttttggtcatagagaatgtaataaaagtccattaaatagcattgatactcccatactatagtattttcctttgtgttgaggattaatgcaaccacagtgttgtggtttgaacactaatcgagaaggcctctttactgttgtctaggtcagttataactttcatatatgtgcttccatacactttaatgttagtagtacaattgctgttagcagattaaaaacttagttaaacatatgcgtactcacatatttattatttctctttacatcaaggattcccatggacatgtggttgtccattacacagatgttgatacaaatgttcagctcctttttaggtaccgttgctcatgttgcagcccgaggttgtagctacacaggaacacaaattcagtgcagcttttgagcttgcaagaacggatgttggctgtgtttttgcaaatcagggtgacaataatgttgaaagaatccagcgttcgaagtatttccaagctcttcttcagaagtctaaagcaaatgtttctgaacaacggaatgcaacatgtcaagagttctcagttcaatgggctccatgcgtcgatgaaagccaagctgaaatggaaaatgagaagctaagcatcagggcttcaaagttaatgatgcaaacgaagttgacatcattgtatagcagtaagtccttgaagacaaatggcgtacccaacaaaaatatgttcaaatcagagaactcatctaaagtgtgtgccggtgttgaaaatagaacaagtcaaaatagtaacaggcggcatgcttacctggacgttgaggaggatgagaaatcccatgggcaattgcagaatgcaaagtggaaacatacagggttcagaagtcctatatttgaggttgcaaattctccatcaagtaatgatgaagctgatgctcctgccaatgagtttacgactgccaagagaatgatgatcttggttaaatgagatagttcttcaaacacgatccaaactcagagattctcagttcgcgccaaagtgaggcaatcggggatcaggacagggtcaacacaagcactgttagtcggcgcgtctagccaaaccaatgccgagctaggcgtacaatggtgccgtcccccttagcacggcggatgcgacggtgcgcctcacgcaggtttgaatgcgcgacgacgcaatcatggggtcgggtcacacggatccggctgctcgcattgcacctaggatttcaccctagagatgccggcgacgatgtgctgagaagaaaggtggagatttaatagtatcatggcccaactcgacacgattcaaagtgggtctgtg

SEQ ID NO: 220714 - DNA, 3385 bp, Zea Mays
ccgatgcggcatcatgggtgctgcggacggcgccaccaacgtgtgcttgcaagcgcggcaggagggagcagagccggagatggggcggtgctggtgctgctgccggtacctaaagctgctatgcttggttctcctcccaccgctcaacttatgcctgcaccacagctgctgctccaatctgtccccattctcaccgccgaagattcgctccattttctatggcacctagagttggccttcaggggaagaccgctccacaggccaagaagtcgtggggttccgagattgccagtagcggtggccggagctcctccgatgtttccacgccatatgctacgacgtcttgtgcttccacgccggatgccacaatagacaagcatattaagactgtcatgtctctcaatctctgcccatacttgaagccaatctggctgatcacaaaagacagtcatcaccctttaccgcacgtagcagcccagtattcgagattaaatcctgaatttgattgttaaaagatatcatcatatcaacgaagctaggccacaagactagcctgatacactgtgatgcctgcaccacttaaggtactactttcctgaagaaagtcaatttgctgacaatgcaatgaccattcccttgcctattcacatggagaaacttgatgttcatatagaaataaatatttctagacacttcaagtaataaaaatacaaaacaacttaagactacgtatgaatggctcaaaataatcattagtcacaaagctgaaaatacaccgtgacctaacttttttaattgtggtctcacagtttgatgtatatagtgcaaaatttctttcaatctttgcttacttcaacttctttctataaagtggacataatctaactttccaggcacatgccctagaagatgagatcttttcttcattgcatgaattcttgagaacctttatttgaattctagtgttaatttcttttcaattgattttctccctgctgatatacatgcttataaagaaaaataaaattatttctttttcacttatatatgtttaaccttttcatgagagcagctttatatattcacgatttcttgttgggttgccaacgttatgtttatattgaccaactttattaggacactgcattctggtatttggcacttaacagttccactttgcaggaagaaaggttcagattgtgagacaaaggatatatgtaccatatcactgctcctctatcaagcatcagttctcattatgtatatagttttaccattatgacatccattttccttatcaaatgaatatccattttatccctaggaagaatgggataactgttagtattaattaggtatgtgatattcgtgaaaggcactgtgactttactacatgaatatgctcaaatcactttaatataaaacccttcatataacacatggtaacagaactgttacttatatttcctctaaccattctagacgatttaccctacaatctttcagttccttcattaatacttttcttttcaattcatgcctgtgttcttatacaacacacaaatgactacttatgttttatagctccgtctagtttagaatcgtagaatttcctgcccgtgcaagcattagattgttttttggattggttaactaacagttatcgataattatttgttgtagtcactgttgttttcttttttcctttttttacttgattcaaggactgctagtggccgaagggcactgcctcctccttttgcttttacgtgctgcaagaccattgttatgtatttcatgtttattattacttcgaatacggctagaatacaatgttttaacaaggtatggtgatggattactctcggttgttgattaatcttgtagcacgtcctttactaaatattgtgtttaaatggcgaaggatgatggagatacaatgaacacgaaagtcattattatttttagccttggcgctatatgtttgttagcagaggttacatgattcttctttcggaataggcggaaaaatgagagccttcactgttgtttatttagtagaggttgagatcgtatttcaaattattaagaacactattgttttagattctttcacatattcatacgtttgaaaaaaaaccgcattctccatgatgttttggtcatagagaatgtaataaaagtccattaaatagcattgatactcccatactatagtattttcctttgtgttgaggattaatgcaaccacagtgttgtggtttgaacactaatcgagaaggcctctttactgttgtctaggtcagttataactttcatatatgtgcttccatacactttaatgttagtagtacaattgctgttagcagattaaaaacttagttaaacatatgcgtactcacatatttattatttctctttacatcaaggattcccatggacatgtggttgtccattacacagatgttgatacaaatgttcagctcctttttaggtaccgttgctcatgttgcagcccgaggttgtagctacacaggaacacaaattcagcttttgagcttgcaagaacggatgttggctgtgtttttgcaaatcagggtgacaataatgttgaaagaatccagcgttcgaagtatttccaagctcttcttcagaagtctaaagcaaatgtttctgaacaacggaatgcaacatgtcaagagttctcagttcaatgggctccatgcgtcgatgaaagccaagctgaaatggaaaatgagaagctaagcatcagggcttcaaagttaatgatgcaaacgaagttgacatcattgtatagcaaacaagtcaaaatagtaacaggcggcatgcttacctggacgttgaggaggatgagaaatcccatgggcaattgcagaatgcaaagtggaaacatacagggttcagaagtcctatatttgaggttgcaaattctccatcaagtaatgatgaagctgatgctcctgccaatgagtttacgactgccaagagaatgatgatcttggttaaatgagatagttcttcaaacacgatccaaactcagagattctcagttcgcgccaaagtgaggcaatcggggatcaggacagggtcaacacaagcactgttagtcggcgcgtctagccaaaccaatgccgagctaggcgtacaatggtgccgtcccccttagcacggcggatgcgacggtgcgcctcacgcaggtttgaatgcgcgacgacgcaatcatggggtcgggtcacacggatccggctgctcgcattgcacctaggatttcaccctagagatgccggcgacgatgtgctgagaagaaaggtggagatttaatagtatcatggcccaactcgacacgattcaaagtgggtctgtg

SEQ ID NO: 220715 - DNA, 2555 bp, Zea Mays
ctccttccacggttttgccagtcgccacgcagatctcgcacagcacagttgtgccagccagccacgcccacgccccggcagacgggggggcagtgacgctgatgcgtcagtgccggcgagggccagcacgtccacgtccaccaggcattcgggaggaatctgggcggtggtggagttgaaggggacgatggcatggaagatttcgatgctgaaaggaagtccgggatgctgcacatgttctgcaaaacgcttacggcctctgacacaagcacgcatggagggttctctgttcctcgccgtgctgctgaggactgtttcccgcctctggattataatcagctcaggccttctcaagagctggttgccaaggatttgcatggagccaagtggaagtttcgtcatatatataggggtcagcctcgtaggcatctcttgactactggatggagttcatttgtcaataaaaagaaactggtttcaggggatgctgtgttatttctccgaggtgatgacggtgaactaaggctgggtgtgcggagggctattcagcttaaaaatgaggccctttttgaagatttcaatagtgacagcacaaagcggcattctttgacggctgtagctgattccttgaagaacagaagtgtttttcacatttcttacaatccaagagctactgcttcagaatatattattccatacgctaagttcctgaagagcctcaatcatccggtctgtattggagcaaggatcaactttcagtgccataatgaagatgttagtgaaaggcgatctggagtggttgttcgcattagtgaaatagatcccatgaaatggcctggctcgaagtggagaagcctgctggtaagatgggaggacggtgctgaatgtaatggccaagatagagtatctccatgggagatcgagatagctggtggttctgtctctgtttctcattctctttctgcatctagttctaaaagaaccaagttgtgtcctcagggaaatttggacgttccagcaatgtggaatggttgtactgactccatggaaactggaaagttacccagggtcttgcaaggtcaagaattgatgagttttaggacttgtcatgttccgtgtgctcctcaaactgctgaggctgcaaaacttcaatcttctgatgctagtaggttccttagtaatgcacatggctgcgcattgggtggtccaacaagcagactcgcagtgcatagctctggttttacctaccaatgtgtaggcttcaatgaatctattggattctcagaggtcttgcaaggtcaagaaatttctcgggcggttcctaagttccaaggaatgatgtcggaagcttgttcactgaaagacagatatgggctgcatagttatatgcgtgccccagttgctgttaatggattatcagctacaactcaagaatgttctctcgcactatctactccgccaggagcacaagtgccctctctctaccctggtaatgttgttaaccgaactgtggttccacaacttggactggcaaggaagtttggtggtggaggtacaaatggccagcagtctggcccatttgataggccgagggaactttggaccaggccacagcatgaaacacctgaccaaatgaacttggatcagtttgagactagaagaccttcagtgcctgtagatgctgctaagcttgggtctggtggaggggaggttcgcaaaactagctgcagactttttggtttctccttgactgaaaagatcttgccagcagatgatgatgacgtcaaggaagtgagctatgagactgagtgccagaacccacggatgctggacctgttcgggtacaactgctcaacaccgagtgccgctcttccagctctgtgtgctgccgccccctttggaatgtgatgctgcttcgaatctttcgataactttgctccatgtactcttagaagttttactttcccagtaccccagtgtagtcataagctgcttttgacatcattccctttggtctgcctcaagttaagcagtcatttgcacaagtaaacgaaggttcgttggtgaaccactcctcgacatgcctcaccctgtcacccaaactattgtggttagtctcaggatacccagagacaccacattgtaacttatgtcgatgatccttcagaactgttgtgcgatgaagctaacaatttgctctaaaagtactttgcttgctctaaaagtaccggctatgtatatttaaatcagcacctgtatgagtttttttagccctcacaagccctggttgcagtcgactaggccgtgtgattgtattagtatgctatctttttaaactgtcgcttatgagtctttattctagtgcattgtgtgaatactctgttcatcgcatgcaagtcttgtcttctgtttctgttggcttggtaggagatactctgattttataacatgtcagatttttattggtcaattcaactttgaccatcaatatacaaggaatttggtgaatacttgagggccttgttgaggactattttgttgaagaaccattatat

SEQ ID NO: 220716 - DNA, 3083 bp, Zea Mays
cgtagtccatagtactccatttgcaaattgcattgccacacctcggctcatccccacctcacctcggcctcacttcacaagttcacatcacgaaacaggagcgtcataaagacatgggcgtcgcagggtagcctcagacggtcagaccagtgacgcagcggcagcggcagcgggcatggggtcctgagtgaccgactgcgaaggagatggctggagcgcgacggccccggagccattaatggggtgctcatcctcctccccctcctcgcctcctccccgccgggtcgcggacgcggtcggctccgccttttaaccggcctgtccgggagcggggcgccggaaccctagtgctgctggtggcacgcggcgcgccccatgggcatcgatctcaacatggtggacggcgagggccacgagcgccgcccgccgccggtgacgtgccgggagctgtggcacgcgtgcgcggggcccgtggtcgcgctaccgcgccggggcagcctggtcgtgtacctgccgcagggccacctggccgcggcgggcggcggggacgtcgctgcggacctgccgccgcacgtggtgtgccgcgtcgcggatgtcgagctatgcgcggatgcggcgacggacgaggtgtgcgcgcggctggcgctggttgcggagggcgaggcattcgggaggaatctgggcggtggtggagttgaaggggacgatggcatggaagatttcgatgctgaaaggaagtccgggatgctgcacatgttctgcaaaacgcttacggcctctgacacaagcacgcatggagggttctctgttcctcgccgtgctgctgaggactgtttcccgcctctggattataatcagctcaggccttctcaagagctggttgccaaggatttgcatggagccaagtggaagtttcgtcatatatataggggtcagcctcgtaggcatctcttgactactggatggagttcatttgtcaataaaaagaaactggtttcaggggatgctgtgttatttctccgaggtgatgacggtgaactaaggctgggtgtgcggagggctattcagcttaaaaatgaggccctttttgaagatttcaatagtgacagcacaaagcggcattctttgacggctgtagctgattccttgaagaacagaagtgtttttcacatttcttacaatccaagagctactgcttcagaatatattattccatacgctaagttcctgaagagcctcaatcatccggtctgtattggagcaaggatcaactttcagtgccataatgaagatgttagtgaaaggcgatctggagtggttgttcgcattagtgaaatagatcccatgaaatggcctggctcgaagtggagaagcctgctggtaagatgggaggacggtgctgaatgtaatggccaagatagagtatctccatgggagatcgagatagctggtggttctgtctctgtttctcattctctttctgcatctagttctaaaagaaccaagttgtgtcctcagggaaatttggacgttccagcaatgtatgttacagggaatggttgtactgactccatggaaactggaaagttacccagggtcttgcaaggtcaagaattgatgagttttaggacttgtcatgttccgtgtgctcctcaaactgctgaggctgcaaaacttcaatcttctgatgctagtaggttccttagtaatgcacatggctgcgcattgggtggtccaacaagcagactcgcagtgcatagctctggttttacctaccaatgtgtaggcttcaatgaatctattggattctcagaggtcttgcaaggtcaagaaatttctcgggcggttcctaagttccaaggaatgatgtcggaagcttgttcactgaaagacagatatgggctgcatagttatatgcgtgccccagttgctgttaatggattatcagctacaactcaagaatgttctctcgcactatctactccgccaggagcacaagtgccctctctctaccctggtaatgttgttaaccgaactgtggttccacaacttggactggcaaggaagtttggtggtggaggtacaaatggccagcagtctggcccatttgataggccgagggaactttggaccaggccacagcatgaaacacctgaccaaatgaacttggatcagtttgagactagaagaccttcagtgcctgtagatgctgctaagcttgggtctggtggaggggaggttcgcaaaactagctgcagactttttggtttctccttgactgaaaagatcttgccagcagatgatgatgacgtcaaggaagtgagctatgagactgagtgccagaacccacggatgctggacctgttcgggtacaactgctcaacaccgagtgccgctcttccagctctgtgtgctgccgccccctttggaatgtgatgctgcttcgaatctttcgataactttgctccatgtactcttagaagttttactttcccagtaccccagtgtagtcataagctgcttttgacatcattccctttggtctgcctcaagttaagcagtcatttgcacaagtaaacgaaggttcgttggtgaaccactcctcgacatgcctcaccctgtcacccaaactattgtggttagtctcaggatacccagagacaccacattgtaacttatgtcgatgatccttcagaactgttgtgcgatgaagctaacaatttgctctaaaagtactttgcttgctctaaaagtaccggctatgtatatttaaatcagcacctgtatgagtttttttagccctcacaagccctggttgcagtcgactaggccgtgtgattgtattagtatgctatctttttaaactgtcgcttatgagtctttattctagtgcattgtgtgaatactctgttcatcgcatgcaagtcttgtcttctgtttctgttggcttggtaggagatactctgattttataacatgtcagatttttattggtcaattcaactttgaccatcaatatacaaggaatttggtgaatacttgagggccttgttgaggactattttgttgaagaaccattatat

SEQ ID NO: 220717 - DNA, 2357 bp, Zea Mays
gacttaagactgctaccactaccagtgtgctgcattcgggaggaatctgggcggtggtggagttgaaggggacgatggcatggaagatttcgatgctgaaaggaagtccgggatgctgcacatgttctgcaaaacgcttacggcctctgacacaagcacgcatggagggttctctgttcctcgccgtgctgctgaggactgtttcccgcctctggtcagcctcgtaggcatctcttgactactggatggagttcatttgtcaataaaaagaaactggtttcaggggatgctgtgttatttctccgaggtgatgacggtgaactaaggctgggtgtgcggagggctattcagcttaaaaatgaggccctttttgaagatttcaatagtgacagcacaaagcggcattctttgacggctgtagctgattccttgaagaacagaagtgtttttcacatttcttacaatccaagagctactgcttcagaatatattattccatacgctaagttcctgaagagcctcaatcatccggtctgtattggagcaaggatcaactttcagtgccataatgaagatgttagtgaaaggcgatctggagtggttgttcgcattagtgaaatagatcccatgaaatggcctggctcgaagtggagaagcctgctggtaagatgggaggacggtgctgaatgtaatggccaagatagagtatctccatgggagatcgagatagctggtggttctgtctctgtttctcattctctttctgcatctagttctaaaagaaccaagttgtgtcctcagggaaatttggacgttccagcaatgtggaatggttgtactgactccatggaaactggaaagttacccagggtcttgcaaggtcaagaattgatgagttttaggacttgtcatgttccgtgtgctcctcaaactgctgaggctgcaaaacttcaatcttctgatgctagtaggttccttagtaatgcacatggctgcgcattgggtggtccaacaagcagactcgcagtgcatagctctggttttacctaccaatgtgtaggcttcaatgaatctattggattctcagaggtcttgcaaggtcaagaaatttctcgggcggttcctaagttccaaggaatgatgtcggaagcttgttcactgaaagacagatatgggctgcatagttatatgcgtgccccagttgctgttaatggattatcagctacaactcaagaatgttctctcgcactatctactccgccaggagcacaagtgccctctctctaccctggtaatgttgttaaccgaactgtggttccacaacttggactggcaaggaagtttggtggtggaggtacaaatggccagcagtctggcccatttgataggccgagggaactttggaccaggccacagcatgaaacacctgaccaaatgaacttggatcagtttgagactagaagaccttcagtgcctgtagatgctgctaagcttgggtctggtggaggggaggttcgcaaaactagctgcagactttttggtttctccttgactgaaaagatcttgccagcagatgatgatgacgtcaaggaagtgagctatgagactgagtgccagaacccacggatgctggacctgttcgggtacaactgctcaacaccgagtgccgctcttccagctctgtgtgctgccgccccctttggaatgtgatgctgcttcgaatctttcgataactttgctccatgtactcttagaagttttactttcccagtaccccagtgtagtcataagctgcttttgacatcattccctttggtctgcctcaagttaagcagtcatttgcacaagtaaacgaaggttcgttggtgaaccactcctcgacatgcctcaccctgtcacccaaactattgtggttagtctcaggatacccagagacaccacattgtaacttatgtcgatgatccttcagaactgttgtgcgatgaagctaacaatttgctctaaaagtactttgcttgctctaaaagtaccggctatgtatatttaaatcagcacctgtatgagtttttttagccctcacaagccctggttgcagtcgactaggccgtgtgattgtattagtatgctatctttttaaactgtcgcttatgagtctttattctagtgcattgtgtgaatactctgttcatcgcatgcaagtcttgtcttctgtttctgttggcttggtaggagatactctgattttataacatgtcagatttttattggtcaattcaactttgaccatcaatatacaaggaatttggtgaatacttgagggccttgttgaggactattttgttgaagaaccattatat

SEQ ID NO: 220718 - DNA, 2435 bp, Zea Mays
cttaagactgctaccactaccagtgtgctgcattcgggaggaatctgggcggtggtggagttgaaggggacgatggcatggaagatttcgatgctgaaaggaagtccgggatgctgcacatgttctgcaaaacgcttacggcctctgacacaagcacgcatggagggttctctgttcctcgccgtgctgctgaggactgtttcccgcctctggattataatcagctcaggccttctcaagagctggttgccaaggatttgcatggagccaagtggaagtttcgtcatatatataggggtcagcctcgtaggcatctcttgactactggatggagttcatttgtcaataaaaagaaactggtttcaggggatgctgtgttatttctccgaggtgatgacggtgaactaaggctgggtgtgcggagggctattcagcttaaaaatgaggccctttttgaagatttcaatagtgacagcacaaagcggcattctttgacggctgtagctgattccttgaagaacagaagtgtttttcacatttcttacaatccaagagctactgcttcagaatatattattccatacgctaagttcctgaagagcctcaatcatccggtctgtattggagcaaggatcaactttcagtgccataatgaagatgttagtgaaaggcgatctggagtggttgttcgcattagtgaaatagatcccatgaaatggcctggctcgaagtggagaagcctgctgatgggaggacggtgctgaatgtaatggccaagatagagtatctccatgggagatcgagatagctggtggttctgtctctgtttctcattctctttctgcatctagttctaaaagaaccaagttgtgtcctcagggaaatttggacgttccagcaatgtggaatggttgtactgactccatggaaactggaaagttacccagggtcttgcaaggtcaagaattgatgagttttaggacttgtcatgttccgtgtgctcctcaaactgctgaggctgcaaaacttcaatcttctgatgctagtaggttccttagtaatgcacatggctgcgcattgggtggtccaacaagcagactcgcagtgcatagctctggttttacctaccaatgtgtaggcttcaatgaatctattggattctcagaggtcttgcaaggtcaagaaatttctcgggcggttcctaagttccaaggaatgatgtcggaagcttgttcactgaaagacagatatgggctgcatagttatatgcgtgccccagttgctgttaatggattatcagctacaactcaagaatgttctctcgcactatctactccgccaggagcacaagtgccctctctctaccctggtaatgttgttaaccgaactgtggttccacaacttggactggcaaggaagtttggtggtggaggtacaaatggccagcagtctggcccatttgataggccgagggaactttggaccaggccacagcatgaaacacctgaccaaatgaacttggatcagtttgagactagaagaccttcagtgcctgtagatgctgctaagcttgggtctggtggaggggaggttcgcaaaactagctgcagactttttggtttctccttgactgaaaagatcttgccagcagatgatgatgacgtcaaggaagtgagctatgagactgagtgccagaacccacggatgctggacctgttcgggtacaactgctcaacaccgagtgccgctcttccagctctgtgtgctgccgccccctttggaatgtgatgctgcttcgaatctttcgataactttgctccatgtactcttagaagttttactttcccagtaccccagtgtagtcataagctgcttttgacatcattccctttggtctgcctcaagttaagcagtcatttgcacaagtaaacgaaggttcgttggtgaaccactcctcgacatgcctcaccctgtcacccaaactattgtggttagtctcaggatacccagagacaccacattgtaacttatgtcgatgatccttcagaactgttgtgcgatgaagctaacaatttgctctaaaagtactttgcttgctctaaaagtaccggctatgtatatttaaatcagcacctgtatgagtttttttagccctcacaagccctggttgcagtcgactaggccgtgtgattgtattagtatgctatctttttaaactgtcgcttatgagtctttattctagtgcattgtgtgaatactctgttcatcgcatgcaagtcttgtcttctgtttctgttggcttggtaggagatactctgattttataacatgtcagatttttattggtcaattcaactttgaccatcaatatacaaggaatttggtgaatacttgagggccttgttgaggactattttgttgaagaaccattatat

SEQ ID NO: 220719 - DNA, 1820 bp, Zea Mays
gggtctggaccgtccgtttggcgatatatgggcagcagtgagaggcacacccgctgaaaaaccctgcttctctcaagtctcaacgccgtcattctcatgtcttcctggtcgccggccgccgccgccgccgccgccgtagcgaaggcggctaagccactgcaccggagcgtgtcctcaactcctgtatccccccacctctctatgtcctcttctcaccgcactccacctctcgcgatggcggccggtggaagcggcgcggtggccccttcctcacttctcgtcgccgaccagggccaccgcgagtccgtgctgcttgctgcacgcgcctccatggggaactgcctcggagagacccgcctcgacctctcggtgtcagggctccgccttgctgccaagggcaaggttcttaatgagacaagcctttggtggttcaatcagacacggcacattactccaaatgcagtagtgtcttctcctgataagaatgtaacaatcgccaaaagatgcacagtttttccagttgaatttgttgttaggggatttgttacaggaagcactgatacatctttatggacagtttataataagggtgtaagaaattattgtggaaatgttcttcctgacggtatggtaaagaatgagaagctatcttcaaatatattgacaccaactactaaagctgcagaccatgatgtccctgtcactccagatgagataatcgagtcagggttgatgtcgaaggaagattttcatgaggcaggaagcaaagccttaagcttgtttgcatatggacagaaagtggccttagagaatggattaattctggttgacactaagtatgagtttggaaaaacacctgatggaacaattgtgttgattgatgaggttcatactcctgactctagcagatattggattgctaattcatacgaagatagattcaaatctggccttgaacctgaaaatgttgataaggagtttttaaggctttggttcaagaacaactgcaacccatatgaagacgcggttctgccagaagctccagaagagttggtttgtgagctggcctggcgatacattttcctgtttgaaacaatcacgaagacaaaattcgagatcctagaagcgcaggaaccaattcatgaaaggatatcaaggaatgtcgctcaagccttacgggacctatgattgctgatagaggatctggggcagagtttgagtgcatttctggaaccaattcatgaaaccatctgatagggttttgggtgcatttctggcactaatattcccgtgcgaatagcaagtagtctgcgcagatgccatatatccgtcctgtgagggttgccattgcgtcttgatgaagcagaactatccaccacatttcttcatgatctgtgatataatgtggtaataaactcaaccgccatgctccgctggtgagatttgccgtgtttggagcagggggggagacaaactgagaaatttaacaagcatgagaccgacagatgctgtattcatacaggccttcctcagatttctttgtgttagtgtaacgttgtcaggtggtttgagtcgggcagccatcacacgctgtcttctgaaacgaaaaggataaatttgcaaataacaagttcattatgttctagcgtaattgggcttttcctctaagagcaactccaagaggccaaatcgttttgtaaaagtaaatttgggtattgctagaagaaaaacaactccaatagactctataaatgactcctccccattcctccaaatttgggcttcagtttgggcttttcctccaagttatggttgccact

SEQ ID NO: 220720 - DNA, 773 bp, Zea Mays
agatgatccaactcaatataatttatatacattttcctgtttgaaacaatcacgaagacaaaattcgagatcctagaagcgcaggaaccaattcatgaaaggatatcaaggaatgtcgctcaagccttacgggacctatgattgctgatagaggatctggggcagagtttgagtgcatttctggaaccaattcatgaaaccatctgatagggttttgggtgcatttctggcactaatattcccgtgcgaatagcaagtagtctgcgcagatgccatatatccgtcctgtgagggttgccattgcgtcttgatgaagcagaactatccaccacatttcttcatgatctgtgatataatgtggtaataaactcaaccgccatgctccgctggtgagatttgccgtgtttggagcagggggggagacaaactgagaaatttaacaagcatgagaccgacagatgctgtattcatacaggccttcctcagatttctttgtgttagtgtaacgttgtcaggtggtttgagtcgggcagccatcacacgctgtcttctgaaacgaaaaggataaatttgcaaataacaagttcattatgttctagcgtaattgggcttttcctctaagagcaactccaagaggccaaatcgttttgtaaaagtaaatttgggtattgctagaagaaaaacaactccaatagactctataaatgactcctccccattcctccaaatttgggcttcagtttgggcttttcctccaagttatggttgccact

SEQ ID NO: 220721 - DNA, 2114 bp, Zea Mays
ggaaaccgtgtttcgacgggccgcagtgggcagtggcttggcccatcgaacccacttgccactcacttccacctgaactttgccctgccttctctcgacgactcccctgtccccgccgccgccgccgccgcaaatccccttccgcgtctgtctggcctctggggcttctaggttagcgcgtgcgaccaccatggccgaggaggtccaggctccactttccgccaccatggcgaaggaggcccagtcgccgccgtccgcaaccatagcggaggcgacggcgccgccgcagctcttattatttaactcctttacgaagagggaggagccattccagccccgggtagaggggaaggtagggatgtacgtctgtggcgtcactccctacgactttagccacatcggccacgcgcgtgcctacgtcgccttcgacgtcctctacaggtaccttaaattcttggggtatgaagttgaatatgtccgtaatttcacggatattgatgacaagattattaagcgtgccaatgaacgcggtgaaacagtaacaagcttgagtagccagtttatcaatgaatttcttcttgacatgactgagctccagtgcttgcctcctacctgcgagccacgggtaacagaacacattgagcatattataaagttgataacacagataatggagaatggcaaagcctatgctattgaaggagatgtttacttttcagttgaaagttttcctgaatatctcagtttatctggaagaaaatttgatcaaaatcaggcaggtgcacgggttgcttttgatacaagaaagcgtaatcctgcagacttcgcactctggaaagctgcaaaggagggtgaacctttttgggatagcccttggggccgtggaagaccaggttggcatattgaatgcagcgcaatgagtgctcactatttaggacatgtattcgatattcatggtggggggaaagatttgatttttcctcatcatgagaatgagcttgcacaaagccgcgcagcttatcctgatagcgaggtcaaatgctggatgcacaatggctttgttaacaaggatgataaaaaaatggcaaaatcagataataactttttcacgattagagatatcattgctctttaccatccaatggctttaagatttttcttgatgcgcacacattatagatcagatgttaaccattctgatcaagcgcttgagattgcatctgatcgtgtctactacatttatcagactctatatgactgtgaggaagtgttagctacatatcgtgaagagggtacctctctcccagtgccgtctgaggagcaaaatctgattgatgttctggaccgttgcttcatggagctgctgaaggccataaacagcagtctgaatgatttgaagaaactgcagcaaaaaatagaacagcaaaagaagaaacagcaacagcagaagaagcagcaacagcagaagcagcagcaacagaagcaacagcaattgcaaaaacagccagaagattatattcaagctctgattgcactggaaacagaacttaaaaacaaattgtctatacttggtctgatgccatcttcatctttggcagaggtactgaagcaattgaaggacaaatcattaaagcgagcagggctgactgaagaacaattgcaagagcagattgagcagagaaatgtcgcaaggaagaataagcagtttgagatatctgatggaatcaggaaaaaccttgctaccaaaggcatcgccctgatggacgaaccttctggtacagtatggagaccatgcgaaccagagcggtctgaagagtcatgattagctcactgactcaacaagtgatggcggtgtaaaatgagatttttgcctgagggcagttatcgcattttgaagactaacaaaaatcgccatctctggatgtggtattctacagggtaggggttccaggttgactcaccagttaaaacatgcatttctggttgtataacaagcaatgaaccccatatatatacttgacagttgactcctttggaggtttggtttttagttttggataagactttggtactctttgcttgtgtcgggtggttcctttagtcactaaagttta

SEQ ID NO: 220722 - DNA, 1543 bp, Zea Mays
ccgaaacccagcccgagaaaggaggaagaaaaactagaaaccctagcgatgctgcagatccgcctgagcaagattggctcgtcggactccggcggtgccgccgctagcacggcagctggcgccggcgcccccgccgcggttggggcggctgcggcgctcggtggcagcatcctggaatcggtcaccgtggcatgccccgaccacctcgtgatcgcggacctccccgtcgcgaagagcctcggcgccgtcacgacctccgctgccgccgccacgcgcgccatcggccgtcgctcccgtcgcccgctcggggagcgcgtccacatctgctcccgctgcgagttccccatcgccatctacggccgcctcttgtgatgagcgcattcagaagatacaaagtgtgaaaatgatggaggggattttcatctgtgctgcaccaatgtgtctcaaatcgttccttaagaaagcagattttgagttccatgtgcctgatgtccatgccaacctcctccaaactaatctagagaaggaagaagaacgcaatgagtcagatgctcctaacatcccctgtgcttctgcaggggatactcaaagacaatctcaaatgcctgaaatgtctactgcacgtgctcctcctccaaggccaggtgtttcacaagatcgtgaagaacgctcccgctaccaccagtccagggagcaaacaccactgaggcctccacccctttcaaaaccaccgttccatggtcgccattcttacccaccaggggatactcaggccgagaacaatccacctcaaggattcgaccggccatacaactgggcttctcaatcacgtcaggagagcccagggaaactttatgatgcctatgaatatgaatcagcctttgatctccaacgcaccattcaattaccctctccagcaagatggaaaccctcagtacttttctgcccctttccagatgccgccgctaccagatactggatcagaccaaggttccatgtcaagtgtccagcctccagttggccctatgagcttccctgaggggcttcagcgcccatgggctatggggatgatgggtaatccatttcacccgatggcccttggtcagggaatggttgatggtgcgggtgatcctcagggtggtggtggccttgccttcatgcaagctggttttgggggcatgcctgatggctccatgaatacaggcatgcccgatagaggtgatggaaggggtgttcgagcacagatgcccacgccaatgcaaatgcagatgtcacttcccccacctccgcctacacaacctccatcaggctcgcagcaaacatttaacaggacttgatatattttgttttgcacgaatcgatggttcctctcaaaattccatgtcaattcattgaggaaactgtaattttatcgtctttggcatgtaacctgtgagaactagatggctcagttctattccctggtttgataggagcctgtgtattatgctgtaactgtcctgtttgaatgaagtgttcccaagttacgaaattttagttcagg

SEQ ID NO: 220723 - DNA, 1719 bp, Zea Mays
cgagcccgcgcctgttcgcttcgctccgagccccctccaggcccaagcccgcccatctcccgaccacacacgcgcctattccttcccgccccgccgcgcgccgccacctctacggctccccggcggccatgctgaccgggcgggagagcctggtccgcctcatcggccggcgccgccgctcccctctccccgcttcgctcgtcgccgccctatccttaccctccccttccccctccacctccctcgcccaggcagacgatgggggtggctcgggagaagcggccgggggtgaggctggttcgacgtcgggaggaagccgcgtcgttggcatgggcgcggagtgggtggtctgccccgtctgcggcgattcgatccgagggtcggactactgcgtcaacactcacctcgatatgtgccttacaaggggaaccaaaaggaagttaacacagagcacccttcttaatttccaattcagtaaaaaggtttctgccgagcctacaataaacaatttgaacaatgagtccgagacagaaaatatgaaacagattgatgaaggtttgtcgagtgatcaagcattcttcgcattcgatagtgagattgggagttcaaaggctggcactactatttcatcgcctacctgtatgaatgactcacttggcacttctgagactattacttcctatgcaccttcaaatactgtcttatcagatgcaaaggatgctgtaaatgatggcgcaggggaacttccaacggtggcaacctcttgcagttttgatgaatgcgcagtcatggattctagcaccgttgtagtagttgacactgttatagttggccggaggttccatgagaacattgaattaagagaagatgcagacattacctttatgagagatcctcagaatgctaaggaccctgatgctataaagggtctgaatgtgaggagatgcttggatacttgcctcgagatcttgctaaagttttggctcctctagtggacaagcatcatgttgaatgcgagggatctgtggttggtctgcatgaacagcagtttggcaatgttcccatccagattactatccagaaatgtaaatctgacaatcaaagaaacaatgatccaaattgttgccaatccttatgggaaaatttcgttagcattgtcaaaagagaaaatttccggcgacctcacagtgcaagatatcagacaaattttaatttgatgatagctgatgttatggttaaccatgcacatgtttttagtgatatagaaaaatcatttttagcttcttttaagtcgttatcagatgatgggcaacggcttttcattaggatctacactcgaaaagggccatggttccggaagggcagcatctcatatcaagagatttcagatctggagcatgcagtcatggagttggagttggcaggttatattgacatgctttcttgcaccattgatccttttgaatatgatatgaaggagattcttgatgtgttaagtgttcctgaaatgaaggaaattctcaaggagcttcctaaggataacacaatctgcacacgtcgacatgagcttgttagcacccttctgtcttcataccgtaatggtacctgtgcatcactaccaaaacggatcctaaaatggactggaacctgtataagaatttcgaagatggcagatgaacttctgtggcgtatccagctacatttgccatctacaataac

SEQ ID NO: 220724 - DNA, 2842 bp, Zea Mays
cgagcccgcgcctgttcgcttcgctccgagccccctccaggcccaagcccgcccatctcccgaccacacacgcgcctattccttcccgccccgccgcgcgccgccacctctacggctccccggcggccatgctgaccgggcgggagagcctggtccgcctcatcggccggcgccgccgctcccctctccccgcttcgctcgtcgccgccctatccttaccctccccttccccctccacctccctcgcccaggcagacgatgggggtggctcgggagaagcggccgggggtgaggctggttcgacgtcgggaggaagccgcgtcgttggcatgggcgcggagtgggtggtctgccccgtctgcggcgattcgatccgagggtcggactactgcgtcaacactcacctcgatatgtgccttacaaggggaaccaaaaggaagttaacacagagcacccttcttaatttccaattcagtaaaaaggtttctgccgagcctacaataaacaatttgaacaatgagtccgagacagaaaatatgaaacagattgatgaaggtttgtcgagtgatcaagcattcttcgcattcgatagtgagattgggagttcaaaggctggcactactatttcatcgcctacctgtatgaatgactcacttggcacttctgagactattacttcctatgcaccttcaaatactgtcttatcagatgcaaaggatgctgtaaatgatggcgcaggggaacttccaacggtggcaacctcttgcagttttgatgaatgcgcagtcatggattctagcaccgttgtagtagttgacactgttatagttggccggaggttccatgagaacattgaattaagagaagatgcagacattacctttatgagagatcctcagaatgctaaggaccctgatgctataaaggtgctacatgcagggtctgaatgtgaggagatgcttggatacttgcctcgagatcttgctaaagttttggctcctctagtggacaagcatcatgttgaatgcgagggatctgtggttggtctgcatgaacagcagtttggcaatgttcccatccagattactatccagaaatgtaaatctgacaatcaaagaaacaatgatccaaattgttgccaatccttatgggaaaatttcgttagcattgtcaaaagagaaaatttccggcgacctcacagtgcaagatatcagacaaattttaatttgatgatagctgatgttatggttaaccatgcacatgtttttagtgatatagaaaaatcatttttagcttcttttaagtcgttatcagatgatgggcaacggcttttcattaggatctacactcgaaaagggccatggttccggaagggcagcatctcatatcaagagatttcagatctggagcatgcagtcatggagttggagttggcaggttatattgacatgctttcttgcaccattgatccttttgaatatgatatgaaggagattcttgatgtgttaagtgttcctgaaatgaaggaaattctcaaggagcttcctaaggataacacaatctgcacacgtcgacatgagcttgttagcacccttctgtcttcataccgtaatggtacctgtgcatcactaccaaaacggatcctaaaatggactggaacctgtataagaatttcgaagatggcagatgaacttctgtggcgtatccaggtatgaagatgcagtcaggattctaaagacactacttagcacagttgcttgtgatagacggcgaggatattgggcattgaggctatccattgatttggagcatatgggtcgtccaaatgagagcctatccacagctgaaggaggggcaactgatccatgggtccgtgctggttcaaagttcgctctgcaaaggagagttctgcgtttaagcaaacctccacgacgctggaaagttcccagttacgctgattatgttaagagaaatataagagaggtaagcattgaaggaaggccattgaattgcgagacaggagcaaagaatgtattttacggttacgatggggaactttgtggggtagaacagttggctttacaatattatgctgatgaaggtggtggttggcaaggtacccattcggaaggtagcatttggatgactatctttggccttctaatgtgggatgtgatgttttcagacatacaagatgttttccagtctaaattccagacagccccccttgatctgggaacagacgatttttacaaatctagagagaacattgcagaatctcagttgaagaggatacgggacggaatggccgaagagatgctaatcagctcatgggagctacatcaggggacatcctgccagggtgttaactgggcccgttattcgttaactgatctacgggctgttgttgcatgcgttggtggccaccgtttggcatcgctcctccgccatctagccgttgattacaggagctggtcgagtggaatgcccgatctgctgctatggcgtttccttgatgaaagaggtggaggtgaggctaaacttgtggaggtcaaaggacccagggaccagctgtcagagcaacagcgtgcatggattcttgttctcatggattttggatttgacgtggaagtttgcaaagtaagcccggtcaccaagcggagatagttcgcttgctaaatttattctgattattacgatgcaaaatgtatttggttgattagatagaagggcaaatctgtaacgcataagcaatggcattgttgtcgtgttgcactgaagtaacagtcaagctctacttgacatgctatctataactttgagagggaaggatgcatttaat

SEQ ID NO: 220725 - DNA, 3225 bp, Zea Mays
cgagcccgcgcctgttcgcttcgctccgagccccctccaggcccaagcccgcccatctcccgaccacacacgcgcctattccttcccgccccgccgcgcgccgccacctctacggctccccggcggccatgctgaccgggcgggagagcctggtccgcctcatcggccggcgccgccgctcccctctccccgcttcgctcgtcgccgccctatccttaccctccccttccccctccacctccctcgcccaggcagacgatgggggtggctcgggagaagcggccgggggtgaggctggttcgacgtcgggaggaagccgcgtcgttggcatgggcgcggagtgggtggtctgccccgtctgcggcgattcgatccgagggtcggactactgcgtcaacactcacctcgatatgtgccttacaaggggaaccaaaaggaagttaacacagagcacccttcttaatttccaattcagtaaaaaggtttctgccgagcctacaataaacaatttgaacaatgagtccgagacagaaaatatgaaacagattgatgaaggtttgtcgagtgatcaagcattcttcgcattcgatagtgagattgggagttcaaaggctggcactactatttcatcgcctacctgtatgaatgactcacttggcacttctgagactattacttcctatgcaccttcaaatactgtcttatcagatgcaaaggatgctgtaaatgatggcgcaggggaacttccaacggtggcaacctcttgcagttttgatgaatgcgcagtcatggattctagcaccgttgtagtagttgacactgttatagttggccggaggttccatgagaacattgaattaagagaagatgcagacattacctttatgagagatcctcagaatgctaaggaccctgatgctataaagggtctgaatgtgaggagatgcttggatacttgcctcgagatcttgctaaagttttggctcctctagtggacaagcatcatgttgaatgcgagggatctgtggttggtctgcatgaacagcagtttggcaatgttcccatccagattactatccagaaatgtaaatctgacaatcaaagaaacaatgatccaaattgttgccaatccttatgggaaaatttcgttagcattgtcaaaagagaaaatttccggcgacctcacagtgcaagatatcagacaaattttaatttgatgatagctgatgttatggttaaccatgcacatgtttttagtgatatagaaaaatcatttttagcttcttttaagtcgttatcagatgatgggcaacggcttttcattaggatctacactcgaaaagcactactttgtcttacggaccttcttcagccctcctgcatatttaccgaagaccttcctccacttaaactgcccagatttgcttctggacatttttaagaacactcccattctatgctcattcaattgataaggttgccaccgatccataagattcaaagctttcatattcgagatgccacagtttatatgctgggcattgcaagatggcttttttacaagcttttgacagcagagatctataatcaagcatgggggccatggttccggaagggcagcatctcatatcaagagatttcagatctggagcatgcagtcatggagttggagttggcaggttatattgacatgctttcttgcaccattgatccttttgaatatgatatgaaggagattcttgatgtgttaagtgttcctgaaatgaaggaaattctcaaggagcttcctaaggataacacaatctgcacacgtcgacatgagcttgttagcacccttctgtcttcataccgtaatggtacctgtgcatcactaccaaaacggatcctaaaatggactggaacctgtataagaatttcgaagatggcagatgaacttctgtggcgtatccagaggctcttttttctaaatggtgatcaagatctttcttcatttctattagtggaatttggtatagtgaagtttccagactatgtttgcagcatctcccatcgcatttttcaagaaagaaatgatctacttgagtacgaagacgtatgaagatgcagtcaggattctaaagacactacttagcacagttgcttgtgatagacggcgaggatattgggcattgaggctatccattgatttggagcatatgggtcgtccaaatgagagcctatccacagctgaaggaggggcaactgatccatgggtccgtgctggttcaaagttcgctctgcaaaggagagttctgcgtttaagcaaacctccacgacgctggaaagttcccagttacgctgattatgttaagagaaatataagagaggtaagcattgaaggaaggccattgaattgcgagacaggagcaaagaatgtattttacggttacgatggggaactttgtggggtagaacagttggctttacaatattatgctgatgaaggtggtggttggcaaggtacccattcggaaggtagcatttggatgactatctttggccttctaatgtgggatgtgatgttttcagacatacaagatgttttccagtctaaattccagacagccccccttgatctgggaacagacgatttttacaaatctagagagaacattgcagaatctcagttgaagaggatacgggacggaatggccgaagagatgctaatcagctcatgggagctacatcaggggacatcctgccagggtgttaactgggcccgttattcgttaactgatctacgggctgttgttgcatgcgttggtggccaccgtttggcatcgctcctccgccatctagccgttgattacaggagctggtcgagtggaatgcccgatctgctgctatggcgtttccttgatgaaagaggtggaggtgaggctaaacttgtggaggtcaaaggacccagggaccagctgtcagagcaacagcgtgcatggattcttgttctcatggattttggatttgacgtggaagtttgcaaagtaagcccggtcaccaagcggagatagttcgcttgctaaatttattctgattattacgatgcaaaatgtatttggttgattagatagaagggcaaatctgtaacgcataagcaatggcattgttgtcgtgttgcactgaagtaacagtcaagctctacttgacatgctatctataactttgagagggaaggatgcatttaat

SEQ ID NO: 220726 - DNA, 2953 bp, Zea Mays
cgagcccgcgcctgttcgcttcgctccgagccccctccaggcccaagcccgcccatctcccgaccacacacgcgcctattccttcccgccccgccgcgcgccgccacctctacggctccccggcggccatgctgaccgggcgggagagcctggtccgcctcatcggccggcgccgccgctcccctctccccgcttcgctcgtcgccgccctatccttaccctccccttccccctccacctccctcgcccaggcagacgatgggggtggctcgggagaagcggccgggggtgaggctggttcgacgtcgggaggaagccgcgtcgttggcatgggcgcggagtgggtggtctgccccgtctgcggcgattcgatccgagggtcggactactgcgtcaacactcacctcgatatgtgccttacaaggggaaccaaaaggaagttaacacagagcacccttcttaatttccaattcagtaaaaaggtttctgccgagcctacaataaacaatttgaacaatgagtccgagacagaaaatatgaaacagattgatgaaggtttgtcgagtgatcaagcattcttcgcattcgatagtgagattgggagttcaaaggctggcactactatttcatcgcctacctgtatgaatgactcacttggcacttctgagactattacttcctatgcaccttcaaatactgtcttatcagatgcaaaggatgctgtaaatgatggcgcaggggaacttccaacggtggcaacctcttgcagttttgatgaatgcgcagtcatggattctagcaccgttgtagtagttgacactgttatagttggccggaggttccatgagaacattgaattaagagaagatgcagacattacctttatgagagatcctcagaatgctaaggaccctgatgctataaagatgcttggatacttgcctcgagatcttgctaaagttttggctcctctagtggacaagcatcatgttgaatgcgagggatctgtggttggtctgcatgaacagcagtttggcaatgttcccatccagattactatccagaaatgtaaatctgacaatcaaagaaacaatgatccaaattgttgccaatccttatgggaaaatttcgttagcattgtcaaaagagaaaatttccggcgacctcacagtgcaagatatcagacaaattttaatttgatgatagctgatgttatggttaaccatgcacatgtttttagtgatatagaaaaatcatttttagcttcttttaagtcgttatcagatgatgggcaacggcttttcattaggatctacactcgaaaagggccatggttccggaagggcagcatctcatatcaagagatttcagatctggagcatgcagtcatggagttggagttggcaggttatattgacatgctttcttgcaccattgatccttttgaatatgatatgaaggagattcttgatgtgttaagtgttcctgaaatgaaggaaattctcaaggagcttcctaaggataacacaatctgcacacgtcgacatgagcttgttagcacccttctgtcttcataccgtaatggtacctgtgcatcactaccaaaacggatcctaaaatggactggaacctgtataagaatttcgaagatggcagatgaacttctgtggcgtatccagaggctcttttttctaaatggtgatcaagatctttcttcatttctattagtggaatttggtatagtgaagtttccagactatgtttgcagcatctcccatcgcatttttcaagaaagaaatgatctacttgagtacgaagacgtatgaagatgcagtcaggattctaaagacactacttagcacagttgcttgtgatagacggcgaggatattgggcattgaggctatccattgatttggagcatatgggtcgtccaaatgagagcctatccacagctgaaggaggggcaactgatccatgggtccgtgctggttcaaagttcgctctgcaaaggagagttctgcgtttaagcaaacctccacgacgctggaaagttcccagttacgctgattatgttaagagaaatataagagaggtaagcattgaaggaaggccattgaattgcgagacaggagcaaagaatgtattttacggttacgatggggaactttgtggggtagaacagttggctttacaatattatgctgatgaaggtggtggttggcaaggtacccattcggaaggtagcatttggatgactatctttggccttctaatgtgggatgtgatgttttcagacatacaagatgttttccagtctaaattccagacagccccccttgatctgggaacagacgatttttacaaatctagagagaacattgcagaatctcagttgaagaggatacgggacggaatggccgaagagatgctaatcagctcatgggagctacatcaggggacatcctgccagggtgttaactgggcccgttattcgttaactgatctacgggctgttgttgcatgcgttggtggccaccgtttggcatcgctcctccgccatctagccgttgattacaggagctggtcgagtggaatgcccgatctgctgctatggcgtttccttgatgaaagaggtggaggtgaggctaaacttgtggaggtcaaaggacccagggaccagctgtcagagcaacagcgtgcatggattcttgttctcatggattttggatttgacgtggaagtttgcaaagtaagcccggtcaccaagcggagatagttcgcttgctaaatttattctgattattacgatgcaaaatgtatttggttgattagatagaagggcaaatctgtaacgcataagcaatggcattgttgtcgtgttgcactgaagtaacagtcaagctctacttgacatgctatctataactttgagagggaaggatgcatttaat

SEQ ID NO: 220727 - DNA, 1579 bp, Zea Mays
gctggggcccctcccctacccatgtctttggtcctagcagccccctgcagggaagcatttcaactgaactcatcaattccttcatcatccatggaggccatgcccaggccaagtgtagctccctcgttgcagttgcaggcccgtccgtgcccgaggtggccgcgccggaagcactgcccaccgtcctccgtggcaagccggagggttgcttgctcggcctcggcggccgacgccgacgtggtcgacctcttcgacgccgctaagctaactgtggacaagttcgtgacgagcggcatggtggtggggctcggctccggccctgcgtccgccctggccatccagtacctcggcacgcgcctccggcggggctctctcgcgggcatcaccgcagtgacctcgtccgtgctcagtgcgagcgaggcagacaaggcagggatacgggctaacagctaccaggaaggcacccagattgattttgctttcactgatgctgaagcgatcgaggagggcacgctggccgcagtcatcgggcggcggaagaccgagagcggagagccctctttcatggcggagaaggcgatggctaaatcagctcacaagcttgccttcatcactggaaacgacaagtacgtgacgacgggcgtcgagggttctattccggtcctgattaaaagtgccattttcaggggaactggatagacactgctgaagagatcgacgatttgtttctaggagacgcagaggtttggaggaggccgtcgtttggaactgctggtccacttgggggtgaccacccactggttaccaaggagggccatcacgtgctcgatgttatcttcacaacaccaatccaagatcttggtcaggttgcagagaagttggacaaagttgatggcgttgtggatcacgggattatttgcagcaaccaaccatacgctgtcattgcatccaagggggaagtgcaggtcctggacgagaaatcttcggtgatacagtagcggtgaaacctttttggctgctctgcagattgttgcgcttttcggaacaggagtctactaccagctagctggaaaaaaaatgccatgagttaatcatgtacaaccagagctcttgttcaccactggacaattcagccggcatcagttgaagtctgtgtttcgcataaacttttttgaactggtactcagttaaccagattcgatgaatgtgaggcagagctacagcttcaactactcttctagtgtttcaggagttcgtctcttttcatatgattggttgcccgcggcatctcatctcctatatgtttggttgcttgtgtttggcgggtgattaaattagcacatgccttcataacgtttattagtgtttggaaagataaaagtaaccgcgcataggcgctggaatatatggattagatatgggccgtcggatgaaagatcgaggttgcctcgagagccaatgaaccgttagccgttgcataggaattttgtaggatttgtaagctgtagccttagcaaaatttactgcatgtccatttcgaacaatgaattaaaccctatgaaattactttggattacta

SEQ ID NO: 220728 - DNA, 1523 bp, Zea Mays
caactgaactcatcaattccttcatcatccatggaggccatgcccaggccaagtgtagctccctcgttgcagttgcaggcccgtccgtgcccgaggtggccgcgccggaagcactgcccaccgtcctccgtggcaagccggagggttgcttgctcggcctcggcggccgacgccgacgtggtcgacctcttcgacgccgctaagctaactgtggacaagttcgtgacgagcggcatggtggtggggctcggctccggccctgcgtccgccctggccatccagtacctcggcacgcgcctccggcggggctctctcgcgggcatcaccgcagtgacctcccaggtccgtgctcagtgcgagcgaggcagacaaggcagggatacgggctaacagctaccaggaaggcacccagattgattttgctttcactgatgctgaagcgatcgaggagggcacgctggccgcagtcatcgggcggcggaagaccgagagcggagagccctctttcatggcggagaaggcgatggctaaatcagctcacaagcttgccttcatcactggaaacgacaagtacgtgacgacgggcgtcgagggttctattccggtcctgattaaaagtgccattttcaggggaactggatagacactgctgaagagatcgacgatttgtttctaggagacgcagaggtttggaggaggccgtcgtttggaactgctggtccacttgggggtgaccacccactggttaccaaggagggccatcacgtgctcgatgttatcttcacaacaccaatccaagatcttggtcaggttgcagagaagttggacaaagttgatggcgttgtggatcacgggattatttgcagcaaccaaccatacgctgtcattgcatccaagggggaagtgcaggtcctggacgagaaatcttcggtgatacagtagcggtgaaacctttttggctgctctgcagattgttgcgcttttcggaacaggagtctactaccagctagctggaaaaaaaatgccatgagttaatcatgtacaaccagagctcttgttcaccactggacaattcagccggcatcagttgaagtctgtgtttcgcataaacttttttgaactggtactcagttaaccagattcgatgaatgtgaggcagagctacagcttcaactactcttctagtgtttcaggagttcgtctcttttcatatgattggttgcccgcggcatctcatctcctatatgtttggttgcttgtgtttggcgggtgattaaattagcacatgccttcataacgtttattagtgtttggaaagataaaagtaaccgcgcataggcgctggaatatatggattagatatgggccgtcggatgaaagatcgaggttgcctcgagagccaatgaaccgttagccgttgcataggaattttgtaggatttgtaagctgtagccttagcaaaatttactgcatgtccatttcgaacaatgaattaaaccctatgaaattactttggattacta

SEQ ID NO: 220729 - DNA, 1491 bp, Zea Mays
caactgaactcatcaattccttcatcatccatggaggccatgcccaggccaagtgtagctccctcgttgcagttgcaggcccgtccgtgcccgaggtggccgcgccggaagcactgcccaccgtcctccgtggcaagccggagggttgcttgctcggcctcggcggccgacgccgacgtggtcgacctcttcgacgccgctaagctaactgtggacaagttcgtgacgagcggcatggtggtggggctcggctccggccctgcgtccgccctggccatccagtacctcggcacgcgcctccggcggggctctctcgcgggcatcaccgcagtgacctcgtccgtgctcagtgcgagcgaggcagacaaggcagggatacgggctaacagctaccaggaaggcacccagcgatcgaggagggcacgctggccgcagtcatcgggcggcggaagaccgagagcggagagccctctttcatggcggagaaggcgatggctaaatcagctcacaagcttgccttcatcactggaaacgacaagtacgtgacgacgggcgtcgagggttctattccggtcctgattaaaagtgccattttcaggggaactggatagacactgctgaagagatcgacgatttgtttctaggagacgcagaggtttggaggaggccgtcgtttggaactgctggtccacttgggggtgaccacccactggttaccaaggagggccatcacgtgctcgatgttatcttcacaacaccaatccaagatcttggtcaggttgcagagaagttggacaaagttgatggcgttgtggatcacgggattatttgcagcaaccaaccatacgctgtcattgcatccaagggggaagtgcaggtcctggacgagaaatcttcggtgatacagtagcggtgaaacctttttggctgctctgcagattgttgcgcttttcggaacaggagtctactaccagctagctggaaaaaaaatgccatgagttaatcatgtacaaccagagctcttgttcaccactggacaattcagccggcatcagttgaagtctgtgtttcgcataaacttttttgaactggtactcagttaaccagattcgatgaatgtgaggcagagctacagcttcaactactcttctagtgtttcaggagttcgtctcttttcatatgattggttgcccgcggcatctcatctcctatatgtttggttgcttgtgtttggcgggtgattaaattagcacatgccttcataacgtttattagtgtttggaaagataaaagtaaccgcgcataggcgctggaatatatggattagatatgggccgtcggatgaaagatcgaggttgcctcgagagccaatgaaccgttagccgttgcataggaattttgtaggatttgtaagctgtagccttagcaaaatttactgcatgtccatttcgaacaatgaattaaaccctatgaaattactttggattacta

SEQ ID NO: 220730 - DNA, 984 bp, Zea Mays
caatgttgttagatctattaatgcgatgttctctgtcttatttttatcctacaagtcatttcgagatatgtggttgctgatcagatgcgggcaatgtcaattttattattggaattgttaacttgacactcattcaccttctggactgaaaaccaagacagtactgcatctatttagttaaacatatattacttggctgctaacacaactaagagaaatactgaaaatcaatccttcagtctatccttccataggattttaatttgtgcatgatagagagttttacatgtcagaaatttatagatgtcagagagttcattgcagttcatctccttcactgcatcttgcatattttttctctctttcagctggttacagtaacaaggaaccaccattttgatgcaaaggagcagatgcgacaggatcacaagtaggaggagctgcgacgatgctgtagcgagagacatgggtgccgaggtcgttgtgctgcggtggtggcaggacaggaaggaaacgaaaaagcaggagccagggttgttcaacaacgtgaccgagtcgctgaggcgaggaagagtaaggtgaaggcactcgtcgacgcctttgagactgacagagcgtcatctcgctgcaggaaaccagcaagcctgctgctgctccagctatgaaagtaggtgtcgtgccatgagtgcttcttgacctgcagtgtgcatgatcacctttcttggaattttaaactttttttggttgttagtgaccgtaaaagtggcgcttgttgaggtttgctcgttcccatgtaaactgacttttctcatgggagttttcatacttttgtagtgctagaaaaaggaaagtctgtacaggttttgtgtctatgcaaggcttgagaagttggcattgtactgataagtgataagtaaacaagttattgtaatgatttaaactagattgttttgaaaggaaatggaatgcataaagcaaattaaa

SEQ ID NO: 220731 - DNA, 4348 bp, Zea Mays
ctcaagctcaaggaccgcgtcgacagggtcgggatcgacatgcccacgatcgaggaagcggcgaacgccctgcacatactgcccagtaggaagcggatcatgcccattcttcacgacgtcagcggaatcatcaagcctcgcaggatgacacttctgttaggtccgcctggatcaggcaagaccactttgttgctcgccttggccggaaggcttgacaaagacctcaaggtttcaggcaaagtgacctataatggtcatgagatgacagagtttgttccagagaggacggccgcttacatcagccagcatgacctccacataggagagatgactgtgagggagacgcttgcattctctgcacgctgccagggtgtcggctcccgttttgatatgctgactgagttgtcgaggcgagagaaggcggctaatatcaagcctgatgctgatattgatgcattcatgaaggcgtctgcaatgggtgggcaagatgccaatgtggtcactgactatattctgaagatattaggactagagatatgtgcagacacaatggtaggggatgagatgctcaggggcatatctggtggacaacggaagcgcgttacaactggtgagatgctggttgggccagccagggcgcttttcatggacgagatctcaactgggcttgatagctccactacattccaaattgtgaactcgctgaggcagtccattcacatcctcggtggcacagctgttatctccctactgcagccagcacctgagacatataacttgtttgatgatatcatactcctctcagatggtcaggttgtgtaccagggtcccagagaagaagtgcttgagttttttgagtctgtaggtttcagatgccctgagaggaagggcgttgctgacttcctgcaagaagtgacctcgaaaaaagatcagaaacagtactgggcgcgacctaatgagccctacaggtttgtggctgtgaaggaatttgcgactgcattcaagtcatcccacacagggagatctataacaaatgagcttgctgttccgttcgacaagagcaaaagccacccagccgcactaaccaccacaaggtatggtgtgagtggcaaggagctgctcaaagcaaacatagaccgggagatccttctcatgagaggaactcttttgtctacatgttcagaaccttccagctgatgctcatgtcaatcattgcaatgactctcttcttccgtaccaagatgaagcatggcacggtgaatgacgggggtctctacatgggcgcactcttctttggtgtgcttatgatcatgttcaatggcttctctgagctggcactaactgtcttcaagctgcctgtattcttcaagcagagggatctccttttctttccagcatggtcctatactataccctcatggatcctcaaggtacccatcacatttatcgaggttggtggttatgtattcttgacatactatgtcattgggttcgacccaaatgtcggcaggttcttcaagcagtatctgcttctgttagtagtcaatcagatggcagcatcactcttccggtttattggtggggtatcgaggaacatgattgttgctaatgtcttcgcatcgttcatgttgctagttgtcatggtgttgggaggatttattctagtaagagataaagtgaagaaatggtggatctggggctactggatctccccaatgatgtatgcacaaaatgccatttcagtgaatgagatgttgggccacagctgggacaaaatattgaatagcactgcatccaacgagaccctaggtgtgcaagtccttaagtcgcgtggagtattcaccgaagcaaagtggtactggattggctttggtgctatggttggtttcaccatactcttcaacgctctcttcactgttgcccttacatatcttaagccatatggcaactcccggccatctgtatccgaagaggagctgaaggagaagcatgcaaacatcaaaggggaggttctggatggcaatcacttggtatcagcaagcagtcatcgatcaacaggagttaaccctgaaactgattcagcaatcatggaagatgattctgccttgactaaaaggggaatgatcctcccatttgtcccgctctcgctcacctttgacaacatcaaatactctgttgacatgccacaggaaatgaaagctcaaggtgtacaagaagatcgtttggagctcctcaaaggtgtcagtggatcttttaggccgggtgtgttgaccgcactgatgggcgttagcggtgcaggaaaaactactttgatggatgtgttggctgggagaaagacaggtggatacattgaaggagacatccgtatttcaggatacccaaagaaacaagacacctttgcacgtgtatcaggatactgtgaacaaaatgatatccactcgccacaggtgacagtctatgagtccctgcttttctcagcatggctccggcttcccaaggacgtcgattcaaacaaaagaaagatcttcattgaggaggtgatggagcttgtggagctgaaaccactgagaaatgctttggttggacttcctggagtgaatggtctgtcaactgagcagaggaaaaggcttaccattgctgtggaacttgttgcaaatccatctatcatctttatggatgagccaacctcagggcttgatgcccgagcagctgcaattgtgatgcggacggtgaggaacactgtcgatactggtagaactgtggtctgcacgatacatcagcctagcattgacatatttgaagcatttgatgagcttttcctcatgaagcgtggtggagaagagatctatgctggtccacttggacatcattcttcagatctaatcaagtattttgagtcacttcatggggtcagcaaaattaaagatggctacaatccagcaacatggatgctggaagtgaccacaacttctcaggaacagattctaggtgttgatttcagtgacatatacaagaaatctgaactctaccagaggaacaaggccttgataaaggaattgagccaaccagcaccaggttcaactgacctgcatttccctagcaagtatgcgcagtcttccattacacaatgcgtggcttgcctatggaagcagaacctgtcatactggaggaaccctccttacaataccgttaggttctttttcactaccatcattgctctcctccttggcaccatcttttgggacctcggcggcaaaacgtatacatcacaagacttgatgaatgccatgggatcaatgtactctgcggtgctgttcattggagtcatgaattgtacctcagttcagccagtggtggccgtggagcgaacagtcttttaccgtgaaagagctgctggcatgtactcagctttcccatacgcgtttggccaggttgtcattgagcttccatacgcactggctcaggatatcctttacggtgtcatagtgtactctatgatagggttcgagtggacggctgctaagttcttctggtacctcttctttgggtacttcacgctgctctacttcacattctacggcatgatggccgtggggctgacacctaactaccacatcgccgcgatcgtctcctcggcattctacgccatctggaacctcttctccgggttcatcatcccccgaccgaaagtgccgatctggtggaggtggtactgctggatatgccccgtggcgtggacgctgtacgggctggttgtgtcacagttcggtgacgtcatgactccgatggacgacggaagggccgtgaaggtgttcgtcgaggactacttcgacttcaagcacagctggcttgggtgggtggccgccgtggtggtggcgttcgccgtgctctttgcgaccctgtttggctttgccatcatgaagcttaacttccagaagagataatgacgataggagttgggaaatcacctcctaggagacaaagggatttttgcattcgttgggtcgtgcaagtagatttgactgtgcatattgggagagtacgccataatatatggattcgttgattagttaaagttatagaagttattgtgtgctcctgttttttttttttgataggatattgtgctcctgtttttttttgataggatatattgtgctccttttctaggagggtgatgccgtagtactttgtaaagaatatttcacacatccagtaaaattccttgtcgccccttgcaaatgatgagttggagaaagcaaacgaaatacctcgtgcactgctgttgacgtataagtgtataatgtatatatgtttttgaatataatggcaagagctctgaagaatg

SEQ ID NO: 220732 - DNA, 4975 bp, Zea Mays
acaaaaaccccaccctccgcctgagcgctctcccatcgtcccaaagcgtggcaagcgcacgccccatcccctccaaggctccaagcctccaacacaacggaatctcgttggtaacccggtgcctgctcggcgttgtggacttgtggtgcggattggtagggggagcaggaggcggcagcagagggaaggaggagggacggcgagatggacgcggcgggggacattcagaaggtggcgagtatgcggcggggcgacagcggctccatttggcggcgcggtgacgacgtgttctcgcgctcctccagggaggaggacgacgaggaggcgcttcgctgggccgcgctagagaagctgcccacctacgaccgcgtccgccgcgccatggtcccgctcggcctcggcgccgacggcgccgaggcggcgggcaggaaggggctcgtcgacgtggacgtgctcagcctcggcccacgcgagaggcgggcgctgctggagcgcctcgtccgcgtcgccgacgaggacaacgagcggttcctgctcaagctcaaggaccgcgtcgacagggtcgggatcgacatgcccacgatcgaggtacggttccagaaccttgaggcggaggcggaggtgcgcgtcggcagcagcggcctccccaccgtcctcaactccgtcgtcaacacgatcgaggaagcggcgaacgccctgcacatactgcccagtaggaagcggatcatgcccattcttcacgacgtcagcggaatcatcaagcctcgcaggatgacacttctgttaggtccgcctggatcaggcaagaccactttgttgctcgccttggccggaaggcttgacaaagacctcaaggtttcaggcaaagtgacctataatggtcatgagatgacagagtttgttccagagaggacggccgcttacatcagccagcatgacctccacataggagagatgactgtgagggagacgcttgcattctctgcacgctgccagggtgtcggctcccgttttgatatgctgactgagttgtcgaggcgagagaaggcggctaatatcaagcctgatgctgatattgatgcattcatgaaggcgtctgcaatgggtgggcaagatgccaatgtggtcactgactatattctgaagatattaggactagagatatgtgcagacacaatggtaggggatgagatgctcaggggcatatctggtggacaacggaagcgcgttacaactggtgagatgctggttgggccagccagggcgcttttcatggacgagatctcaactgggcttgatagctccactacattccaaattgtgaactcgctgaggcagtccattcacatcctcggtggcacagctgttatctccctactgcagccagcacctgagacatataacttgtttgatgatatcatactcctctcagatggtcaggttgtgtaccagggtcccagagaagaagtgcttgagttttttgagtctgtaggtttcagatgccctgagaggaagggcgttgctgacttcctgcaagaagtgacctcgaaaaaagatcagaaacagtactgggcgcgacctaatgagccctacaggtttgtggctgtgaaggaatttgcgactgcattcaagtcatcccacacagggagatctataacaaatgagcttgctgttccgttcgacaagagcaaaagccacccagccgcactaaccaccacaaggtatggtgtgagtggcaaggagctgctcaaagcaaacatagaccgggagatccttctcatgagaggaactcttttgtctacatgttcagaaccttccagctgatgctcatgtcaatcattgcaatgactctcttcttccgtaccaagatgaagcatggcacggtgaatgacgggggtctctacatgggcgcactcttctttggtgtgcttatgatcatgttcaatggcttctctgagctggcactaactgtcttcaagctgcctgtattcttcaagcagagggatctccttttctttccagcatggtcctatactataccctcatggatcctcaaggtacccatcacatttatcgaggttggtggttatgtattcttgacatactatgtcattgggttcgacccaaatgtcggcaggttcttcaagcagtatctgcttctgttagtagtcaatcagatggcagcatcactcttccggtttattggtggggtatcgaggaacatgattgttgctaatgtcttcgcatcgttcatgttgctagttgtcatggtgttgggaggatttattctagtaagagataaagtgaagaaatggtggatctggggctactggatctccccaatgatgtatgcacaaaatgccatttcagtgaatgagatgttgggccacagctgggacaaaatattgaatagcactgcatccaacgagaccctaggtgtgcaagtccttaagtcgcgtggagtattcaccgaagcaaagtggtactggattggctttggtgctatggttggtttcaccatactcttcaacgctctcttcactgttgcccttacatatcttaagccatatggcaactcccggccatctgtatccgaagaggagctgaaggagaagcatgcaaacatcaaaggggaggttctggatggcaatcacttggtatcagcaagcagtcatcgatcaacaggagttaaccctgaaactgattcagcaatcatggaagatgattctgccttgactaaaaggggaatgatcctcccatttgtcccgctctcgctcacctttgacaacatcaaatactctgttgacatgccacaggaaatgaaagctcaaggtgtacaagaagatcgtttggagctcctcaaaggtgtcagtggatcttttaggccgggtgtgttgaccgcactgatgggcgttagcggtgcaggaaaaactactttgatggatgtgttggctgggagaaagacaggtggatacattgaaggagacatccgtatttcaggatacccaaagaaacaagacacctttgcacgtgtatcaggatactgtgaacaaaatgatatccactcgccacaggtgacagtctatgagtccctgcttttctcagcatggctccggcttcccaaggacgtcgattcaaacaaaagaaagatcttcattgaggaggtgatggagcttgtggagctgaaaccactgagaaatgctttggttggacttcctggagtgaatggtctgtcaactgagcagaggaaaaggcttaccattgctgtggaacttgttgcaaatccatctatcatctttatggatgagccaacctcagggcttgatgcccgagcagctgcaattgtgatgcggacggtgaggaacactgtcgatactggtagaactgtggtctgcacgatacatcagcctagcattgacatatttgaagcatttgatgagcttttcctcatgaagcgtggtggagaagagatctatgctggtccacttggacatcattcttcagatctaatcaagtattttgagtcacttcatggggtcagcaaaattaaagatggctacaatccagcaacatggatgctggaagtgaccacaacttctcaggaacagattctaggtgttgatttcagtgacatatacaagaaatctgaactctaccagaggaacaaggccttgataaaggaattgagccaaccagcaccaggttcaactgacctgcatttccctagcaagtatgcgcagtcttccattacacaatgcgtggcttgcctatggaagcagaacctgtcatactggaggaaccctccttacaataccgttaggttctttttcactaccatcattgctctcctccttggcaccatcttttgggacctcggcggcaaaacgtatacatcacaagacttgatgaatgccatgggatcaatgtactctgcggtgctgttcattggagtcatgaattgtacctcagttcagccagtggtggccgtggagcgaacagtcttttaccgtgaaagagctgctggcatgtactcagctttcccatacgcgtttggccaggttgtcattgagcttccatacgcactggctcaggatatcctttacggtgtcatagtgtactctatgatagggttcgagtggacggctgctaagttcttctggtacctcttctttgggtacttcacgctgctctacttcacattctacggcatgatggccgtggggctgacacctaactaccacatcgccgcgatcgtctcctcggcattctacgccatctggaacctcttctccgggttcatcatcccccgaccgaaagtgccgatctggtggaggtggtactgctggatatgccccgtggcgtggacgctgtacgggctggttgtgtcacagttcggtgacgtcatgactccgatggacgacggaagggccgtgaaggtgttcgtcgaggactacttcgacttcaagcacagctggcttgggtgggtggccgccgtggtggtggcgttcgccgtgctctttgcgaccctgtttggctttgccatcatgaagcttaacttccagaagagataatgacgataggagttgggaaatcacctcctaggagacaaagggatttttgcattcgttgggtcgtgcaagtagatttgactgtgcatattgggagagtacgccataatatatggattcgttgattagttaaagttatagaagttattgtgtgctcctgttttttttttttgataggatattgtgctcctgtttttttttgataggatatattgtgctccttttctaggagggtgatgccgtagtactttgtaaagaatatttcacacatccagtaaaattccttgtcgccccttgcaaatgatgagttggagaaagcaaacgaaatacctcgtgcactgctgttgacgtataagtgtataatgtatatatgtttttgaatataatggcaagagctctgaagaatg

SEQ ID NO: 220733 - DNA, 4895 bp, Zea Mays
acaaaaaccccaccctccgcctgagcgctctcccatcgtcccaaagcgtggcaagcgcacgccccatcccctccaaggctccaagcctccaacacaacggaatctcgttggtaacccggtgcctgctcggcgttgtggacttgtggtgcggattggtagggggagcaggaggcggcagcagagggaaggaggagggacggcgagatggacgcggcgggggacattcagaaggtggcgagtatgcggcggggcgacagcggctccatttggcggcgcggtgacgacgtgttctcgcgctcctccagggaggaggacgacgaggaggcgcttcgctgggccgcgctagagaagctgcccacctacgaccgcgtccgccgcgccatggtcccgctcggcctcggcgccgacggcgccgaggcggcgggcaggaaggggctcgtcgacgtggacgtgctcagcctcggcccacgcgagaggcgggcgctgctggagcgcctcgtccgcgtcgccgacgaggacaacgagcggttcctgctcaagctcaaggaccgcgtcgacagggtcgggatcgacatgcccacgatcgaggtacggttccagaaccttgaggcggaggcggaggtgcgcgtcggcagcagcggcctccccaccgtcctcaactccgtcgtcaacacgatcgaggaagcggcgaacgccctgcacatactgcccagtaggaagcggatcatgcccattcttcacgacgtcagcggaatcatcaagcctcgcaggatgacacttctgttaggtccgcctggatcaggcaagaccactttgttgctcgccttggccggaaggcttgacaaagacctcaaggtttcaggcaaagtgacctataatggtcatgagatgacagagtttgttccagagaggacggccgcttacatcagccagcatgacctccacataggagagatgactgtgagggagacgcttgcattctctgcacgctgccagggtgtcggctcccgttttgatatgctgactgagttgtcgaggcgagagaaggcggctaatatcaagcctgatgctgatattgatgcattcatgaaggcgtctgcaatgggtgggcaagatgccaatgtggtcactgactatattctgaagatattaggactagagatatgtgcagacacaatggtaggggatgagatgctcaggggcatatctggtggacaacggaagcgcgttacaactggtgagatgctggttgggccagccagggcgcttttcatggacgagatctcaactgggcttgatagctccactacattccaaattgtgaactcgctgaggcagtccattcacatcctcggtggcacagctgttatctccctactgcagccagcacctgagacatataacttgtttgatgatatcatactcctctcagatggtcaggttgtgtaccagggtcccagagaagaagtgcttgagttttttgagtctgtaggtttcagatgccctgagaggaagggcgttgctgacttcctgcaagaagtgacctcgaaaaaagatcagaaacagtactgggcgcgacctaatgagccctacaggtttgtggctgtgaaggaatttgcgactgcattcaagtcatcccacacagggagatctataacaaatgagcttgctgttccgttcgacaagagcaaaagccacccagccgcactaaccaccacaaggtatggtgtgagtggcaaggagctgctcaaagcaaacatagaccgggagatccttctcatgagaggaactcttttgtctacatgttcagaaccttccagctgatgctcatgtcaatcattgcaatgactctcttcttccgtaccaagatgaagcatggcacggtgaatgacgggggtctctacatgggcgcactcttctttggtgtgcttatgatcatgttcaatggcttctctgagctggcactaactgtcttcaagctgcctgtattcttcaagcagagggatctccttttctttccagcatggtcctatactataccctcatggatcctcaaggttcttcaagcagtatctgcttctgttagtagtcaatcagatggcagcatcactcttccggtttattggtggggtatcgaggaacatgattgttgctaatgtcttcgcatcgttcatgttgctagttgtcatggtgttgggaggatttattctagtaagagataaagtgaagaaatggtggatctggggctactggatctccccaatgatgtatgcacaaaatgccatttcagtgaatgagatgttgggccacagctgggacaaaatattgaatagcactgcatccaacgagaccctaggtgtgcaagtccttaagtcgcgtggagtattcaccgaagcaaagtggtactggattggctttggtgctatggttggtttcaccatactcttcaacgctctcttcactgttgcccttacatatcttaagccatatggcaactcccggccatctgtatccgaagaggagctgaaggagaagcatgcaaacatcaaaggggaggttctggatggcaatcacttggtatcagcaagcagtcatcgatcaacaggagttaaccctgaaactgattcagcaatcatggaagatgattctgccttgactaaaaggggaatgatcctcccatttgtcccgctctcgctcacctttgacaacatcaaatactctgttgacatgccacaggaaatgaaagctcaaggtgtacaagaagatcgtttggagctcctcaaaggtgtcagtggatcttttaggccgggtgtgttgaccgcactgatgggcgttagcggtgcaggaaaaactactttgatggatgtgttggctgggagaaagacaggtggatacattgaaggagacatccgtatttcaggatacccaaagaaacaagacacctttgcacgtgtatcaggatactgtgaacaaaatgatatccactcgccacaggtgacagtctatgagtccctgcttttctcagcatggctccggcttcccaaggacgtcgattcaaacaaaagaaagatcttcattgaggaggtgatggagcttgtggagctgaaaccactgagaaatgctttggttggacttcctggagtgaatggtctgtcaactgagcagaggaaaaggcttaccattgctgtggaacttgttgcaaatccatctatcatctttatggatgagccaacctcagggcttgatgcccgagcagctgcaattgtgatgcggacggtgaggaacactgtcgatactggtagaactgtggtctgcacgatacatcagcctagcattgacatatttgaagcatttgatgagcttttcctcatgaagcgtggtggagaagagatctatgctggtccacttggacatcattcttcagatctaatcaagtattttgagtcacttcatggggtcagcaaaattaaagatggctacaatccagcaacatggatgctggaagtgaccacaacttctcaggaacagattctaggtgttgatttcagtgacatatacaagaaatctgaactctaccagaggaacaaggccttgataaaggaattgagccaaccagcaccaggttcaactgacctgcatttccctagcaagtatgcgcagtcttccattacacaatgcgtggcttgcctatggaagcagaacctgtcatactggaggaaccctccttacaataccgttaggttctttttcactaccatcattgctctcctccttggcaccatcttttgggacctcggcggcaaaacgtatacatcacaagacttgatgaatgccatgggatcaatgtactctgcggtgctgttcattggagtcatgaattgtacctcagttcagccagtggtggccgtggagcgaacagtcttttaccgtgaaagagctgctggcatgtactcagctttcccatacgcgtttggccaggttgtcattgagcttccatacgcactggctcaggatatcctttacggtgtcatagtgtactctatgatagggttcgagtggacggctgctaagttcttctggtacctcttctttgggtacttcacgctgctctacttcacattctacggcatgatggccgtggggctgacacctaactaccacatcgccgcgatcgtctcctcggcattctacgccatctggaacctcttctccgggttcatcatcccccgaccgaaagtgccgatctggtggaggtggtactgctggatatgccccgtggcgtggacgctgtacgggctggttgtgtcacagttcggtgacgtcatgactccgatggacgacggaagggccgtgaaggtgttcgtcgaggactacttcgacttcaagcacagctggcttgggtgggtggccgccgtggtggtggcgttcgccgtgctctttgcgaccctgtttggctttgccatcatgaagcttaacttccagaagagataatgacgataggagttgggaaatcacctcctaggagacaaagggatttttgcattcgttgggtcgtgcaagtagatttgactgtgcatattgggagagtacgccataatatatggattcgttgattagttaaagttatagaagttattgtgtgctcctgttttttttttttgataggatattgtgctcctgtttttttttgataggatatattgtgctccttttctaggagggtgatgccgtagtactttgtaaagaatatttcacacatccagtaaaattccttgtcgccccttgcaaatgatgagttggagaaagcaaacgaaatacctcgtgcactgctgttgacgtataagtgtataatgtatatatgtttttgaatataatggcaagagctctgaagaatg

SEQ ID NO: 220734 - DNA, 3971 bp, Zea Mays
ctgacacataaacagagccagcgtcggggacctttactgccacagaacggaacagaacagaggggtgggggtctttcgcaacgcaagtagtgctggagattggagagtggagacagaaggcaagggggccgtcgcagaattcgcgccaccgcccgcgatggcttcgtcctcgaaggcctccgattcctcccaacgatccaagcggtcggatcaggggatgggcaaggacgccgctgccgcctctgttgtcccgatccacgcgaacctgacgcagctgatacggcaagtccaatcggggcgcctcgcgtacatcaaggagaaattggaggtgaacaggaaaacgctgcagaggcactcctgctcgctgttcgacgtggcagcggcggcggaggtggcgtcgaggggcaccgatggcggcaacgcgctgtcacagcgcgcggcggagagacagtgtgggtcagacctggcaaacgggataggggagagggacgtggtttccgttcaggaggagaacctggctaccggtacgctcgcgctctccagctcgggcgctaccgcgcagcggacaattgtgcggttcgtgaagctgccgctggttgagaagatccctccgtacaccacttggatcttcctggacaaaaaccaaagaatggctgacgatcagtcagttgttggtaggagaaggatatactatgatacagttggaaacgaggctctgatctgcagtgacagtgatgaagaaattccagaaccagaggaagagaaacactttttcacaaagggagaagatcatttgatatggagagctactcaagaccatgggttaaaccaagaggttgttaatgtcctttgccagtttattggtgcaaccccatcagaaattgaggaaagatctgaagtcctatttgagaaaaatgagaagcactcaggatcttcagataagatagagagccgactttctcttgacaaaactatggatgccgttctggattcttttgataatctcttctgccgcagatgcttggtttttgattgccgccttcatggttgttcacagaatttggtatttccatgtgagaagcaaccctacagctttgaccctgatgaaaacaagaagccatgtggtcatttgtgctaccttcgatggagagaaggatttaaagagatgcatgatgatggtcttgctggtggtgcaacatatactatggaatcgggaactgcctcacagagagttgatgttaatgttatgtatgaatcagaagattcaaaccgacagaaaggcaacattaggtccatgacactagttggaaccagtggatcaaaaataatttcttctgtcagtgcggaagaaagcactactactccttcagcagatatctctgaaacagagaatgtatcctctgatttgcctcccagtagtttaaggaaacacaagatttcaaaacatggacctaggtacagggagcattctcctggcaaaaggcagaaggttttcacttctgacatttcttttgaaggcaatataatgaataaactttccattccggagattcgtgacacaagactagagtccagagaatctggtggtgataaactacgaattcttgacgagtccactaagaagacttcaaggaaagatatgtgtggggaaagcccagctactaccatggaaaatgtgggaagacagagtaataaagtgtcttcaacaaagaatttcttggagtccactctttcttgttggagtgccttagagcgagatctatacttgaagggcatagagatatttggaaagaacagctgtctcatcgccagaaacttactatctggtcttaagacctgcatagaagtggcaaactacatgtataacaatggtgcagcgatggcgaagagacctctcttgaataaatccatctcaggcgactttgcagaaaatgaacaagactacatggagcaagacatggctgccagaacaagaatctatcgtcggaggggccgcaatcgaaagctgaaatatacttggaaatctgcagggcatccaactgttagaaaaagaactgatgacgggaagcaatgttacacacaatatagcccatgtgcgtgccagcaaatgtgtggtaaagattgcccctgtgcggacaagggaacttgctgtgagaagtactgtgggtgttcgaagagctgcaaaaacaagtttagaggctgtcattgtgcaaaaagccaatgcagaagcagacagtgcccctgttttgcagccagtcgtgaatgtgatccagatgtttgtaggaattgctgggtgagctgtggagatggttcactaggtgagccacttgcaagaggtgatggttatcagtgtggaaatatgaagctccttttgaaacaacagcaaaggattttgttaggaagatctgatgttgcaggttggggtgcattcattaagaatcctgtaaataaaaatgattatcttggagaatatactggtgaattgatctctcacaaggaagcagacaaacgcggcaaaatttatgaccgggcaaactcatcttttctgttcgatttaaatgaccagtatgtgttggatgcttatcgcaagggggacaaattgaagttcgcaaatcactcatctaaccccaactgctatgcaaaggtgatgctggtggctggcgaccatcgggttggtatatatgcgaaggagcatattgaggctagcgaggaactcttttatgattatcgttatggacctgaccaggctccagcttgggctaggagacccgaaggatcaaagaaggacgaggcatccgtctctcaccgtcgagcacacaaagtggctcgatagctgaagagtcgctccggatgatacaatatgcagtaaacttaatacttaatacatgattcagtcctagttcattggtagataaacatgctatatactatccattagtaaataaactctcattcatcgagttggagaataaatgcgtataaacatatgtggacctcaggtcgggaaggtggcaaccttgttagtttgagcaccaacaggttctcaaacttgagtggctattgctagagtatcaaataatggctgcgactatagccttgtttgtatattttcttggtgagatgaaataatttgtcaaacactcaaatgtacactttattcctgaaagtatttgatgattcattagtagtgttactagagagcctgatagtagggtatttgcatgtcacattattggctgcagacttccgagacaaacgtgattggctgattgtgcacttgcgccctcttttcaaactaaattaacatttacaaggcaagactaataaatatcccgacccaacaaaaaaaaagagcgggcaaataattcagtcgctaacttgttacatccttttcttgcggcgacagtagatggtagaataacagttcattccatgtatctgggactccaggaaggcaccagtggctgcagtcctgctggacgctcgacgcggttaaacctaccgtcttccggccatatacagatgggtgaccatctatcctgaccccagacagattagtaacgttcagaactgtcacaggagtcttcatttgcttcgtgacctgttccaagatcaagtttctctcaggcaccggcctagcacgggtgtcattgaggggcagcatgctctccctgcagtgtccccctgaattccactccccaccactgaaattgacaacaactagttacatagacctgcttgcgcagagatagcaacagctgcagcagcagctctaatgacactcgtgttagattgattaatcaaagaccaaacctgaaatgtgacggggatgagcttcggaagaacactcgagttagctgtggattgatgtgactgtcgacccaggatgcccaggtggttagtgctctttggaaagcggtagaggcatcgagatggggatggacatgatctccctcttgataatagttcac

SEQ ID NO: 220735 - DNA, 2771 bp, Zea Mays
cactactttgtgatattcatggtcattgtaaggagattggactgtatgcgtgatgggtcatgcaagtacacttgagtttatttgcttgattaattctaaaccaaagaatggctgacgatcagtcagttgttggtaggagaaggatatactatgatacagttggaaacgaggctctgatctgcagtgacagtgatgaagaaattccagaaccagaggaagagaaacactttttcacaaagggagaagatcatttgatatggagagctactcaagaccatgggttaaaccaagaggttgttaatgtcctttgccagtttattggtgcaaccccatcagaaattgaggaaagatctgaagtcctatttgagaaaaatgagaagcactcaggatcttcagataagatagagagccgactttctcttgacaaaactatggatgccgttctggattcttttgataatctcttctgccgcagatgcttggtttttgattgccgccttcatggttgttcacagaatttggtatttccatgtgagaagcaaccctacagctttgaccctgatgaaaacaagaagccatgtggtcatttgtgctaccttcgactgtctcatcgccagaaacttactatctggtcttaagacctgcatagaagtggcaaactacatgtataacaatggtgcagcgatggcgaagagacctctcttgaataaatccatctcaggcgactttgcagaaaatgaacaagactacatggagcaagacatggctgccagaacaagaatctatcgtcggaggggccgcaatcgaaagctgaaatatacttggaaatctgcagggcatccaactgttagaaaaagaactgatgacgggaagcaatgttacacacaatatagcccatgtgcgtgccagcaaatgtgtggtaaagattgcccctgtgcggacaagggaacttgctgtgagaagtactgtgggtgttcgaagagctgcaaaaacaagtttagaggctgtcattgtgcaaaaagccaatgcagaagcagacagtgcccctgttttgcagccagtcgtgaatgtgatccagatgtttgtaggaattgctggctgtggagatggttcactaggtgagccacttgcaagaggtgatggttatcagtgtggaaatatgaagctccttttgaaacaacagcaaaggattttgttaggaagatctgatgttgcaggttggggtgcattcattaagaatcctgtaaataaaaatgattatcttggagaatatactggtgaattgatctctcacaaggaagcagacaaacgcggcaaaatttatgaccgggcaaactcatcttttctgttcgatttaaatgaccagtatgtgttggatgcttatcgcaagggggacaaattgaagttcgcaaatcactcatctaaccccaactgctatgcaaaggtgatgctggtggctggcgaccatcgggttggtatatatgcgaaggagcatattgaggctagcgaggaactcttttatgattatcgttatggacctgaccaggctccagcttgggctaggagacccgaaggatcaaagaaggacgaggcatccgtctctcaccgtcgagcacacaaagtggctcgatagctgaagagtcgctccggatgatacaatatgcagtaaacttaatacttaatacatgattcagtcctagttcattggtagataaacatgctatatactatccattagtaaataaactctcattcatcgagttggagaataaatgcgtataaacatatgtggacctcaggtcgggaaggtggcaaccttgttagtttgagcaccaacaggttctcaaacttgagtggctattgctagagtatcaaataatggctgcgactatagccttgtttgtatattttcttggtgagatgaaataatttgtcaaacactcaaatgtacactttattcctgaaagtatttgatgattcattagtagtgttactagagagcctgatagtagggtatttgcatgtcacattattggctgcagacttccgagacaaacgtgattggctgattgtgcacttgcgccctcttttcaaactaaattaacatttacaaggcaagactaataaatatcccgacccaacaaaaaaaaagagcgggcaaataattcagtcgctaacttgttacatccttttcttgcggcgacagtagatggtagaataacagttcattccatgtatctgggactccaggaaggcaccagtggctgcagtcctgctggacgctcgacgcggttaaacctaccgtcttccggccatatacagatgggtgaccatctatcctgaccccagacagattagtaacgttcagaactgtcacaggagtcttcatttgcttcgtgacctgttccaagatcaagtttctctcaggcaccggcctagcacgggtgtcattgaggggcagcatgctctccctgcagtgtccccctgaattccactccccaccactgaaattgacaacaactagttacatagacctgcttgcgcagagatagcaacagctgcagcagcagctctaatgacactcgtgttagattgattaatcaaagaccaaacctgaaatgtgacggggatgagcttcggaagaacactcgagttagctgtggattgatgtgactgtcgacccaggatgcccaggtggttagtgctctttggaaagcggtagaggcatcgagatggggatggacatgatctccctcttgataatagttcac

SEQ ID NO: 220736 - DNA, 2183 bp, Zea Mays
ggaaggtgttgtacacatgtgcttgtggcgttgctcaattctagcctaccggagggcccaccctgataacctatgttgcttaatccaagtacttagcgcagatgataatgctaatatgattgagctccactcgcacttgatgaaacctgactattgcagctctggacagggaaaatgtagtgagagcagcaatacagaatcttctgatgatgttgggcaacaggagttggatgaacttttggatgacgatgactatcaattttatgatacaaggcagagtttcagtgattcagcaggactttcttgcttgaacatgaaatgttcaaattctggcaaggatacctttctttatggtgataaatttgtgaaaccaaaagctggtacaggtgacagtgagtgcctgccaccgtttttcaagcgtcgcacgaagttgcctgatccagttgagaaggaaaaaagtgttagtctttggtcaatgatcaaggataatgtcggaagagatcttacacaagtatgtcttccagtttactttaacgaaccattatcatctcttcaaaaatgctttgaggacttggagtattcttatttgttggatcgtgcatatgaatgtggcctaaagggggacaatttgatgagaattcttaatgttgctgcatttgcggtttctgggtatgcttcctcggttgggcgcccctgcaaacctttcaatccattgttaggggaaacctatgaagctgattaccctgaaaatggaatccgtttcttttctgaaaaggttagtcatcatccaatggtcatggcttgtcattgtgaaggaaaagggtggaaattttggggagacagcaatgtaaagagcaagttctgggggcaaacaatccagctggatcctgttggtgtgttatctgtagaatttgatgatggagaaattttccaatggagtaaggttacaacaacaattaataacgttatcattggtcaaatttattgtaatcactatggaacgatgagtataactgggaacaggggatattcatgcaagctgattttcaaacggcaatctttcgttgagcgcaaccctcggcaggttgaaggattggttaaggacggtgatggttcgacggtggcaagcctaatgggaaagtgggatgagaggatgtactgcagcgcatcagggcagaatgtgattctgttgtgggagaaaaatgaagcttcgactaatcccactcgctataacctctcatcgttcgcaataactctgaacgagttgactccagaactcaaggagagccttccaccaacggattcaagactcagaccagatcagcgacatgtagagaacggggagtatagtaaggccaatgctgagaagctgcgactggagaggaggcaacggatgtcacggaagatgcaggacaatggttggaaaccaagatggttccgaagggatgatgacacattccgctatgtgggaggttactgggaggcacgacagcagcggaaatgggacggatgtcatgatatatttggtgaattcgtgtgactcaacagtgaggctgctcggaccttttatatatatatatatataataataataatgataatgataataataatctctggtctcccatgataatattaatatgtatgtgcagtgtgactgaacagtgaacacatatatctcgcggattgctgttgtctgagttgtttgtgcgtcgttttaggctcggtcgtttcacttaaaactagatcaattttttttcttcttaattgaaatacaaaaaaattgttaccgctattatatacgcataattgattggaattgttgacattattggagcgtgtatgtatgtatgtatgtgtatcttcatgtagtagtatatatgtgtctaatacaacaagtagctagatagtcgaactggacaattgggctgtacactttgtcgggctgccgtggtccgccacccgcgtcttgccggactcgttggtaacgcgcatggactgtatcaatttggtttgtatgttctaccaatttccatcacatattttgctgtgcattcataattacaccgacatacatatacatataccgtcagctctaaatttcgagtgttaagtttcaaatagttggttttattacggtaaaaaatagataggagataaatattttgttcgttcaaataaat

SEQ ID NO: 220737 - DNA, 779 bp, Zea Mays
taaacagggcctcacacgatatcatcaccgggactgcggcgatgtcgtcggccgccgcctcctcctctcccgccgccggtagcgaaggaagcggtggtgcggtggaagggcgggagatcgcgtacgtgagctacggaggggagcatcacctgccgctggtaatgtcgctggtcgacgaggagctcagcgagccctactccatcttcacataccgctacttcgtgtacctctggccgcagctcaccttcctggcgttcgatgccagggatggcaagtgcgtggggacggtcgtgtgcaagatgggggagcaccggggtgcattcaggggctacatcgccatgctcgtcgtcctgaagccctaccgaggaaggggaatagcaactgagctagttactagatcaattcgggtgatgatggagtctggctgtgaggaggtgacacttgaagcagaagttactaacaagggtgcccttgctctctatggtcgcctggggtttatccgagcaaaaagactgtacagggatgaccagaagatggattctccctacttgtgacagtaccctaatcagtatgtagaattgagttggagaccctgatcattcttttttgctctgtttcatgcttttatagctagcatgtaactgcatattgttgtactaacatataaattttcgaggtgttttatttcctcctgttctttgataaggatgtattaatcaacttcagatcaaacaataagaccgtgcagttcttttgctcaataaacaaaacgcatgccg

SEQ ID NO: 220738 - DNA, 744 bp, Zea Mays
aaacagggcctcacacgatatcatcaccgggactgcggcgatgtcgtcggccgccgcctcctcctctcccgccgccggtagcgaaggaagcggtggtgcggtggaagggcgggagatcgcgtacgtgagctacggaggggagcatcacctgccgctggtaatgtcgctggtcgacgaggagctcagcgagccctactccatcttcacataccgctacttcgtgtacctctggccgcagctcaccttcctgcaactgagctagttactagatcaattcgggtgatgatggagtctggctgtgaggaggtgacacttgaagcagaagttactaacaagggtgcccttgctctctatggtcgcctggggtttatccgagcaaaaagactgtacaggtactatttgaatggtgtagacgcttttcggctgaaacttctgtttccacgccctgatcctggcctgcctccaatgatggttggcaatgacagggatgaccagaagatggattctccctacttgtgacagtaccctaatcagtatgtagaattgagttggagaccctgatcattcttttttgctctgtttcatgcttttatagctagcatgtaactgcatattgttgtactaacatataaattttcgaggtgttttatttcctcctgttctttgataaggatgtattaatcaacttcagatcaaacaataagaccgtgcagttcttttgctcaataaacaaaacgcatgccg

SEQ ID NO: 220739 - DNA, 2459 bp, Zea Mays
aataaatggaggtggcgagcagagacggacgccacccctgccgtattcacttttcactcgttcgtccatccttccacgccccccacagaaccgtctccccagcggagcccggcgcctcacggtcgcaatttattgcttgcgcaccgcctcgccgctttggcgtggggcgtttgcctgtgtggcgcttcgcaggtgccgtggcttgccgcttccttcgccgtgctcactagtcaccagagagggaggaggctctggcgctctgcttctgctgccgcttcttcttcttctcctgctgctgctcttacggagataagcagggggggccgggccggggcagggggaggtgacagctgagctgactagctgagtgaagcatggggatggacgccggcggcggcaagctgccgtacagctacgccggccagcaggacggagggaagctggtgaagagcgtcagccgcgtggagccgcgcaggttcggcctgggcctcgtggcgggcttcctcctcgtcacctgcgcctacttctccaccgccaagttcgacgccatccagatcgccatgaccagccgacccgtctccagcaatgcgggcggcgtcggggtcggctcgctggaggtgggcggcgtcgtcgccgccgccgacacctacaacgcctccaggcagggattagatttgggcaagaaaggcccgggcgcgacgtccatggccgacgagggaagcgaggccgaggcgctcgagaaagacggcggcaaggcttcttcaccttcggggccaggttcttggtcaggcgttcctgccgctctccttcctcccgtgtcgtcagaggaagccgcgaacagcacgctggaatcaggtgtgaaagcaaccactcaacctccaactgccagctttactgccattagcggtcttgaggacgaggagctacaggtgcaggatgcagttgccagtggttccaagaggagcaaagactctgccgccgccgccgccgccacacgcagcgccaatgtcagctcaccctctgtggttcactctcaccatgccatcctccctgctcccgcgcagcggattccagaggttaagcaagcagactcggagacgacgccggcgcgggagcgggagtggaagccgctgtgcgacgtcacctcgaaccggcgcatcgactggtgcgagctggacggcgacgtccgcgtggtcggcgccaacgccagcgtgacgctggtggcgccgccgggcgcggacaaccggaccttccgcgcggagtcgtggcgcatcaagccgtacccgcgcaaggcggaccgcgggtacacgggcaactacttccacgcgttcacggacgtgatcctgccgctgttcctgacggcgcggcggtacgcgggcgaggtgcggctgctggtggccgacctccagccgtggtgggtgggcaagttcctgcccgtgttcaggagcatctccaagtacgagctggtggacctggaccgcgacccgcgcgtgcgctgcttccgccacgtccaggtggggctcaccagccacgccgacttcagcatcgacccgcgccgcgcgcccaacggctactccatgctggacttcacccggttcatgcgcgccgcctacgggctcccgcgcggcgacgtcgtcgcggcggcgccggcgaggcggccgaggctgctggtggtggcgcgcgcgcggacgcggcggttcgtcaacacggaggagatcgtgcgcggcgccgaggccgtcgggttcgaggcggtggtgtcggaagggacgcacgaggtggcgcccttcgcggagctggccaacggctgcgacgccatcatgggcgtgcacggcgccgggctgaccaacatggtgttcctgcccacgggcggggtggtgatccaggtggtgccgctgggagggctggagttcgtggccggatacttccgaggcccgtccgtggacatggggctgcgctacctcgagtaccggatcgagccggaggagagcacgctggtggaccagtacccgcgcgaccaccccatcttcacggaccccaacgggatcaagagcaagggctgggagtccctcaaggacgcctacctcgacaagcaggacgtgaggctggacatggagaggttccggccgacgctccaggaggccatcgcgcacctcaggaaggccaaggccaaggccaatggcgacggaaacaactaggcatcgccgtgcgtatgtagcgtgttcattcgtcctcttattaatctactcttctttttcttctttccttttcgggttatgtcggtgtatgtagcgtgcagaaatcgagcaaatgtatgatatgtggcagggaaagaagctagagcgaataatatattctctctcttgtcatccagttttcgattgaatggcgtatgccaagtgatcaggtgaaggtcgacccggaaatttggttttgccacaataatgggaagattggcgagg

SEQ ID NO: 220740 - DNA, 2237 bp, Zea Mays
gtcggatctacacgtgtccttctggacaagcatgctgcatcaggagaacagtgaggctttcgggaggcaccactctgagcagcttgcatgtgtcaacatgaggggagcagataatggtcatccgaatttccttcctgagaaatgccagattgcagtcaccatttttgccaagtggtgtcaaagaaacacctatagtggatcataacaagagacctgcatccagtgacatactggacatagttgaatgcaaacggctgaagcaggaagatcaaatcgttactaaggaagacaaccatacatctgctgaggaggaatttcatgactaccccacatacacgacttgcgaaagaagctttgactcaccactatatgagagtgaggaaagtgaagatgagggcgtagattcacctctccattgttcacatgctcgcacctatgttgaagatggtctatggcctgccagctttcatcaatctgttggccctttttccttgaggaaacctgttcctatcgggtcaaatcatcaggctgaattacctgagtgcaggccatttggtggaagaactgaagaagacgaaagtgtcaagtggatcagaaacagtgttgtgccaatgcctggtactgatgcatcgtctttggtgttggagcctgttcactgcaaagcaggttgtgattgtcttgacgaaggttcaatcaattgtgtgaaaaagcatgtgatggaagcaagagaaaatttgaaggattctgttggtgcagacgccttcagggagttgggtttctatgacatgggggaagaggttgcctcaaggtggtcagaagaggaggaacgtttgttccagcaagtggtctcgtcaaaccgtgcttctctgcgcaggaacttttgggatgaacttcctcttgccttcccttccaagtccagcaaagagctagtgagctactacttcaatgtcttcatgttgaggaagagggctgagcagaacaggttcgacccagcgaacattgacagtgacgacgatgagtggcaggcaggtggtgattttgagtttccaataacaggaagaactgatgaatacatgccaatcgagtcccttactgatcaagatgatgttgcttgcaatccatttcccttggagggggatttatatggagattctgatgatgaggacgagcttgacaattccagtggagacaggcataatggtgtgcagagggctggtatgttgtcagagggtcatcccgaaatgtcatttatagatcatgatcaacagacgttgaagctagatgcagatgcacaagatgactcttgcacatcatttgaggctcatcaggttggttgcgatggtggggcacatactgatattggcaatcactacaggagtgacgacggcctttgtggtggtgcagaacatgggttctttggtgaccattgtgacacaaaagagtggggcttcggtttcagtactggttgggagaggcatgattttttgtcaacgaacaatgtcatagaagaggtgttcgggaagggctccagtgaagatggaagtgacactgctactggccaggaccttatctgagccagaggcggaggcttcttttcagctgcgaaacctttagcagcccccccttgttctctgaatctgtacagcagtagtagttggctattttgatttgatgcctcacttgttcgtataggaatctctcatccctgtccttgaacatcatctgcttgcgatattggtcgcatggctaatgtaaatccgacgatgatatcatctgtcgatgatctgttgttaggctgtagcatgtacgtatcatctttgtagtgacggtgtgttttgacctgagcatttttcccatgtgccaacgagggtcatgtaataaaaggctgctgttgttccttgcccaatatatctcaccagctcgtcatgtactcccaaacgtcatttttatatgaaatttgttgtcgttctcgcggctcgttttaaacccgccttgaatcgtaatgattgcaacggaaattccagcctagcagtgatgttgggttcgcgttctatttttcttgcatcgtagtcacgttacacacgccgaggccgaggcttgttttttttttatcacatttcactagtggcttcaaccttctgtcagagcaagtatttgctaaaaatactgaaaaacgaccaatctaaccatgaggtcgatcatggttccaaccttttgtgagagaaaatatctgctac

SEQ ID NO: 220741 - DNA, 722 bp, Zea Mays
gcacagacttttatagccaaatggacgaccactaggagggaaactactccctgattatgactccattggagccatcctctatagatgttgcaatattttgtctttctttgatgggaatcaactatccaagttatttagaggaagcaaatagggttctcaaaccaagtggttggcttgttattgctgaagtgcgaagtaggctagacccgagcaacggaggtgctgatcctgaaaagttttctaaagccattatccagcttggcttttcgcttgtttcaaaggatgtgaaaaacagaatgttcattctgttctacttcaggaaaaaggaaaaaagtaaggtggcgaagagcatcgattggccacagctgaaaccgtgcttgtacaaacggcgatgagccgcttgtctcgtatccaccagtaatactgtagttgttgtagtagagctcttcaaaagtttcgtcaaaactgaaagtctagatttaggtccctccgtacctgtatggctgcatctgtgtgccacgctattccattattttccacattagctgcgtctttcatttgttggacctcacaagaaaagatcacatagggaacgatgcattgtttggaagcagatcatatataattcaagtctacttttcacatgctgcaaattttgtgtatggtccagcgaacgaacatctggaccgttttcatttttcaatctggaatctggatcagct

SEQ ID NO: 220742 - DNA, 1384 bp, Zea Mays
cctcgtcagcctgccggtcgttgctacttagagggtgtaccaacttccgggcaggcatctgcatccaaagggcgctcgattctctagctagctaggatctagcaacacaaacccgtctgtccatatattatgggttggtaacaattaattagactgaagaagatcatctaacgaggatggacgcaaagaaaccatacatgctggctattactacagtagcaatctacaccggcatgtacgtggtctcaaaggctgccttcaaccagggaatgaacagcttcgtcttcgtcttctaccgccaggctgctgcatcgcttctcctcctgcccatcgcacttgttctagaaaggaacacgttaggcatgaatctgtgcaatgcaagtgtgacgctcacgtcagcaaccgtggcgtcggcaacaggaaactctactcccgttatcaccttctgcctggcactgctactgaggatggaggtggtgaagttaaggagcgtctctggcatagccaaggtcaccggcgtagcactgtgcctggccggagcgttggtcatcgccctgtacacggggccgtcgctcagcccagtcaaccgccatcaccgtgcctctggcggcgcccatggcttcaaagctccaacccgtggggggacatgggttacaggcacgttcctgatgcttctgtccaacgtcacatggtccctgtggacggttctgcagggcgcgctgctaaaggaataccccaacaagctcctcgtcacgacctcccagtgcttgttcagcaccgcgcagtcgttcgtcgtcgcagcggtggccgagagggacttctcgaaatgggcgctcaagcttgacgtcagcttgatcgctgttgcttacaccgggtttctcgtaactggcgtatcctactacctgcaagcttggtgtgtgcagataaaaggacctgtcttccttgctgtctggaacccactctgctttgtgctaaccatattctgttcctccttcttcctcggcgagaatgttcacctcggcagcattgtgggtggaatcctcttggtctgtggcctttatagcgtgttatggggtaaaaccttggaggttcatcagactgtggaatctggtgataatacggtcggtgaagtgcaaaatggacaagaagagaagaatcatcaacagaaggtgctggagaagggacgccaagaggaagcatcaatgacagcacccggtgtagtgtgatcgattgcttgattccataaagctagcaatctatggttcatttatgtcatgtctgtggttcttgtacaaattgcctgtgagtcacaataattgtttcaagatctttaaattgttacatgttttaaaggccaaaataaataaaatttaggtgataggca

SEQ ID NO: 220743 - DNA, 1747 bp, Zea Mays
ctcggttttctggattctagctaacctggatgctaccgactgtgtgtattgtttttgaaagactcgaggaaaattccttgatttccctctttatcttctgcatcccactcccatttactgttctttgttccgttttctaatgagccaccgccgtcttccttatctgctgcatcccaatcccatttaaattttgtcgtcaacaatttcgtcttctcggtttctgacttattccggggcatttttttttcttgtttcgagcctgtgagcctgattccattttgacccatggcggcggcggcggttcatgagccggaggtgatccgcgacaaggcggcgatgcgcgcgtggtcgcgccgccgccgcgcggagggaaaggccgtcgctttagtccccacgatgggcttcctccacgagggacacctctcgctcgtctccgcggccgtggcggcctccgccggccccgtcgccgtcgtcgtctccatctacgtcaaccccagccagttcgcccccaccgaggacctcgccacctacccctccgacttcgccggcgacctcggcaagctggccgccaccggggtcgtcgccgcagtattttgccccccggacctctacgtccgcggcagcgctgaccgcccctccgccgccagcgcgtccgggggcgcggtgtcttgcctggaggatgcaggtgggcatgcgcacgagacgtggattcgggtggagcggctggagaaggggctgtgcgggagcagcaggcctgtcttcttccgcggcgtggccaccgtggtcgccaagctgttcaatatcgtggagccggacgtcgccgtgttcgggaagaaggattatcagcagtggcgcgtcatttgtcggatggttcgtgatcttgattttgccatacagatagttggttcggaggtagtgcgagaagctgatggtcttgcaatgagctctcgcaatgtaaatctgtcagaggaggatagaaagaaggcgttatcgatcagtagatcactggtggatgctagaaccgccaccctcagtggaagcaaccgtagccaagagataaaagatcaaatagtgcggacaattacagaagctggcggtcaggttgactatgttgaggaaagcttggtgcctgtggagaggatggaccgcccttgtgtaatttgtgtcgcggcatggtttggaaaggtcaggctaattgacaacatcgagatccatgtagatagctctactgttttgtctatctgatgaacgaagatgtttagacacggcaaaatggcataccactttctacgtagcagtagcagaccaagaataaatagcatgatgggctgaatctggatagaagaccatgagctcagtgctagccattcttgaactgctagaatgcagagaataagtactttcacagtttcagtcaagctaaggcagcacaaatgaatcttaggcatctctaaagtactcaacacattgggggaaaaaagaaaggacattaatgactgaatcttcgaagcttgtgatacattcctttaaaaaaaaacagattttacattagcttctctcgttagtcaccagatgcactctatagttaccggaggctcaagggcgcttaaaatctcaagcatgagcaatcaatctggccggacatcttggttctcaactgcccattgatacttgattcaagcactctgccaataacaaaactactcgaactccagcagctccctgtctcgctcactatcttaaactc

SEQ ID NO: 220744 - DNA, 859 bp, Zea Mays
aatcgtcattgtacgtgccatctgtatagaatatgcaccagggctatcctaaagaaacactggtgcgtttccttaaggctagagagtggaatgtagcaaaggctcataaaatgattgtagaatgtttgaattggaggattcaaaatgaaattgatagtgtgctagagaggcctatagtcccagtagatttatacaggtcaatacgtgattcacaacttattggcctgtcaggatacacaaaggagttttcaataggaaagttaatatgccgaatgaagatcgcactgaagaggttaaagtgttaacttatattgattgtcaaacttccacggaatgatgtcctactaactgcaacatgggttattaagggtctcccaatttttggcattggtgttggacatagcacatatgacaaagcttcggtccactactatgtgcaatctcatatccagattaacgagtaccgtgatcgtataattttgcctaggctgacacaacagtttgggcggcctgttaccagctgtataaaagtgctggatatgactggtttgaagctatcagcactaagccaaataaagatgttgacttccatatcgacagttgatgatctaaattaccctgaaaagacagagacctattatgtagtcaacgttccatacatattttctgcttgttggaaggtactatcagttacagccaacgctcggacctacggtttttagtaatttttttagcagaaaggaactgatgacagttaatttgagcatgccgctaggttgtgaagcccttattgcaggagaggacaaaaaagaaggtcaaagttttgactggctgcgggagagatgaacttctgaaggta

SEQ ID NO: 220745 - DNA, 745 bp, Zea Mays
atattcgggaatcgtcattgtacgtgccatctgtatagaatatgcaccagggctatcctaaagaaacactggtgcgtttccttaaggctagagagtggaatgtagcaaaggctcataaaatgattgtagaatgtttgaattggaggattcaaaatgaaattgatagtgtgctagagaggcctatagtcccagtagatttatacaggtcaatacgtgattcacaacttattggcctgtcaggatacacaaaggagggtctcccaatttttggcattggtgttggacatagcacatatgacaaagcttcggtccactactatgtgcaatctcatatccagattaacgagtaccgtgatcgtataattttgcctaggctgacacaacagtttgggcggcctgttaccagctgtataaaagtgctggatatgactggtttgaagctatcagcactaagccaaataaagatgttgacttccatatcgacagttgatgatctaaattaccctgaaaagacagagacctattatgtagtcaacgttccatacatattttctgcttgttggaaggtactatcagttacagccaacgctcggacctacggtttttagtaatttttttagcagaaaggaactgatgacagttaatttgagcatgccgctaggttgtgaagcccttattgcaggagaggacaaaaaagaaggtcaaagttttgactggctgcgggagagatgaacttctgaaggta

SEQ ID NO: 220746 - DNA, 1038 bp, Zea Mays
cgagcaaacagtcatacactgggacgcggagtcgcggacgcctgcgcgatcagcgaacggaagaccgtggaagcaaagaggcgcaagcgagcacggaacaaatacaccttcaggtggcctccctccgactgccgactgaatcttccacctcgcttcgcgcctccggctccgcgccgggcccgcataatctgtgctcgggatcgcctcttcccgcggcaaatgggggccgactccgaggacgccgtcaagcagctcagcctcctcatggagcaagtggaggccccgctgaagagatcgtttcagaatatgcaccagggctatcctaaagaaacactggtgcgtttccttaaggctagagagtggaatgtagcaaaggctcataaaatgattgtagaatgtttgaattggaggattcaaaatgaaattgatagtgtgctagagaggcctatagtcccagtagatttatacaggtcaatacgtgattcacaacttattggcctgtcaggatacacaaaggagttttcaataggaaagttaatatgccgaatgaagatcgcactgaagaggttaaagtgttaacttatattgattgtcaaacttccacggaatgatgtcctactaactgcaacatgggttattaagggtctcccaatttttggcattggtgttggacatagcacatatgacaaagcttcggtccactactatgtgcaatctcatatccagattaacgagtaccgtgatcgtataattttgcctaggctgacacaacagtttgggcggcctgttaccagctgtataaaagtgctggatatgactggtttgaagctatcagcactaagccaaataaagatgttgacttccatatcgacagttgatgatctaaattaccctgaaaagacagagacctattatgtagtcaacgttccatacatattttctgcttgttggaaggttgtgaagcccttattgcaggagaggacaaaaaagaaggtcaaagttttgactggctgcgggagagatgaacttctgaaggta

SEQ ID NO: 220747 - DNA, 915 bp, Zea Mays
cgagcaaacagtcatacactgggacgcggagtcgcggacgcctgcgcgatcagcgaacggaagaccgtggaagcaaagaggcgcaagcgagcacggaacaaatacaccttcaggtggcctccctccgactgccgactgaatcttccacctcgcttcgcgcctccggctccgcgccgggcccgcataatctgtgctcgggatcgcctcttcccgcggcaaatgggggccgactccgaggacgccgtcaagcagctcagcctcctcatggagcaagtggaggccccgctgaagagatcgtttcagaatatgcaccagggctatcctaaagaaacactggtgcgtttccttaaggctagagagtggaatgtagcaaaggctcataaaatgattgtagaatgtttgaattggaggattcaaaatgaaattgatagtgtgctagagaggcctatagtcccagtagatttatacaggtcaatacgtgattcacaacttattggcctgtcaggatacacaaaggagggtctcccaatttttggcattggtgttggacatagcacatatgacaaagcttcggtccactactatgtgcaatctcatatccagattaacgagtaccgtgatcgtataattttgcctaggctgacacaacagtttgggcggcctgttaccagctgtataaaagtgctggatatgactggtttgaagctatcagcactaagccaaataaagatgttgacttccatatcgacagttgatgatctaaattaccctgaaaagacagagacctattatgtagtcaacgttccatacatattttctgcttgttggaaggttgtgaagcccttattgcaggagaggacaaaaaagaaggtcaaagttttgactggctgcgggagagatgaacttctgaaggta

SEQ ID NO: 220748 - DNA, 794 bp, Zea Mays
cgagcaaacagtcatacactgggacgcggagtcgcggacgcctgcgcgatcagcgaacggaagaccgtggaagcaaagaggcgcaagcgagcacggaacaaatacaccttcaggtggcctccctccgactgccgactgaatcttccacctcgcttcgcgcctccggctccgcgccgggcccgcataatctgtgctcgggatcgcctcttcccgcggcaaatgggggccgactccgaggacgccgtcaagcagctcagcctcctcatggagcaagtggaggccccgctgaagagatcgtttcagggtctcccaatttttggcattggtgttggacatagcacatatgacaaagcttcggtccactactatgtgcaatctcatatccagattaacgagtaccgtgatcgtataattttgcctaggctgacacaacagtttgggcggcctgttaccagctgtataaaagtgctggatatgactggtttgaagctatcagcactaagccaaataaagatgttgacttccatatcgacagttgatgatctaaattaccctgaaaagacagagacctattatgtagtcaacgttccatacatattttctgcttgttggaaggtactatcagttacagccaacgctcggacctacggtttttagtaatttttttagcagaaaggaactgatgacagttaatttgagcatgccgctaggttgtgaagcccttattgcaggagaggacaaaaaagaaggtcaaagttttgactggctgcgggagagatgaacttctgaaggta

SEQ ID NO: 220749 - DNA, 894 bp, Zea Mays
cgagcaaacagtcatacactgggacgcggagtcgcggacgcctgcgcgatcagcgaacggaagaccgtggaagcaaagaggcgcaagcgagcacggaacaaatacaccttcaggtggcctccctccgactgccgactgaatcttccacctcgcttcgcgcctccggctccgcgccgggcccgcataatctgtgctcgggatcgcctcttcccgcggcaaatgggggccgactccgaggacgccgtcaagcagctcagcctcctcatggagcaagtggaggccccgctgaagagatcgtttcagaatatgcaccagggctatcctaaagaaacactggtgcgtttccttaaggctagagagtggaatgtagcaaaggctcataaaatgattgtagaatgtttgaattggaggattcaaaatgaaattgatagtgtgctagagaggcctatagtcccagtagatttatacaggtcaatacgtgattcacaacttattggcctgtcaggatacacaaaggagggtctcccaatttttggcattggtgttggacatagcacatatgacaaagcttcggtccactactatgtgcaatctcatatccagattaacgagtaccgtgatcgtataattttgcctaggctgacacaacagtttgggcggcctgttaccagctgtataaaagtgctggatatgactggtttgaagctatcagcactaagccaaataaagatgttgacttccatatcgacagttgatgatctaaattaccctgaaaagacagagacctattatgtagtcaacgttccatacatattttctgcttgttggaaggagaggacaaaaaagaaggtcaaagttttgactggctgcgggagagatgaacttctgaaggta

SEQ ID NO: 220750 - DNA, 2143 bp, Zea Mays
cggccggcgcctgcacggcgcccgcggctccgcgcgctcgtcctacttgccatccgtcactggacgggccacgcgactgcgatccctgccacacgagcgcaacgcgccatgggtccggcgtgccagtgagagcgggagaagctcggacatctccgcgattcagcgcgggatcctgctggactggcctgatccctccgtgctggtgtcggcgagcatgcaaggaaggatgcgaggcgcgcggcggagcgcgcgcggggaatcgtcccggaaggcggcgggccgcgaggtggagccattcacgctgtgcggcgagatgtcccatctcaccagggccacgtcagagccgtgccgcagggctcgcggcgccgccttcgcccgccgggcgaggcccttctcggcgtacgagctggtgtcggcgcgggaggccggccgcgcgggcggcgccgggttctccgcggccgatcgagcctacctcggcaggcagcacatccccaccaaggggccgtggggcgtcgacgacgtggaaagcgaggcctacgtctcgcagttctccgccgatggctcgttgctcatcgcggggtttcggggaagccgcatcagagtctacgacgccgagaaagggtggaagatccacaaggatataagctgcagaagtgtgcactggacggtttcagatattgctctctcacctgaccaacgattccttgcctatgcaagtctgacacctattgttcacattgtgaatgttcagaatgctggaaaggaatcacatgctaatattactgaaattcatgagggattggatttaaccggtggtgatgaggatgaggactttggaatattttctgttaaattctccaaagatggtaaagaagttgttgttgggaacaatgaaaagtcaatatatgtttatgacctttcagcaaataaagtgtcagcccgcatccgtgctcataaagctgatgtcaatgctgttaccttcgctgatgaaactggaaacgtgttgtactctggaagtgatgatagtctctgtaaggtgtgggacaggcgttgcctttcaggggaaaagtcagcaggtattttgacaggtcatttagatggagttacatttatcgatagccgtggtgatgggcgttatttcatctccaattgcaaggatcagagaatcaaactttgggacatcaggaaaatgtcttccgtcgtgagatctcgcccagtgagtctagtggactgggactataggtggatgccatttccatcagaagctcataatcttaagcatccaggtgatcagtctgtggccacatacagaggccattcagttctgcgaacacttatccgttgctatttctcccctgtgcacagcacgggtcagaggtacatatacacgggatccagtgacaagtctgtacatatttatgacgtggtaaccggggaggctgtcaagaggctttcgtggcatggctccatcatcagagactgcacctggcatccatactacccaacgctcgtcagctcctcctgggacggcttcgttgcccggtgggaggcctcgggcgacgacgacgaccattcggtgctcgtcgccgacgagatgagaggaagcccttactaccggagatacggcgatcccttggtgatgtagagatgtctgcaaagtggttaacaccaaatggtagtgagcatgtactttgctttgttgtttgggaattacaactgagcagcatgtacagtgccgtttggctcatgtggttgtatagccttacgataaataatatgtagggatacagaaagaacacatgagatcgaagcgactttataaatcctatggaatttatagaaacagacaagatcctctttccttgtttttaaaaactttataaatactttttcgaattttgattggattggaatacaccgttgttggattcagaaattatccattcatctcactcactatgggacaatgtaccgcatccacggctgttcatctattaatggcggtatttatctgtcacgaccacaggtgactaagtgttcctagtagctgtcagtagctgtcaagccagtactttgggccaagattagtgtatctgtgatttgttcttgagctatatgattaggggatcttagtcccggtcca

SEQ ID NO: 220751 - DNA, 3669 bp, Zea Mays
cggccggcgcctgcacggcgcccgcggctccgcgcgctcgtcctacttgccatccgtcactggacgggccacgcgactgcgatccctgccacacgagcgcaacgcgccatgggtccggcgtgccagtgagagcgggagaagctcggacatctccgtggagggacatcttctccagcgattcagcgcgggatcctgctggactggcctgatccctccgtgctggtgtcggcgagcatgcaaggaaggatgcgaggcgcgcggcggagcgcgcgcggggaatcgtcccggaaggcggcgggccgcgaggtggagccattcacgctgtgcggcgagatgtcccatctcaccagggccacgtcagagccgtgccgcagggctcgcggcgccgccttcgcccgccgggcgaggcccttctcggcgtacgagctggtgtcggcgcgggaggccggccgcgcgggcggcgccgggttctccgcggccgatcgagcctacctcggcaggcagcacatccccaccaaggggccgtggggcgtcgacgacgtggaaagcgaggcctacgtctcgcagttctccgccgatggctcgttgctcatcgcggggtttcggggaagccgcatcagagtctacgacgccgagaaagggtggaagatccacaaggatataagctgcagaagtgtgcactggacggtttcagatattgctctctcacctgaccaacgattccttgcctatgcaagtctgacacctattgttcacattgtgaatgttcagaatgctggaaaggaatcacatgctaatattactgaaattcatgagggattggatttaaccggtggtgatgaggatgaggactttggaatattttctgttaaattctccaaagatggtaaagaagttgttgttgggaacaatgaaaagtcaatatatgtttatgacctttcagcaaataaagtgtcagcccgcatccgtgctcataaagcggctcccgcctgtacaaatatacaatcccaccgaccctagaggtcaaggcaagcaattaaagattgttgtgtttcttcaatggtattagagcaagtcgacattgacctcatcaacgacaagattccgtagcatcatccagctcagtagtactgacgactctcttaggtcaaagcattgttgtaaagctcaacaagaccaacttcgctctttgaattcatgagctctgaggtgcgcaactacaaggctccctagatggcatgattgtagcgtccgacaagatctccgtcaagcaagatggcaagatgattgacgatgtcaacccagagtacatccaatgggtcgcgcttcagcagcaagtccttagcttattcatgacattcataactcaagaaagtcatgggtcgggttgccatctacgagacaccccatgaggtgtggtcagaactgcaaaagacctacgcgtcgtagtcatgagcccggaccgcgaacacacggattgccctgaccacaagaaaatgtaatatgataatggctgaatacattaccaagatgaagtcttttgcatatgagctgacatttgcaaagacgaatgttgatgatgaagaacttgtacaaaccactcaacacctcaaagttctacaaatcatgtctctaatgcgcctgatcaccatgctgctgcagcatcgagcttttggtccctcaagcagcgagaaagcagtgcagtggaaccttcacatgacttgcatcatcagagtgctcggtttcatcaagacctgcaactccatcacctcaatgacgtcatgttcccattgtttacatagatcagcgtcctcagacaagattacaagatgaaaaaattactcatactgaatatggctattttatcatcactggctgatgtcaatgctgttaccttcgctgatgaaactggaaacgtgttgtactctggaagtgatgatagtctctgtaaggtgtgggacaggcgttgcctttcaggggaaaagtcagcaggtattttgacaggtcatttagatggagttacatttatcgatagccgtggtgatgggcgttatttcatctccaattgcaaggatcagagaatcaaactttgggacatcaggaaaatgtcttccgtcgtgagatcgtagggtcttgcattatagcaatttattatgtaggatattttttttactggaccctaagcttctctgaaatttgctataggacattaaaaattattaggacactacctagtgtcttctagattttttttgacagtgtcaggcagcaataaaaaaattggacaatgccttgagcaaaattatcctgctatgtacttttaagttccatttcctttttttgcgggtctagtttctattgttttgaatttgattctgttgttttcacagtcgcccagtgagtctagtggactgggactataggtggatgccatttccatcagaagctcataatcttaagcatccaggtgatcagtctgtggccacatacagaggccattcagttctgcgaacacttatccgttgctatttctcccctgtgcacaggtcaggaacagcagatatttttatttatgtcaccagcatactgaaattttcctttgaaatactttcaaaaggttacatttgttagtggaaagttgaccgttaacttgagtaggaggccttgcagttgtgctacctgcttctaagcttgtaattagtgatatataatgaatatttggtctaatttttgtatttatctatgtaattaaggcattgcttcgccttacgctttagcgcttaaaaggtaaaaaggaggtcgataattaagatcatacatctaaaacaattatcagtgatgacatgaataatttccatgttcagttcatatcgttgtgctttctgtttcagcacgggtcagaggtacatatacacgggatccagtgacaagtctgtacatatttatgacgtggtaaccggggaggctgtcaagaggctttcgtggcatggctccatcatcagagactgcacctggcatccatactacccaacgctcgtcagctcctcctgggacggcttcgttgcccggtgggaggcctcgggcgacgacgacgaccattcggtgctcgtcgccgacgagatgagaggaagcccttactaccggagatacggcgatcccttggtgatgtagagatgtctgcaaagtggttaacaccaaatggtagtgagcatgtactttgctttgttgtttgggaattacaactgagcagcatgtacagtgccgtttggctcatgtggttgtatagccttacgataaataatatgtagggatacagaaagaacacatgagatcgaagcgactttataaatcctatggaatttatagaaacagacaagatcctctttccttgtttttaaaaactttataaatactttttcgaattttgattggattggaatacaccgttgttggattcagaaattatccattcatctcactcactatgggacaatgtaccgcatccacggctgttcatctattaatggcggtatttatctgtcacgaccacaggtgactaagtgttcctagtagctgtcagtagctgtcaagccagtactttgggccaagattagtgtatctgtgatttgttcttgagctatatgattaggggatcttagtcccggtcca

SEQ ID NO: 220752 - DNA, 2041 bp, Zea Mays
gaaagctatgatgcgcagcaggggctcagagcttccgggaacatgcctgttttcatcgagtgcatctgatcactttgcaggcctatgcaagtctgacacctattgttcacattgtgaatgttcagaatgctggaaaggaatcacatgctaatattactgaaattcatgagggattggatttaaccggtggtgatgaggatgaggactttggaatattttctgttaaattctccaaagatggtaaagaagttgttgttgggaacaatgaaaagtcaatatatgtttatgacctttcagcaaataaagtgtcagcccgcatccgtgctcataaagctgatgtcaatgctgttaccttcgctgatgaaactggaaacgtgttgtactctggaagtgatgatagtctctgtaaggtgtgggacaggcgttgcctttcaggggaaaagtcagcagagaatcaaactttgggacatcaggaaaatgtcttccgtcgtgagatcgtagggtcttgcattatagcaatttattatgtaggatattttttttactggaccctaagcttctctgaaatttgctataggacattaaaaattattaggacactacctagtgtcttctagattttttttgacagtgtcaggcagcaataaaaaaattggacaatgccttgagcaaaattatcctgctatgtacttttaagttccatttcctttttttgcgggtctagtttctattgttttgaatttgattctgttgttttcacagtcgcccagtgagtctagtggactgggactataggtggatgccatttccatcagaagctcataatcttaagcatccaggtgatcagtctgtggccacatacagaggccattcagttctgcgaacacttatccgttgctatttctcccctgtgcacaggtcaggaacagcagatatttttatttatgtcaccagcatactgaaattttcctttgaaatactttcaaaaggttacatttgttagtggaaagttgaccgttaacttgagtaggaggccttgcagttgtgctacctgcttctaagcttgtaattagtgatatataatgaatatttggtctaatttttgtatttatctatgtaattaaggcattgcttcgccttacgctttagcgcttaaaaggtaaaaaggaggtcgataattaagatcatacatctaaaacaattatcagtgatgacatgaataatttccatgttcagttcatatcgttgtgctttctgtttcagcacgggtcagaggtacatatacacgggatccagtgacaagtctgtacatatttatgacgtggtaaccggggaggctgtcaagaggctttcgtggcatggctccatcatcagagactgcacctggcatccatactacccaacgctcgtcagctcctcctgggacggcttcgttgcccggtgggaggcctcgggcgacgacgacgaccattcggtgctcgtcgccgacgagatgagaggaagcccttactaccggagatacggcgatcccttggtgatgtagagatgtctgcaaagtggttaacaccaaatggtagtgagcatgtactttgctttgttgtttgggaattacaactgagcagcatgtacagtgccgtttggctcatgtggttgtatagccttacgataaataatatgtagggatacagaaagaacacatgagatcgaagcgactttataaatcctatggaatttatagaaacagacaagatcctctttccttgtttttaaaaactttataaatactttttcgaattttgattggattggaatacaccgttgttggattcagaaattatccattcatctcactcactatgggacaatgtaccgcatccacggctgttcatctattaatggcggtatttatctgtcacgaccacaggtgactaagtgttcctagtagctgtcagtagctgtcaagccagtactttgggccaagattagtgtatctgtgatttgttcttgagctatatgattaggggatcttagtcccggtcca

SEQ ID NO: 220753 - DNA, 459 bp, Zea Mays
ggaaagagctaaaaagatggaagaaaagaaagtgtatctgcaactatacgaagcaatggaggcgttggtcaagatcaatctggagaccaacaagatcatggacttcatcaagtttgacgtcggcaacgtggtcatggtgactggcgggaggaacaccggacgtgtaggagtcatcaagaacagggagaagcacaagggcagctttgagaccatccacgtgctgcttggagctttttgctatgtctagttttctcctatttgttgtacatgaaaacatagaatagaattcaaatttggtggtcgcaaaagtgtggagactttaattcatacaaagttaggcttaacattagtgcaaacagttgtattttagtttagatttagagtacacttatgtatgcattgtttgacaatgtttatttatgatatattgaatggtacttaattatattatattaatta

SEQ ID NO: 220754 - DNA, 589 bp, Zea Mays
ctgggtgaaggggacactgcaaagcttgagattcagattaagttggacaaagagaagaaaatcctctccattcgggataggggtattggaacaggagctgctcgagtctcttgtcgaagctgatacggcaggaaagagctaaaaagatggaagaaaagaaagtgtatctgcaactatacgaagcaatggaggcgttggtcaagatcaatctggagaccaacaagatcatggacttcatcaagtttgacgtcggcaacgtggtcatggtgactggcgggaggaacaccggacgtgtaggagtcatcaagaacagggagaagcacaagggcagctttgagaccatccacgtgctgcttggagctttttgctatgtctagttttctcctatttgttgtacatgaaaacatagaatagaattcaaatttggtggtcgcaaaagtgtggagactttaattcatacaaagttaggcttaacattagtgcaaacagttgtattttagtttagatttagagtacacttatgtatgcattgtttgacaatgtttatttatgatatattgaatggtacttaattatattatattaatta

SEQ ID NO: 220755 - DNA, 1852 bp, Zea Mays
ggcttcttcagatgacaacactgagttcatgattgacatgttacgggagtgcggactagctcacaagacaatactatttattctagaagaattcgacctctttgctcagggtaaacagaggttgctttacagcttacttgatgcaatgcaatctctaacatcccaagctgttgtcattggtgtgagttgccgcttggatgcagatcaactcctagagaaaagggttagatcccgattctctcataggaaacttttatttatttcgccttcgttggatgatatacaacggttggtggagcatttgcttatactggccaaagactcaggtttaccatcaaagtatatcgccgattataactcaagacttactgtatcctttctacgacctgactgttatggtgcatatctcatcttatttgagtacttagctattaatggcatataatcttgttaaatgaaacaaaatgtttgctttctgaaactaaaacatggtactctaacttgcttaaactcaatccttcaaatcctcgtttccaccttgagtttgagtagggtgttaactgttaagtgtacgaggccttttctataggccatatggctcatgattctatatagtcatctccacttgtgggatgcttatcttttcagatccccaatgttccccaaggttagaaacactattgatgttttttcaaccaatccccttgggattttttgttccaccatggagcagtgttttcaagttggacgacttgctgttcgttctggctgaccggcttgggcgattaatcacgattagtcggatgacttggcgattaatcatgacttgtccaaaccgacttggaattaatcggatgacttgaaaacattgtcgtggagaaacaaaagggtaaagaaattaggcagaacaactgcaaacaaattacacaatggaattctcttatcatatacgctgcagagcatttttagtgataagaaattcaaaggttgtctcaactccctcatggatgctgatgcaacaacgagcaacattcaaagatttcttttcagagctgtgtcatatatggacatggaatctggattcctgtcggtagaaagcttcctaaaggccctttcttccatgcagaggcaacctaagatggacagcttacaagatctctcgattttggaattatacattcttgtgtgcatgcacagattagaaagtaaggagcaaacctcatacaacttcaccagcataatgaaagatccatacaagacgcctataagacttctgataaatatgcaagcaccgtttgttttagggcctttgagcacctttcggatcgtgagctgattagttttggtgacaatagatggagaaaccaggcgcttgaataccgacctgttaagctcctcatatcctcccgcgagctcgctgagtccctcaagctgaacaccacctgccccgctgtactgcagaagctgtttgatcgtgaaagatacatgtagaatctcctttcagatggccgcgcttcacctgacttgagtcgccgctttcatgtttcaccgggttgtcaagttcatgtttcactgtaaaccggcgattgtattagtatcttgtccactgttcgctggaaaaggtgtgggccgtgtggccaactgcccagcgtgagtcgtgacctgcctgtcaatcgcttgagtcttgaccataggccacacggaattagatatctgtggtgcactgattttgggctaacgacccgatttctatctcgcacaagtttagcagcgtggtgacagtattttggtagctttgaaatgaatgcgctattcggagtttacaaaaatagatagaataaaatgattcaaa

SEQ ID NO: 220756 - DNA, 1879 bp, Zea Mays
ctctgatcccttctctcttaggcttcttcagatgacaacactgagttcatgattgacatgttacgggagtgcggactagctcacaagacaatactatttattctagaagaattcgacctctttgctcagggtaaacagaggttgctttacagcttacttgatgcaatgcaatctctaacatcccaagctgttgtcattggtgtgagttgccgcttggatgcagatcaactcctagagaaaagggttagatcccgattctctcataggaaacttttatttatttcgccttcgttggatgatatacaacggttggtggagcatttgcttatactggccaaagactcaggtttaccatcaaagtatatcgccgattataactcaagacttactgtatcctttctacgacctgactgttatggtgcatatctcatcttatttgagtacttagctattaatggcatataatcttgttaaatgaaacaaaatgtttgctttctgaaactaaaacatggtactctaacttgcttaaactcaatccttcaaatcctcgtttccaccttgagtttgagtagggtgttaactgttaagtgtacgaggccttttctataggccatatggctcatgattctatatagtcatctccacttgtgggatgcttatcttttcagatccccaatgttccccaaggttagaaacactattgatgttttttcaaccaatccccttgggattttttgttccaccatggagcagtgttttcaagttggacgacttgctgttcgttctggctgaccggcttgggcgattaatcacgattagtcggatgacttggcgattaatcatgacttgtccaaaccgacttggaattaatcggatgacttgaaaacattgtcgtggagaaacaaaagggtaaagaaattaggcagaacaactgcaaacaaattacacaatggaattctcttatcatatacgctgcagagcatttttagtgataagaaattcaaaggttgtctcaactccctcatggatgctgatgcaacaacgagcaacattcaaagatttcttttcagagctgtgtcatatatggacatggaatctggattcctgtcggtagaaagcttcctaaaggccctttcttccatgcagaggcaacctaagatggacagcttacaagatctctcgattttggaattatacattcttgtgtgcatgcacagattagaaagtaaggagcaaacctcatacaacttcaccagcataatgaaagaatacagatccatacaagacgcctataagacttctgataaatatgcaagcaccgtttgttttagggcctttgagcacctttcggatcgtgagctgattagttttggtgacaatagatggagaaaccaggcgcttgaataccgacctgttaagctcctcatatcctcccgcgagctcgctgagtccctcaagctgaacaccacctgccccgctgtactgcagaagctgtttgatcgtgaaagatacatgtagaatctcctttcagatggccgcgcttcacctgacttgagtcgccgctttcatgtttcaccgggttgtcaagttcatgtttcactgtaaaccggcgattgtattagtatcttgtccactgttcgctggaaaaggtgtgggccgtgtggccaactgcccagcgtgagtcgtgacctgcctgtcaatcgcttgagtcttgaccataggccacacggaattagatatctgtggtgcactgattttgggctaacgacccgatttctatctcgcacaagtttagcagcgtggtgacagtattttggtagctttgaaatgaatgcgctattcggagtttacaaaaatagatagaataaaatgattcaaa

SEQ ID NO: 220757 - DNA, 1243 bp, Zea Mays
atggccatggcctatgaacgaggcgacggcgtcgtcgaacatctcctcgacgcccttgaattccgccagccccagcgcgcgggccttggacgtgtcgaagccgtacgactgctcgccgtaggcgcggggcaggctcctcgggacggggtacgctgggaaccgccgcgcgagcagggcggcgaggtcgccgcagtccagcaccgccgcgctgcagatgtacctccctcgggcgcccgcggcctcgtacgccagcatgtggcacctcgccacgtcgtcgatgtggacgtaccccatcctcccgtacgtcgtgaacttccccgtctctccttggaacaggccgaggacatcagaagcggtggggccgagctcaggagacagagtaggtccgacaacgaaggtcggaagaacggtgacgaggtcgatcctgtgctctccggcgaactcccaggctgccttctcggcgaggatctttgcgacggcgtaccatatctaagggagcacgggaacagcacattgtcacgcaggtacggtccaaatcactcttctgacgaccgtacgctcacctggagactttcgcagaactcgatggagctccacgacgattcgtccagcagcacgttagggggcaggtcggcttcgtccttgatcctcactgtcgacgacgaggatgtcaggacaaccctcttgagcgatgggttcttcttgcacgagcgtagcacgttcatcgtgccgtttattgctgaatcaagcatctcctcctgccaagtggcaccaacatgtttcaggtcgctatatgtccaggcctttcctgaagctgcaaatatgagaaacagaattggtgtttagcatgccttggaattagatccggtgacgacgggcgatgcggtgtggaagacgccctcgcaagccatcacagcgtcgtcgaagctcccttcctccaagagatcagctctcacgagctgcagcctttcctttgcgccttccaggccccagaggacatggtacccagactcaagaagccgcttgacgagccaggaggcgatgaaaccagacgccccagtgacacagaccttacccttagcagtgttagccattctctcagactcgaggtgctcctgtatttgatcccagctagtttatattgtgcacattgaagtacccagtatggctagtgtgtcacccctttttggtgactcggttgggcaggtggagagttggcttggtcatgcgcagattccaccac

SEQ ID NO: 220758 - DNA, 982 bp, Zea Mays
attaattcgtggcttctgccttatatttattcttcccatgggcatggcctccagagagagacaaaacgcgatctgaaaaatccacatcaatctccagctgctggccgtaggcggtatagcatacagtccagacagtcagatagagaggcacctcatcagtcgtgcattattgccctcttgtacgtacacggcagttttaaattgaaaaaatatggccgagaacgagggtaggttccgctgggattcgaatctggacacttttttttgcaggagctgcgttcaattgcttgacgacgggctaataacccagaggcagccctccttacatgacgaggctctggaatacttgtcgcaaaaattttctacggtgaattcaacagtttcaaaaaagactctgatgaacaaatggaactgtatgaaacagctgtatgacagttatgttctgtttcgtatccactcgtcaaatatgggagagttgaaaagccgcaggatgtacataaaaaagacaaagaaatgtgcgaacgtatttaagcatatgataaatgaaccacctaagaatttggatctacttaaaagattgttccacgacgaagatcaagggacaccgccatcatccccgccacacccatcgttcgagccacagtcatcgttcatgccagagtcgtcgtccccgccacagtcgtcatcattcatgccagggtcgtcgtccccgccacagtcgtcagtgtcatcctcgtaactttcctttattttatggatagggtatgcatgtatatcctaccacatttagggacgaatgttgatacccgaattgttaggacaagtttaataatatttttaaattatatatatgtatgaaatttgatgtcaatcttttatcaagcacattattacagataagaaaagaatttgcataaattgttttatgcattgtttcctccttgcaacaaaagcggagggggcaatgtataggtgatcctcc

SEQ ID NO: 220759 - DNA, 1000 bp, Zea Mays
aaacatcaaccccaaccccaacgactccaactccaagtcaaagagagcagcaagagcacgtgccggccgccgatcaaatccaccgagcaatcgcgcgcggccgccgaggtgccaaggcggcggcggtcggtcggtctgcgatatacgatggcggcgccttactacggaggtcctccggcggcgccggcccccgtggcggtggtgtccccgcagttctgtgcgccgtacgtggtgcccctgacggtgaccaagaaggccatcagcctctccgacggcgacttcaccgtcaccgacgccaacggcgccaccgtgctgcaggtcaagggcgccgtcttcagtatccgccaccgccgcgtcctcctcgacgccgccggccagcccatcctcaccatgctggagaagatgggaggtgttcagaggggacagctcgaacgagagcgacctgctcttcaccgcgaagaaatcctcgatattccagctgaagacggagatggacatcttcctggcctccaacaccgcgcagcaggtgtgcgacttcaagatcaagggcagctacttcgagaggtcgtgcgccttctacctcggcaactccagcagcatgatcgcccagatgaaccgccagtttaccgtcaccaatgtgctgcttggaagggacacgtttggcgtcactgtgttcccgcacgttgactacgtgttcgtcgctgctcttgttgtgatactggatgagattcatagggaacggtccgactgaggaacataccacaccacaccaccaagcttctccaccgttgctcgaccatgctatgctatgtatcatcatcacaggttattcttgtcaattatatactttccatgtatgtatatgtaagtattaatgagttaatacactatctcctgatgtataagtttttcttcatccatttgaatatagacataaaaatcaaatgactattattttgggatgaaatgagtactatttagtgtcgattcaagccacaaa

SEQ ID NO: 220760 - DNA, 2092 bp, Zea Mays
gtcaattggggcttgaaatatttatctacatgcaaaggaaccttggattcttatattttgtgaaatcagttccacttcataatctatgaagccatatatccacagcaaccactccttcaaccttgtatttaggctggttacattagcactgctataagtgatggtccaggatgtttgatgttgaggtgtcctgatccatcttgtgctgctgctgttggacaagatatgataaattcactggctgctgatgatgataaggaaaagtatgggcgatatcttcgcagatcttacattgaggataatagaaagacaaaatggtgtcctgcgcctggatgtgaatacgcagtggaattcgtcatgggcagtggcagctatgatgttaattgcaactgttcatatgggttttgttggaattgcaccgaggaagctcatcgtccagtagactgtgccactgtttcgaagtggatcctcaagaacagtgcagagtcagagaatatgaattggatactggctaattcaaagccttgtcccaaatgcaaacggcctattgaaaaaaatcagggatgcatgcacatcacatgcactccaccatgcaaatttgagttctgctggctatgtcttggtccatggtcagagcatggagagaggactggtggattttatgcttgtaaccgctatgagtcagcaaggcaagaaggagcgtatgatgaatctgaaaggagaagagaaatggcaaagaactcccttgagagatacacacattattatgaacgatgggcagccaatcagtcgtcgaggcaaaaggcactgggggaccttcaaagcctacagaatgacaagcttgaaaggttaagtgacatacaaagtcaacctgagtcacagctgaagttcattgtagaggcatggttacagattgttgaatgcagaagggtattgaagtggacttatgcctatggattttacctgccagagcatgagcatgccaaaagacagttctttgaatatctgcaaggtgaggcagaatctggtttggagcggctacatcaatgtgcagagaaagaacttcaaatataccttgacgcagaatctccctcgaaagacttcaatgatttccgtacaaagttggctggattaactaggtacatgttacttctttctatgccatctatgcttgctttgatgacatgaacaaaattacaaaataactgctatgttgtatccctgtggatgtttactgtgtttccttttttttcccgtgaggacttgaccagctctaaggctctaaattcaaaaacatgaccttttttttccatttgacatctttaattttacagtgtgactcgcaattattttgaaaatctcgtccgggctctggaaactggattaaatgatgtaggcccttccactagccatggcacatgcagcaaaagcgcaacttccaagagcctcggtggtaaaagtaagagtggcaagaacagggcatcaagcagcagttccaaatctggcggctcaacccgaggtgtggatgatagtaacatctggacatgcgatcagtgcacatatgcaaaccccaaatctgccagagcctgccaggcttgtgatcgccagcatcgatagcggtgtcagtcattgctagagatttggaccccatttgtcgagaattttctggtgttgcgccgtgcgatacacaacatacatgaaaattgaatattagctgatctctgggggtaggttttcgtgtatcatggattgtttgtcgactgactgcgcatgtgaagcctcaactcagcatccactcccatttgtgtatataagtatatccatatctgtaacaatgttttgttcaatggaagtagcggagctaggaggcgtctgctgccaaaggaactcaactgttgtagtgctgttgtaatgtaagatgcattggtcaaatttaaagaaagttagtcaccctgttacagaaattccaagggaactcttgttacatgtgattgtggtggttgactggtgccaaattcctgccctttagcgtttacagagaagacaacggtgtcggtggttgtctgctgggccagtagagcccgactgcaca

SEQ ID NO: 220761 - DNA, 1804 bp, Zea Mays
agttgcctaagcatgtaacatgtggaatatgtttcgaaagttgccctcgtgggtcgatgagtgctgctgcatgtggtcatcctttctgcagtacatgttggagaggttacattagcactgctataagtgatggtccaggatgtttgatgttgaggtgtcctgatccatcttgtgctgctgctgttggacaagatatgataaattcactggctgctgatgatgataaggaaaagtatgggcgatatcttcgcagatcttacattgaggataatagaaagacaaaatggtgtcctgcgcctggatgtgaatacgcagtggaattcgtcatgggcagtggcagctatgatgttaattgcaactgttcatatgggttttgttggaattgcaccgaggaagctcatcgtccagtagactgtgccactgtttcgaagtggatcctcaagaacagtgcagagtcagagaatatgaattggatactggctaattcaaagccttgtcccaaatgcaaacggcctattgaaaaaaatcagggatgcatgcacatcacatgcactccaccatgcaaatttgagttctgctggctatgtcttggtccatggtcagagcatggagagaggactggtggattttatgcttgtaaccgctatgagtcagcaaggcaagaaggagcgtatgatgaatctgaaaggagaagagaaatggcaaagaactcccttgagagatacacacattattatgaacgatgggcagccaatcagtcgtcgaggcaaaaggcactgggggaccttcaaagcctacagaatgacaagcttgaaaggttaagtgacatacaaagtcaacctgagtcacagctgaagttcattgtagaggcatggttacagattgttgaatgcagaagggtattgaagtggacttatgcctatggattttacctgccagagcatgagcatgccaaaagacagttctttgaatatctgcaaggtgaggcagaatctggtttggagcggctacatcaatgtgcagagaaagaacttcaaatataccttgacgcagaatctccctcgaaagacttcaatgatttccgtacaaagttggctggattaactaggcccttccactagccatggcacatgcagcaaaagcgcaacttccaagagcctcggtggtaaaagtaagagtggcaagaacagggcatcaagcagcagttccaaatctggcggctcaacccgaggtgtggatgatagtaacatctggacatgcgatcagtgcacatatgcaaaccccaaatctgccagagcctgccaggcttgtgatcgccagcatcgatagcggtgtcagtcattgctagagatttggaccccatttgtcgagaattttctggtgttgcgccgtgcgatacacaacatacatgaaaattgaatattagctgatctctgggggtaggttttcgtgtatcatggattgtttgtcgactgactgcgcatgtgaagcctcaactcagcatccactcccatttgtgtatataagtatatccatatctgtaacaatgttttgttcaatggaagtagcggagctaggaggcgtctgctgccaaaggaactcaactgttgtagtgctgttgtaatgtaagatgcattggtcaaatttaaagaaagttagtcaccctgttacagaaattccaagggaactcttgttacatgtgattgtggtggttgactggtgccaaattcctgccctttagcgtttacagagaagacaacggtgtcggtggttgtctgctgggccagtagagcccgactgcaca

SEQ ID NO: 220762 - DNA, 1144 bp, Zea Mays
atggccgctttcgacgccgttccccgcctctccgctcaccagtacaaccaactccatctcgccgccgtcgaccgctcctccttccacagccccccccccccccccgccgcgcgccgtatcttcgcccacatgctccaggccgcagcgccgccctccgaggcccccatgatgcaaatctcccccgtccccatcttcgctgcatttcaggtcaaaacaacatcgccgaggaagtatttcgtccggccgaacgcgagcatcgtccagccatgggattcttgcacaataacgattaccctgcaggcacagaaagattacccaccagacatgcaatgcaaggataaattcttgattcagagcacgaaggtggccaccggtaccgagatggatgagatccccctgatacgttcaacaaggaaggctgataaggtaatcgaggaaatgaagctcaaggttgtctacacattacctagctacggaggttcaaatgactctagcgtatcatttttaggaagccggagcttcaaagcagcgtctgacgatctgatgatgctgaagaatgcaagccttgaagagcagcgaaaacatttctctcggcggcagagcgagagcggatgtagtccgtgcaacggcgcctgtcatcggacccgtgggcatccgcgtccacgacgtgatcatcaagggaaacactaggacgtaggacgatctcatcgaggtggaggttgctgagctgctccgcgccgccagtgtctctacagtgcgactgcacaatctcgacatcttcgacgccgtcaagaccacgctcaacgcgtggtcgctcgagctgcctggcaccaccaacatcgtcatcgaggtcgttgaggcggccaaccccctcactgccgttggagataggatccttactcctgcaatctgatgtattcagaataatagtttatgagtaaacctaatgtaactgcaatctaagatgtagttttatatgttgtatgcagttcttctgtagcaagtggaataaggttcagaatcagaacacgagatacatgtattttttcccttctctgtatagttatattgttttcattgttgaatctggtgtactattttccatgatctgatgaggagtataacttactttacctatactaat

SEQ ID NO: 220763 - DNA, 1128 bp, Zea Mays
cctggaatgtggatgcggaccaattggtacgatgtgctcggtagcgaggctggcgtttgtgcttgcactggccatagccgcctcgtcaattgaggttgcggagagcagagattttaatatctttgctcagggcagcttgcctgatgcaaccaagggatcgtctggtctagctgcaaccagtggaaagttgtgtcagttatgcgagcagtactcatccgaggcgctcctctatctcacacaaaacgagacccagactgagattcttagcattctacaccatgaatgtgccagccttgcccctctcaaacagcagtgcatcacgctggttgactactacgtaccccttttcttcttggaggtctccatggttacccctgagaagttctgcgagtcgatgcatctctgcaagaaggggatgaagattagcctacccacccgggagggtacttgtggtttgtgccaccatgttgttgttgaaattcttatcatgcttaaagaccccaacatgcagctggaagtaatcgacctactcaccaaaacatgcagcaaggcgcagaactatgaacagtagtgcaagcggctggtcctcaagtatattccacttattctggtgaagggccagaaattccttgagacaacggatgtctgctctgtgatacatgcatgcaaagcaggcacacaagcatcaatggaagccatgcctctgtctgccatgttgtgaaggtgatgcgaatcagaataaggcttatttgcctaggagatcaaattggggagaaacgatgaaaagtcagatgactgttttaagctctcttcctctattgctgaaacactattgatcggtgaaaattcggctgtgtaaaaatcttgtgtaaatttgggggtatatccattgtttctctgaagtatacagcaactgcagctacatcaatctcttcggcattgggttgagaagttctaagcagtaattgcattttactgtatcatctatttgtttgtaactactgggagttattaattccttgtttctctgttgctctgtcaaattctctgtaacattagagttatactaaaacattaagtttgctttcgaaataataaaaacatttataatacagagatggtttattt

SEQ ID NO: 220764 - DNA, 1806 bp, Zea Mays
gttcaaccttaccttgtaagaaaagattatgcctttctagcacctcctggccaccaaagaagcaaaaatcttccaggttcccacccacacggccacacccactgttctacatgctcatgcatcctcctaatgtaacctgaagctttaagaaaacaaagtgctcccggaagactccaagctgcagctaccggccttcctctcccccattccaattccgagaacaggggcggcggagtcaaccaggtacgatgtgctcggtagcgaggctggcgtttgtgcttgcactggccatagccgcctcgtcaattgaggttgcggagagcagagattttaatatctttgctcagggcagcttgcctgatgcaaccaagggatcgtctggtctagctgcaaccagtggaaagttgtgtcagttatgcgagcagtactcatccgaggcgctcctctatctcacacaaaacgagacccagactgagattcttagcattctacaccatgaatgtgccagccttgcccctctcaaacagcaggtctccatggttacccctgagaagttctgcgagtcgatgcatctctgcaagaaggggatgaagattagcctacccacccgggagggtacttgtggtttgtgccaccatgttgttgttgaaattcttatcatgcttaaagaccccaacatgcagctggaagtaatcgacctactcaccaaaacatgcagcaaggcgcagaactatgaacagtaggtgagctaagttcaagaaagggaacctcagatgtgctatgagtgcacggggctatattcaatggtatctgagaacaaaaaaaaacagcgagaattgagaaaccttgaactgattgagcacttcagaaagtgaatacttacaaactagaccaacctaggtgacattttattttatttaaatacaaaataggcatctaaatatttacatcaaagagaacttgaacctagattgtctaggcacgcatccatgcctcgaccaactgagctagttcggctttctaattttagctgtttattccaatctgcctaaagatatatgaagttaggctgttgctgatgcctgcaccctgcagaactgtatcttaagttaggttgttgctgatgcctgcaccctgcaggtttgtgcaaaatactccatatacagaacagggggtctctttctttgaaatctgatgtttgctacctctgttatcttctgttcataacattcttcttttcatccctcagtgcaagcggctggtcctcaagtatattccacttattctggtgaagggccagaaattccttgagacaacggatgtctgctctgtgatacatgcatgcaaagcaggcacacaagcatcaatggaagccatgcctctgtctgccatgttgtgaaggtgatgcgaatcagaataaggcttatttgcctaggagatcaaattggggagaaacgatgaaaagtcagatgactgttttaagctctcttcctctattgctgaaacactattgatcggtgaaaattcggctgtgtaaaaatcttgtgtaaatttgggggtatatccattgtttctctgaagtatacagcaactgcagctacatcaatctcttcggcattgggttgagaagttctaagcagtaattgcattttactgtatcatctatttgtttgtaactactgggagttattaattccttgtttctctgttgctctgtcaaattctctgtaacattagagttatactaaaacattaagtttgctttcgaaataataaaaacatttataatacagagatggtttattt

SEQ ID NO: 220765 - DNA, 1867 bp, Zea Mays
tttgctgcaaccatcagttcaaccttaccttgtaagaaaagattatgcctttctagcacctcctggccaccaaagaagcaaaaatcttccaggttcccacccacacggccacacccactgttctacatgctcatgcatcctcctaatgtaacctgaagctttaagaaaacaaagtgctcccggaagactccaagctgcagctaccggccttcctctcccccattccaattccgagaacaggggcggcggagtcaaccaggtacgatgtgctcggtagcgaggctggcgtttgtgcttgcactggccatagccgcctcgtcaattgaggttgcggagagcagagattttaatatctttgctcagggcagcttgcctgatgcaaccaagggatcgtctggtctagctgcaaccagtggaaagttgtgtcagttatgcgagcagtactcatccgaggcgctcctctatctcacacaaaacgagacccagactgagattcttagcattctacaccatgaatgtgccagccttgcccctctcaaacagcagtgcatcacgctggttgactactacgtaccccttttcttcttggaggtctccatggttacccctgagaagttctgcgagtcgatgcatctctgcaagaaggggatgaagattagcctacccacccgggagggtacttgtggtttgtgccaccatgttgttgttgaaattcttatcatgcttaaagaccccaacatgcagctggaagtaatcgacctactcaccaaaacatgcagcaaggcgcagaactatgaacagtaggtgagctaagttcaagaaagggaacctcagatgtgctatgagtgcacggggctatattcaatggtatctgagaacaaaaaaaaacagcgagaattgagaaaccttgaactgattgagcacttcagaaagtgaatacttacaaactagaccaacctaggtgacattttattttatttaaatacaaaataggcatctaaatatttacatcaaagagaacttgaacctagattgtctaggcacgcatccatgcctcgaccaactgagctagttcggctttctaattttagctgtttattccaatctgcctaaagatatatgaagttaggctgttgctgatgcctgcaccctgcagaactgtatcttaagttaggttgttgctgatgcctgcaccctgcaggtttgtgcaaaatactccatatacagaacagggggtctctttctttgaaatctgatgtttgctacctctgttatcttctgttcataacattcttcttttcatccctcagtgcaagcggctggtcctcaagtatattccacttattctggtgaagggccagaaattccttgagacaacggatgtctgctctgtgatacatgcatgcaaagcaggcacacaagcatcaatggaagccatgcctctgtctgccatgttgtgaaggtgatgcgaatcagaataaggcttatttgcctaggagatcaaattggggagaaacgatgaaaagtcagatgactgttttaagctctcttcctctattgctgaaacactattgatcggtgaaaattcggctgtgtaaaaatcttgtgtaaatttgggggtatatccattgtttctctgaagtatacagcaactgcagctacatcaatctcttcggcattgggttgagaagttctaagcagtaattgcattttactgtatcatctatttgtttgtaactactgggagttattaattccttgtttctctgttgctctgtcaaattctctgtaacattagagttatactaaaacattaagtttgctttcgaaataataaaaacatttataatacagagatggtttattt

SEQ ID NO: 220766 - DNA, 3661 bp, Zea Mays
cttgtagagttgaatctgcttcaaacaaataactacaaacctttaaataatattcaaggctgcaatgaatttgagctgtgcaattcacttgcagattatcgaagtgatttaatgataaccggtattatcacaaaggatattgagtctactgttttggctttggaactgaagcaacacaaactacagctgcaagagcaacgagttatgtttaccgatgtccttgaagaattgatggcactggcagaagcaactctatggaaagtgaaccagcatttggagaatattgcaatctgcactttacatgaggagaacaatgaggcaagggttgatttggagaacctgaagcaaaattgtgaagaaattatgaaaaaattgcatgccatgaacgaggaaaacacaacacttaaatgtttaatgtcctccttccaaacaaatttggatgcaaaaaacaaagctttgatggagttggaatgctctcatgcaaccatatgtacggagctggaactgacaattgatgccatgaatcgcagaagtactagagaaaattatttcatttctgaaaatgaaacgttgaagcaggaaattcggaatattttgtgcaaggatcagtgcatggttgaattaatggataacattgaagcagataagttattttccaccattgaaggtcgcttgcaattggttactgatcatgtgcacaattacattactgagcaaataaacacgatgagcaagttatccaatgacttagacattatcgaagtatcagcccaggagttaagcacacagaattcacttctcaagtccgaattaatcagaaaagaggaattaacaaagggcttatcatttgatcttagcctgttacaagagtctgcatctgtagcgaaagatcaagcagctgagattacagggttgagaaaagtaataaaatctttggaactagagcttgcatctaagtcgcttgaacttgatgatgttgtttctgataggcaacaattggaagcaatgattttgaagtgtaatcaaaatgttgctgccctagaggaggagctgggaaagaagattgatgaattaaacatagtttctatggagaatgctgaactaaaatcgcagatccagcatattgaagagattagttgcactatggaggagttagctgataaaagtgaagtaattagaagacttgaagaaaagttgattgaatcaagaactttaattgatgaaaggagtgtctgtcttcagagcttgcaaaatgatttctccaaactctcagatgaaaagacatcatgtgacactgagttgcttatcttgaaagagaagctggagatggctcaggcacttgcagaagaaagtgaagcaattgctacagaatctcggcagatagctgaggagcataaggcatatgccgaagggaaggatgaagaagtaaaggtattggagaggtcaattgaagaacttgagaatactgtatgcgttttagaaagcaaagtggaaattgtcaaggaagaagcagagcggcaaagaatgcagcgagaagaactagaagtggagctgcagaaagttaggcaacaaatgctagctgtaccaccctctgggaaagcaaggagatatatggaagatggaatgattgatttagctgactcatccaggcacccagtagatatgcacaatgagctcctcagtgctcaagagactattagaatacttagaaaggaggtttctgagaaggaatcagagaactaaacattcatgctgaggcagcggcacaagaatacaagcacaagttgatggagctggagactatggcacaacaggttaagacagacaattccacagcacatgcttgctctgggagacaagagaagattaactcaaaacctcggggctcaggttctccatttaaatgtatcggcatcggctttgtgcaacagatgaattctgagaaagatgaagagcttagtgctgcaaaacaacgtattgtggaactagagggcatagcagctagtagacaaagggagatattcatgttgaatgcgaaactagcaacaacagagagcatgacgcacgatgtgattcgagatatgcttggggttaaaatgaacatgacaacctgggcggctctagctgacaaccagcaaaagctggagacaaaagagcccatcacttctcaagcacaggaaatcaaagactccaatgagctgatgaatttgaagcggcagcttgatgaattcattgaagagagacagagctggcttgacgaaataaaccagaagcaatcagagcttggagctgcccgcattactatagagaagttacgacaacgggaacactttatggtagctgaaatagagttgctaaaggctgagaattcaaactacaaaaccatcatccttaaccttgaagccgaagtgaagaaccttaccagacaacagaacctccagctccgaataaatcaccacgttaaaacgaaggaagagaacatcctgctgaagaggcagaacgaagagctaagtgcaaagctgaaacagctggggggcatccttacccgtacgaaggaagagctcgcccgctacagggtttcaaatggaagagatccgcacgaactgatcgaggaggaggagcttctgaggaagaaactagacgagagcgaacgagatagaagccagctggcggaaaacctatcaagcctatgctccagcattctgaaggtcgctggagtttcggactcagaatctgacgctactcttttgaaagcatcggagtgcttggatcagctccagtgccgtatcgcttctttggaaggccaagttgaggatctaaatctaaagtgcaaactagtgcgtgaaaaggcccgcctgtgcgagctccggagcaactcgtcgtctctgcgcacaggggcgaagggcaatctgacatcgcccagtccggacacatcgccaagcatttcgtccttccgatgacacaagcggacggatacatcgccgagaagctagtgtacattagtacgtacataacacattccgtgtaactattctagtgcagccgggctgcttagggaggattagttcagtccaacaatctccctttgctgattttatatatatctgctgtacaatatatataccgtgtgtgtacttgatgcagttccattcaacacttgtcttctctcttcgtctgtcgttttctttcttctaatgtacagcaggacttaaaaattggaatacacatgcaatcaaagcagtgccatgtttatgcagttcttttaggggtgtttggtttgaagaatcaatctgctatagatggggtggtgtaatacccaaagatttgagaaataaagtaaccctttagacaaagtgtttgagcgattttgtttattttttagcatctcaacaaatacaaggcctgaataaagcaattaataaataattaaataaaacaaatatgtattcatgctgataatcttggctgttgcatttatatgtgaacggttaaactgggatttgaatttggaattggatatttaaactagaacaaaaataggaaatagaaacaaggaaagaaaaaaaagaaaaagaaaaaactcttacctaggccgcaacccctatggtggcccaatatacctcacgcgacgctagcccaacctgggagagttggcgccgac

SEQ ID NO: 220767 - DNA, 653 bp, Zea Mays
gccaaatgcctggccaaggaaaataaatcgtttaaagcctgaggaggttgctgggatgataaaggactttgatgaacctggaactcttgcaccaactggtctttttgttggaggtacgaagtacatggtgatccaaggtgaacctggagttgtcatccgaggaaagaagggcactggaggcattactatcaagaaaactggcatgtccttgattatcggtatctatgatgagccaatgactccagggcaatgcaatatggtggtggagaggctcggcgattacctgatcgaacagggcttctaagtttgtcataatgctattttggtcattgggcacttaagtttgcacctcatttggttctgtaatatgtgggcttgtgcatgtgcttggcgtattgcatgcagtgaataatttatcttcgcgttgggttggtgacaatgttgggaacggatttgaattggggtttatgcttgccatctcctcatatctcgaactcagctgctgtttcactgagtaatgtacatttccctggtaatggtacttgtgcactctgctgctttatggaaaagagtgcattttactgatgtgcttggccgtgttgttgaatatttcccgtagttattttcaactccctctctgttccaatttataa

SEQ ID NO: 220768 - DNA, 1707 bp, Zea Mays
gtgaaacagtggaaccctgaatcaatccagcccaattcggcctgcacggcccgcctcaaactgagccgacactcctcatcttcctcggttcggcacttcggctcgtcctcctcgcggcgaaaccctagcccgccgccatggacgatccctcctccgcctccaacaagcacaagcacaagcgggggcgcaagcccaaggcatcgccgccctcccccgaccactcctccccctctccctcggtcgcccccgctccggctgggcgccgtggccgcaagccgcgacgtcatgaggccctcgccgacgtggacgccacgcgtcctccatctccaccccgccgcggggagccgaagccggtggcaaacggaggcgatgtggtggcagtggcagagtcaggccccgcgagctgggatgaggtggtgagggtagtgccatgcatggacgctgtggtcaaggtgttctgcgtgcacacggagcccaacatctcgctaccgtggcagcggaagcggcagtactgctccagcagcagcggatttatcatcagcggccaccatgtcctcaccaatgctcactccgtggagtaccttgccaccgtcctggccatcggcacagagtgcgacattggtgcgaccgctctccccatccctgccactgtctccattgtttatttcttactcttagttttttttcttcttattgtgatgttgggtttgtccattgtagtcgtgaaaatcggatgcatagtaatttctttattgttttcttagagaaatacaccaagatcattttttatggtatctatgaaacttctgaggctatagcatcatttgagttatggcatggtacttatcatacagttgatttttcatgttgcttatgcaatctaatttgatattattcgtttgttgtatctgtctcaacgctcttaactgtcaatgatgatgaattctgggaaggagtttcacctattgagtttggaacattaccagtccttcaggatgcagttactgttgttggctatccaattggaggagataccatatccgtgacaagtggagtggtctctaggatagaaatgcttttatatgttcatggttctatagaacttctaggattgcagatagatgcagctattaattcaggaaattcaggtggcccagcttttaatgataggggaaaatgtgtcggtatagcttttcagtctcttaaacatgaagatgcggagaacataggttatgtgataccgactccagttattacacatttcattgaggactacaaaaatctagagaatacacaggctgcaattgagtacattcattctttatcaagggcacagcctgctcattctctcaatggtgttggtctttgtcctgctagtagatcacttagcacccatgccgccactatgtcaagcacaccacagttgaaagcacaccacgtcaagcacccaggctgccactacgtcaagcaaaacagaagacgagaagaactgatgtagccatgttcatgcttccactgttgaaatgcatattcagcatagcttgctcagctcctatctgctatttcaacgttgatttaaaagatgagctggtagttgtgggcttttgaacaatagttggagtgatatgaaacattagtgatctagttgtgaatgatattataattgtgatgcttttgtgaatatataattgtggtgcttttgtgttt

SEQ ID NO: 220769 - DNA, 1225 bp, Zea Mays
gcctgcacggcccgcctcaaactgagccgacactcctcatcttcctcggttcggcacttcggctcgtcctcctcgcggcgaaaccctagcccgccgccatggacgatccctcctccgcctccaacaagcacaagcacaagcgggggcgcaagcccaaggcatcgccgccctcccccgaccactcctccccctctccctcggtcgcccccgctccggctgggcgccgtggccgcaagccgcgacgtcatgaggccctcgccgacgtggacgccacgcgtcctccatctccaccccgccgcggggagccgaagccggtggcaaacggaggcgatgtggtgttctgcgtgcacacggagcccaacatctcgctaccgtggcagcggaagcggcagtactgctccagcagcagcggatttatcatcagcggccaccatgtcctcaccaatgctcactccgtggagtaccttgccaccgtcctggccatcggcacagagtgcgacattgtccttcaggatgcagttactgttgttggctatccaattggaggagataccatatccgtgacaagtggagtggtctctaggatagaaatgcttttatatgttcatggttctatagaacttctaggattgcagatagatgcagctattaattcaggaaattcaggtggcccagcttttaatgataggggaaaatgtgtcggtatagcttttcagtctcttaaacatgaagatgcggagaacataggttatgtgataccgactccagttattacacatttcattgaggactacaaaaatctagagaatacacaggctgcaattgagtacattcattctttatcaagggcacagcctgctcattctctcaatggtgttggtctttgtcctgctagtagatcacttagcacccatgccgccactatgtcaagcacaccacagttgaaagcacaccacgtcaagcacccaggctgccactacgtcaagcaaaacagaagacgagaagaactgatgtagccatgttcatgcttccactgttgaaatgcatattcagcatagcttgctcagctcctatctgctatttcaacgttgatttaaaagatgagctggtagttgtgggcttttgaacaatagttggagtgatatgaaacattagtgatctagttgtgaatgatattataattgtgatgcttttgtgaatatataattgtggtgcttttgtgttt

SEQ ID NO: 220770 - DNA, 1248 bp, Zea Mays
ccgctttgcccttgtttaattccaaaggtttcattttctgcagggataacatttgtggggggtggtgagccggccggccctatagaatcctgctcctgctcctgcctgcgcccgtccccttttcatgttgctttccctttcctcctcctcctcttcttcctcctcacctcacctcctatttagccgtccgaattgcttgtcagcatcttcccagcttcttcttcttcttccaaccgcgctacgctctcttgtccccggtgctcgcttggattcttctctcttcataggaaggaaggattggctaccgagatattcctactaggtgagagtccagggctgtagtgcatcctgcgcgcttggtttattctgcagccagtaccagtaccagtaccccagctgagccggtgaggagaggagatagagagagcgagcgggagcgggagcgggagcgggagcagaggaggagggccatggaaggcgacagcttctccggcggcgccatggccaacggcggcggcggcggcggcggcggcagcgggcaggtggtggacgggaagctgatccacacgttccacaggagcttcgtgcaggtgcagagcctgctggaccagaaccggatgctcatcagcgagatcaaccagaaccacgagtcccgcgcgcccgacaacctcacccgcaacgtcggcctcatccgcgagctcaacaacaacatccgccgcgtcgtcggcctctacgccgacctctccgcctccttcgcgcgcaccatggaccacgcgtcctccgagggcgactcctccggcaccggcaataacggccgcgccggcgccggcgccggccacaagcgcgtccgccccgcctagagctagcttttagtttttttcttcttcttcttctgctgggtctagcttggcgtggcaatcctaggtgttgccattgccactaggaggcgtatttagtcttttctcttgcggttcttcttgttcgccttcttcctttgtgctcgctagctgcgacgaacgccggtgattagtgtatggtaatttagtgtcaaacagagagctgccatgtggatgttgctcctatgaccacgattaagacgatgaagaaacaccagagaagcggcacacggtaggcagccttgctgctgcgcttagctagcaagcatcttgaatggaaactattttgcagcgtactaggacacactcatgtcatggtggagcgaatgcgttggaggcgaggctggctgct

SEQ ID NO: 220771 - DNA, 1229 bp, Zea Mays
gagattataacttatgataaattatctagtaagtatgcattccagcgtcaccagcagtggctacagcatgcaaaaactcgcagtgctagacacaaaattatgaaaacgaaagtgatagtgagctctcacttccaagcaccaagaatgaagatagtaaattcaactgggagaagatattaagttctgataaattattctttgtcaacaaaagtagtgatggctttttacctgttaataatgtccatacgaaggtcaatgggaagcaaaacaaaactgttaaggatttgggcatcaaaatcaatggtcattctacaattcgaggtgatagcttcagtgagttaatgcaccctggcaattctacctgcaaggaagttttccctggtttggatcactggaaatctggtaaaatttctggttggcataatacggaaggcaactctgtccaatggctttgcatagcctgtgttgaccgaaaagggatgatggcggaggttacatcggctcttacagcttgtggaattaccatatggtcttgtgtggcagaagtcaataaaaggaggggaatgggtgtgatgctgttccattttgagggaagctatgagaacgtggtcagtgcgtgttcaagtgttgacatgattcttggtgttcttggttggtctgtgggatgtagctggtgtccattgggtgttcttgagtgctaatcggtaccaagagacgtgtaccacaatagttcaccactgtcttctccaagatggagttaattttggaagcactaagacatcggtggctcaaaattttgttggtcagatcatggttggtgactggtgagcgagtggaaccctttacttctctgtcaaatcagaaagtgggggtgatcgaagtagaaccagatgtcattctgaaagtgagtgtacatagcagagcgagtagggtactgttagtgcagggattgatttgattgtacagaaggccttacaaaagattgttaagggcagttcgttcttctccccactttgtggttcgcatatactagtttgcttaaatgtgcagctagaattttgacctggacactgatcccaaattttgcctgtttaattttctcactccgcctgtaaatgttattgtacagcttcaattttgccagtgaaaatttgaacaaagttaactggtagatgcacgcctgaattacttgccattttccgcagtatgaatggtaacttaaactggag

SEQ ID NO: 220772 - DNA, 1498 bp, Zea Mays
ccgagatcttctaggaagccgtgtctttgtgttcactcctaaaggcgagattaaaaacctgcctaagggagccacagtggttgattatgcttatctgatccatactgaaatcggcaacaaaatgattgcagcaaaggtgaatggcaatctggtttcaccaatccatgtacttgcaaatgctgaagtggtggagattataacttatgataaattatctagtaagtatgcattccagcgtcaccagcagtggctacagcatgcaaaaactcgcagtgctagacacaaaattatgaaattcttaagggagcaagctgctctttctgctgctgaaataactgctgacgcagttaataattttgttgctgatcttgaagacgaaagtgatagtgagctctcacttccaagcaccaagaatgaagatagtaaattcaactgggagaagatattaagttctgataaattattctttgtcaacaaaagtagtgatggctttttacctgttaataatgtccatacgaaggtcaatgggaagcaaaacaaaactgttaaggatttgggcatcaaaatcaatggtcattctacaattcgaggtgatagcttcagtgagttaatgcaccctggcaattctacctgcaaggaagttttccctggtttggatcactggaaatctggtaaaatttctggttggcataatacggaaggcaactctgtccaatggctttgcatagcctgtgttgaccgaaaagggatgatggcggaggttacatcggctcttacagcttgtggaattaccatatggtcttgtgtggcagaagtcaataaaaggaggggaatgggtgtgatgctgttccattttgagggaagctatgagaacgtggtcagtgcgtgttcaagtgttgacatgattcttggtgttcttggttggtctgtgggatgtagctggtgtccattgggtgttcttgagtgctaatcggtaccaagagacgtgtaccacaatagttcaccactgtcttctccaagatggagttaattttggaagcactaagacatcggtggctcaaaattttgttggtcagatcatggttggtgactggtgagcgagtggaaccctttacttctctgtcaaatcagaaagtgggggtgatcgaagtagaaccagatgtcattctgaaagtgagtgtacatagcagagcgagtagggtactgttagtgcagggattgatttgattgtacagaaggccttacaaaagattgttaagggcagttcgttcttctccccactttgtggttcgcatatactagtttgcttaaatgtgcagctagaattttgacctggacactgatcccaaattttgcctgtttaattttctcactccgcctgtaaatgttattgtacagcttcaattttgccagtgaaaatttgaacaaagttaactggtagatgcacgcctgaattacttgccattttccgcagtatgaatggtaacttaaactggag

SEQ ID NO: 220773 - DNA, 1905 bp, Zea Mays
gcccttcctcgacgtttctttctttccttccacgtctctccacctcctcctcctcctttctctctcagtctctctccagcctccgcccgcttccttcttctcctgagagtcctgttgctgtctatctcccccgcgcgctattcctccgcctcgcgatagcaatccgcgcattggacgtcgccgcctcaccggacggagccggtcgaaatggaggaggcggcgcccgcaggaactaataaggtgtactacgacgggtgccccggctgcgccatggaccggaggaaggagagccgcgccggcgtcccctacaaggagctgctgttcgtcgccgccgccaccttcgcatccgctctgccaatcacgtccctgttccccttcctctacttcatgataagggacctgcgcgtcgctgagagggaggaagacattggattctacgctggtttcctcggcgcagcatacatgatcggcagaggcgtcgcgtcggtcttctggggcgtggtggcggaccgcgttggccggaagcccgtcatcgcgttctccgtcctctcggtcgtggtgttcaacaccctgttcgggctgagcgccaagtactggatggctatcgctacgaggtttctcctgggcgccctcaacggcttccttgcgccagcgaaggcgtactccatcgaggtctgccggcctgagcagcaggctctgggtatatcggtcgtaagcacagcgtgggggatgggcgtcataatcggcccggccatcggtggctacctcgcgcagcctgccaaacagtatccgcacctgttccatgagaaatcagtgtttggaaggttcccgtacctgttgccatgcctgtgcatctcgttcttcgccgccttggttgtcataagctgcgcatggctcccggagaccctacacaagcacagaggcctggagagagcagcagctgaagtggcagaaggcacgacagcagcagcagcagctcaagaaagcaccccggagccggagccggagccacctaagagcagcctgctcaggaaccggccactcatgtcctccatcgtcacgtactgcgtcttctccctccacgacaccgcgtacgtcgaggcgccagtctcctggtgtaccaaatcttcgcctaccgttgggtcaacaagatcctcggcccagtcaactcaacccgagtttcgtcggcgctatccataccgataatcgccgcttaccccttcatgacgcgcttgtcgggaataaggcttggtgtgcctctctacgtcgcggcgatgctcaaaagcgtcctcgccatcaccagagtcaccggcacatcgctcctgcagaacaacgctgtgccacaggagcagaggggcgctgcgaacgggatagctacgacggcgatgtctctgtccaaggcgttcgctccggccgtggccggcatcttgttctcgtgggcacagaagcgccagcatgccgcgttctttccaggtgaccagatggtgtttctgctcctgaatctgacggaggtcatcgggctcgtgctcaccttcaagcctttcctcgcggttccccagcagtacaaacagtgaaagcggtgctgcgtgcgtgcgtgctctgcatggatactatagagaggtagctagctgctagccagtgtgtgtgggcgagagcgagacgagggagatggacatgtcaagtagaagcagaggatatgatgtcattatacatatttactttgcgagatatgtagttcctcatgagtcttcgctgtgcggttttctaaaaaaaaattgagataaagttggtctctcaattatatggtgcattccggacatcattgttacatggaaagtgtacttcctctaactcaaactagagtattcgttttaattagcttttgagcttttatatatgtctata

SEQ ID NO: 220774 - DNA, 1349 bp, Zea Mays
ccgccttgggtttcccgaaaacccccctctccacagtccatacaccgctagacccagcgcaccggagcctgtgtcccgcgcggcctcgacgtggagcaccctccgcctcatgtccccgcggcagcctcctcccacccacgcatgcaacaaggtcttctggcctcattcattggcctcaaccctcaagcatcggctgtgcggacatgctgcgctcctgcacctcctcggccgccgctcccagattcaccgcgccaggacgctcgacggaccgggtgcccgccccctggccgcccttcgcagcggtccccgcctgctgaaacccctcccgcccttagctgtaggcctcgcggctcggcgcggtcgaaagcagctggtgcgcgatcgagaagagtccgccggcttctctggtgcgggctgcggggtgcggtgtttctgaggtccgccgcgccgcgatgaggcgaatgcagcagtgagatgagatggtagtgatcctctactcccagaggtgcaggtgtaaatgcagtcagaaaattcggcatgagccccctctctgagctggtgtggtctccggatgaaggcttgagcattaaaattgcggcgtctagtcttagcacaagaaaggcttctcttcgttggaatgcagatacattgagcatattgatatcttcacctcaacgaagtggttctggtccaggtgaaaagaacggtgataccataaatgataacctagaggtatcagaaaagatgccatcacaactgcggattcgcagtgacagctcagtgagagtaaccgtggatagccccaatagtacaaatgttgacgccctacaatttacgtctatgagatcgcaggagcaagattcaagatgagctgaaggcatggtggtctgctgctatgaagggtgagtggaagctaccgtcgaaggaagaactgggtgtgaaactaagagaaaaagagctacttcgctcgtaggatggaacggttgcgaagtactaaaatatgaaggcttctattgtacccatcctactaggaaattatgagccagttgatgaggcatgaattatttcacgacttggccgcggttagtgtgaaaaggagacgctgctatatatggtcatcacccttggtttgtccgttcgccagatatcacgattatcatatttatcggttgtaacataagcttcttgtattagcatatggtttaatattttttttcagatgggatgaggtcctgcgtgatatcctatctgtaaataggaaggcactagcagatctcgacaaatgtacaactgtttttttttttttttttgagaaacttgaaataagatttatcgttcaccactgttaa

SEQ ID NO: 220775 - DNA, 1834 bp, Zea Mays
aaaagcaagcacgatcggatgtagatggtgctctctctttttaggtgcaggtgtaaatgcagtcagaaaattcggcatgagccccctctctgagctggtgtggtctccggatgaaggcttgagcattaaaattgcggcgtctagtcttagcacaagaaaggcttctcttcgttggaatgcagatacattgagcatattgatatcttcacctcaacgaagtggttctggtccaggtgaaaagaacggtgataccataaatgataacctagaggtatcagaaaagatgccatcacaactgcggattcgcagtgacagctcagtgagagtaaccgtggatagccccaatagtacaaatgttgacgccctacaatttacgtctatgagatcgcaggagcaagattcaaagtgctgtgaagggattaatgttatgaacgaaggtaaagaagagtcagaaaactgttgcgtggataagctggaggacatggaagtggggaattgtcccaccagatgctgcaaggatgcttcccatagttcagcctccaggaaaaaagtcgtgcctagcatttcagaaaaccaggcttgctgtgcaaccactttctgcaatgaaagatcttgggaaactaatgcatggcgtgctcggttagtaaaggcagtttgtcagaaagaatctattttgccaacgaacacagagaatccaattttaccttcttccataggaatttcatgtgatgcagtagagttctcaggcaaattggtaggttcccaaggcaagtttcaaagcctgggtgtaagtagtaatgctctagaaattcattctcatgacaattgccaagatccggttctgcacgaaagccataaggatgagcctgttattgctagaggtgagtcagcatctggtgttaatattgttgcaagatgtgagtcggtacctggagttgattccagcaattttgtgagaggcaaagaaaaagttatgtacaatgacagcaattgtggtaacaatacaagggagggtgatgacagcaatgagagcatcgagagctgtacaagtacaaaagccccaaagcgcaagcatgcgcagtgttgtgcagccacgatgccttcttctggaaacaaaagatttagaagagaagacaatgagagttcttgttcgggattattgcaaaaatgtggtacatctttcttcaactggatgtcatcactcacgaatgggttacccatgctagatggagccactgctgccgttccacttgaacagaagttttcagcaagtacaggagatggatctgcagcaccttcccagccacttcaaaacaaccgcagcgttcctatgcaattttttggcttcaattcgctcttccagtccctgtatactcgtaatgttatgataacttcaggagataattgtcgtcaaccagaaagcaactgtgctggacatgtgttcaatagactgaccctggaattaaatgatagcaattctatgttgaacaaagaaattggcatgggtagagaaactcttgatctggctactcagacttcagctgctgaaggatttcagatgatttctggtggctgtagaggaaatgttcagagtcaaattgatattttccaaatgagaccagaaagaaatatgaaactgcccagttccagtaagtttagctctagatctctagaagaaaaacaaaatcagtgcacagctgcctgctcaaatgatgcaacacaaaataaaggtggtttgagggaaagcttgtgggtaactcggcttttgccaaaagcatcagtagaattgatggagggcacaccatgcaatgtagagaatgctgttagtccacag

SEQ ID NO: 220776 - DNA, 1835 bp, Zea Mays
cgatcggatgtagatggtgctctctctttttaggtgcaggtgtaaatgcagtcagaaaattcggcatgagccccctctctgagctggtgtggtctccggatgaaggcttgagcattaaaattgcggcgtctagtcttagcacaagaaaggcttctcttcgttggaatgcagatacattgagcatattgatatcttcacctcaacgaagtggttctggtccaggtgaaaagaacggtgataccataaatgataacctagaggtatcagaaaagatgccatcacaactgcggattcgcagtgacagctcagtgagagtaaccgtggatagccccaatagtacaaatgttgacgccctacaatttacgtctatgagatcgcaggagcaagattcaactaaacttgtagagtgctgtgaagggattaatgttatgaacgaaggtaaagaagagtcagaaaactgttgcgtggataagctggaggacatggaagtggggaattgtcccaccagatgctgcaaggatgcttcccatagttcagcctccaggaaaaaagtcgtgcctagcatttcagaaaaccaggcttgctgtgcaaccactttctgcaatgaaagatcttgggaaactaatgcatggcgtgctcggttagtaaaggcagtttgtcagaaagaatctattttgccaacgaacacagagaatccaattttaccttcttccataggaatttcatgtgatgcagtagagttctcaggcaaattggtaggttcccaaggcaagtttcaaagcctgggtgtaagtagtaatgctctagaaattcattctcatgacaattgccaagatccggttctgcacgaaagccataaggatgagcctgttattgctagaggtgagtcagcatctggtgttaatattgttgcaagatgtgagtcggtacctggagttgattccagcaattttgtgagaggcaaagaaaaagttatgtacaatgacagcaattgtggtaacaatacaagggagggtgatgacagcaatgagagcatcgagagctgtacaagtacaaaagccccaaagcgcaagcatgcgcagtgttgtgcagccacgatgccttcttctggaaacaaaagatttagaagagaagacaatgagagttcttgttcgggattattgcaaaaatgtggtacatctttcttcaactggatgtcatcactcacgaatgggttacccatgctagatggagccactgctgccgttccacttgaacagaagttttcagcaagtacaggagatggatctgcagcaccttcccagccacttcaaaacaaccgcagcgttcctatgcaattttttggcttcaattcgctcttccagtccctgtatactcgtaatgttatgataacttcaggagataattgtcgtcaaccagaaagcaactgtgctggacatgtgttcaatagactgaccctggaattaaatgatagcaattctatgttgaacaaagaaattggcatgggtagagaaactcttgatctggctactcagacttcagctgctgaaggatttcagatgatttctggtggctgtagaggaaatgttcagagtcaaattgatattttccaaatgagaccagaaagaaatatgaaactgcccagttccagtaagtttagctctagatctctagaagaaaaacaaaatcagtgcacagctgcctgctcaaatgatgcaacacaaaataaaggtggtttgagggaaagcttgtgggtaactcggcttttgccaaaagcatcagtagaattgatggagggcacaccatgcaatgtagagaatgctgttagtccacag

SEQ ID NO: 220777 - DNA, 1457 bp, Zea Mays
gaacaaccaggctccatcggatttccatgtagcatggcagtggttacctttcacgtcatccgcacgaactgataaccttcaactctatcactgggttagagttgttaatggtattcagccaactggggattatcagtttgcaaaatataacaagagggcggatgttcttaaatatacggatgaagagtatgagaagtatttagttgaccctgattggagcaaggaagaaacagatcaactatttgaattatgtgaacgatttgaccttcgcttcataataatagcagataagtttccaactgctcgcagtgtggaagatctgaaaagtccttactattctgcttctcgggctcttctaattcatagagctaggtcattcgaagatgtttctgggaatccccttgtgaaggatgcctatgatgctgctcatgagactgagaggaagcgtgcattatcagcacttctctcccaaacaaagcagcaagaacgaaaggacgccgagactttagcagaagcaaaacgtatcatggaatctcgtgctgctagcaaacttcgagtgtatttgagaacccatgcgcttgaccaaatggtccaagcagtaggtgcttcagctggccttagagttatcaaaagggttgatcagacactacaagagctagcggtgaatttgaagcctaaggtcccaacgaaagcagtttgcatagagcatattgaactgcggaatgagctactcacattgcttaacctacaaaagcagctgcaaaataaagaggctgaagtttcagctaaccgggaaagttccttcacagaggcaccaagcacacctaagcgttctaatagggacattgatcggcccttcatccctgatacaagtgggtttacaggtgaaagagcaggcaaacgggatcacaagcggaagtccactggaagatttatagatgcgcctccatcaccaccccagtcgaagcggcctagaaaattgaagggatctgactgatagtgctgttcaaatgtcaggatgaaaactctagtcaaacaaccaagcacttgcagtcttacagtagagatgaactagtagaacctaataggtcagcaacggcatcaatggaaatccgttgggctggccagtcatgcaggaaccgactttcgctgcttgccctgacttcgggccatatgctgggtggaccggttttggatttataatgtatctatctattattgtcatgtaatgttacacagataactgagaggtcgaaatcgtcacttttcagcagatttctgaattctgagtatgggagaccggtaagcccgacaattccgtttttgctcctgtccaaccagcacggtcaatcggttcacccaatagacgttcaacaaacaggctttgagagcacgctagtgcctgtttgttcaccatgccttcccggaagctcatctgacagctcctttactttgtt

SEQ ID NO: 220778 - DNA, 1706 bp, Zea Mays
gaacaaccaggctccatcggatttccatgtagcatggcagtggttacctttcacgtcatccgcacgaactgataaccttcaactctatcactgggttagagttgttaatggtattcagccaactggggattatcagtttgcaaaatataacaagagggcggatgttcttaaatatacggatgaagagtatgagaagtatttagttgaccctgattggagcaaggaagaaacagatcaactatttgaattatgtgaacgatttgaccttcgcttcataataatagcagataagtttccaactgctcgcagtgtggaagatctgaaaagtccttactattctgcttctcgggctcttctaattcatagagctaggtcattcgaagatgtttctgggaatccccttgtgaaggatgcctatgatgctgctcatgagactgagaggaagcgtgcattatcagcacttctctcccaaacaaagcagcaagaacgaaaggacgccgagactttagcagaagcaaaacgtatcatggaatctcgtgctgctagcaaaaatgttgatgtagctgtaatgcctccgaactctgataatgctatggtacctgttgatggtgtatctccttcaagcagtactcatccatctttagcacatccaaatacatcagctaacatcttgatacctaattcactacgaacgcttcgagtgtatttgagaacccatgcgcttgaccaaatggtccaagcagtaggtgcttcagctggccttagagttatcaaaagggttgatcagacactacaagagctagcggtgaatttgaagcctaaggtcccaacgaaagcagtttgcatagagcatattgaactgcggaatgagctactcacattgcttaacctacaaaagcagctgcaaaataaagaggctgaagtttcagctaaccgggaaagttccttcacagaggcaccaagcacacctaagcgttctaatagggacattgatcggcccttcatccctgatacaagtgggtttacaggtgaaagagcaggcaaacgggatcacaagcggaagtccactggaagatttatagatgcgcctccatcaccaccccagtcgaagcggcctagaaaattgaagggatctgactgatagtgctgttcaaatgtcaggatgaaaactctagtcaaacaaccaaggtgtgtcatatcatactaaagttaaactacgtgtttttcatgattatttagtcccgacttaagagctgcagattgacatttacatcacttttttgaataatgtagcacttgcagtcttacagtagagatgaactagtagaacctaataggtcagcaacggcatcaatggaaatccgttgggctggccagtcatgcaggaaccgactttcgctgcttgccctgacttcgggccatatgctgggtggaccggttttggatttataatgtatctatctattattgtcatgtaatgttacacagataactgagaggtcgaaatcgtcacttttcagcagatttctgaattctgagtatgggagaccggtaagcccgacaattccgtttttgctcctgtccaaccagcacggtcaatcggttcacccaatagacgttcaacaaacaggctttgagagcacgctagtgcctgtttgttcaccatgccttcccggaagctcatctgacagctcctttactttgtt

SEQ ID NO: 220779 - DNA, 1701 bp, Zea Mays
gaagattgctgataggcttccaggtagcatggcagtggttacctttcacgtcatccgcacgaactgataaccttcaactctatcactgggttagagttgttaatggtattcagccaactggggattatcagtttgcaaaatataacaagagggcggatgttcttaaatatacggatgaagagtatgagaagtatttagttgaccctgattggagcaaggaagaaacagatcaactatttgaattatgtgaacgatttgaccttcgcttcataataatagcagataagtttccaactgctcgcagtgtggaagatctgaaaagtccttactattctgcttctcgggctcttctaattcatagagctaggtcattcgaagatgtttctgggaatccccttgtgaaggatgcctatgatgctgctcatgagactgagaggaagcgtgcattatcagcacttctctcccaaacaaagcagcaagaacgaaaggacgccgagactttagcagaagcaaaacgtatcatggaatctcgtgctgctagcaaaaatgttgatgtagctgtaatgcctccgaactctgataatgctatggtacctgttgatggtgtatctccttcaagcagtactcatccatctttagcacatccaaatacatcagctaacatcttgatacctaattcactacgaacgcttcgagtgtatttgagaacccatgcgcttgaccaaatggtccaagcagtaggtgcttcagctggccttagagttatcaaaagggttgatcagacactacaagagctagcggtgaatttgaagcctaaggtcccaacgaaagcagtttgcatagagcatattgaactgcggaatgagctactcacattgcttaacctacaaaagcagctgcaaaataaagaggctgaagtttcagctaaccgggaaagttccttcacagaggcaccaagcacacctaagcgttctaatagggacattgatcggcccttcatccctgatacaagtgggtttacaggtgaaagagcaggcaaacgggatcacaagcggaagtccactggaagatttatagatgcgcctccatcaccaccccagtcgaagcggcctagaaaattgaagggatctgactgatagtgctgttcaaatgtcaggatgaaaactctagtcaaacaaccaaggtgtgtcatatcatactaaagttaaactacgtgtttttcatgattatttagtcccgacttaagagctgcagattgacatttacatcacttttttgaataatgtagcacttgcagtcttacagtagagatgaactagtagaacctaataggtcagcaacggcatcaatggaaatccgttgggctggccagtcatgcaggaaccgactttcgctgcttgccctgacttcgggccatatgctgggtggaccggttttggatttataatgtatctatctattattgtcatgtaatgttacacagataactgagaggtcgaaatcgtcacttttcagcagatttctgaattctgagtatgggagaccggtaagcccgacaattccgtttttgctcctgtccaaccagcacggtcaatcggttcacccaatagacgttcaacaaacaggctttgagagcacgctagtgcctgtttgttcaccatgccttcccggaagctcatctgacagctcctttactttgtt

SEQ ID NO: 220780 - DNA, 1608 bp, Zea Mays
cagattgagatctagaatcagatttgttaaagcaggtagcatggcagtggttacctttcacgtcatccgcacgaactgataaccttcaactctatcactgggttagagttgttaatggtattcagccaactggggattatcagtttgcaaaatataacaagagggcggatgttcttaaatatacggatgaagagtatgagaagtatttagttgaccctgattggagcaaggaagaaacagatcaactatttgaattatgtgaacgatttgaccttcgcttcataataatagcagataagtttccaactgctcgcagtgtggaagatctgaaaagtccttactattctgcttctcgggctcttctaattcatagagctaggtcattcgaagatgtttctgggaatccccttgtgaaggatgcctatgatgctgctcatgagactgagaggaagcgtgcattatcagcacttctctcccaaacaaagcagcaagaacgaaaggacgccgagactttagcagaagcaaaacgtatcatggaatctcgtgctgctagcaaaaatgttgatgtagctgtaatgcctccgaactctgataatgctatggtacctgttgatggtgtatctccttcaagcagtactcatccatctttagcacatccaaatacatcagctaacatcttgatacctaattcactacgaacgcttcgagtgtatttgagaacccatgcgcttgaccaaatggtccaagcagtaggtgcttcagctggccttagagttatcaaaagggttgatcagacactacaagagctagcggtgaatttgaagcctaaggtcccaacgaaagcagtttgcatagagcatattgaactgcggaatgagctactcacattgcttaacctacaaaagcagctgcaaaataaagaggctgaagtttcagctaaccgggaaagttccttcacagaggcaccaagcacacctaagcgttctaatagggacattgatcggcccttcatccctgatacaagtgggtttacaggtgaaagagcaggcaaacgggatcacaagcggaagtccactggaagatttatagatgcgcctccatcaccaccccagtcgaagcggcctagaaaattgaagggatctgactgatagtgctgttcaaatgtcaggatgaaaactctagtcaaacaaccaagcacttgcagtcttacagtagagatgaactagtagaacctaataggtcagcaacggcatcaatggaaatccgttgggctggccagtcatgcaggaaccgactttcgctgcttgccctgacttcgggccatatgctgggtggaccggttttggatttataatgtatctatctattattgtcatgtaatgttacacagataactgagaggtcgaaatcgtcacttttcagcagatttctgaattctgagtatgggagaccggtaagcccgacaattccgtttttgctcctgtccaaccagcacggtcaatcggttcacccaatagacgttcaacaaacaggctttgagagcacgctagtgcctgtttgttcaccatgccttcccggaagctcatctgacagctcctttactttgtt

SEQ ID NO: 220781 - DNA, 1880 bp, Zea Mays
ctctcctccgtggatctccgcgcagtcgtggcggcagcggcgtgcgtccctgctgtgagcttcctcgcacctgcgccttcctcgtgaggccgtatacatggacgcgaaggacatactagggcttccgaagacccccttctcgtcctcccaggagaagaaatcgcggccgcccaaggagccgcagcgcaagcctgatggcgtctcgcgcgaggtctatgccctcaccggaggggtgggaatgcccccgctcatgccgaccattgaggcatcgcacctgaagaggcggcctgctgcggagaaagagaaggtagcatggcagtggttacctttcacgtcatccgcacgaactgataaccttcaactctatcactgggttagagttgttaatggtattcagccaactggggattatcagtttgcaaaatataacaagagggcggatgttcttaaatatacggatgaagagtatgagaagtatttagttgaccctgattggagcaaggaagaaacagatcaactatttgaattatgtgaacgatttgaccttcgcttcataataatagcagataagtttccaactgctcgcagtgtggaagatctgaaaagtccttactattctgcttctcgggctcttctaattcatagagctaggtcattcgaagatgtttctgggaatccccttgtgaaggatgcctatgatgctgctcatgagactgagaggaagcgtgcattatcagcacttctctcccaaacaaagcagcaagaacgaaaggacgccgagactttagcagaagcaaaacgtatcatggaatctcgtgctgctagcaaaaatgttgatgtagctgtaatgcctccgaactctgataatgctatggtacctgttgatggtgtatctccttcaagcagtactcatccatctttagcacatccaaatacatcagctaacatcttgatacctaattcactacgaacgcttcgagtgtatttgagaacccatgcgcttgaccaaatggtccaagcagtaggtgcttcagctggccttagagttatcaaaagggttgatcagacactacaagagctagcggtgaatttgaagcctaaggtcccaacgaaagcagtttgcatagagcatattgaactgcggaatgagctactcacattgcttaacctacaaaagcagctgcaaaataaagaggctgaagtttcagctaaccgggaaagttccttcacagaggcaccaagcacacctaagcgttctaatagggacattgatcggcccttcatccctgatacaagtgggtttacaggtgaaagagcaggcaaacgggatcacaagcggaagtccactggaagatttatagatgcgcctccatcaccaccccagtcgaagcggcctagaaaattgaagggatctgactgatagtgctgttcaaatgtcaggatgaaaactctagtcaaacaaccaagcacttgcagtcttacagtagagatgaactagtagaacctaataggtcagcaacggcatcaatggaaatccgttgggctggccagtcatgcaggaaccgactttcgctgcttgccctgacttcgggccatatgctgggtggaccggttttggatttataatgtatctatctattattgtcatgtaatgttacacagataactgagaggtcgaaatcgtcacttttcagcagatttctgaattctgagtatgggagaccggtaagcccgacaattccgtttttgctcctgtccaaccagcacggtcaatcggttcacccaatagacgttcaacaaacaggctttgagagcacgctagtgcctgtttgttcaccatgccttcccggaagctcatctgacagctcctttactttgtt

SEQ ID NO: 220782 - DNA, 1882 bp, Zea Mays
ctctcctccgtggatctccgcgcagtcgtggcggcagcggcgtgcgtccctgctgtgagcttcctcgcaccgttgcgccttcctcgtgaggccgtatacatggacgcgaaggacatactagggcttccgaagacccccttctcgtcctcccaggagaagaaatcgcggccgcccaaggagccgcagcgcaagcctgatggcgtctcgcgcgaggtctatgccctcaccggaggggtgggaatgcccccgctcatgccgaccattgaggcatcgcacctgaagaggcggcctgctgcggagaaagagaaggtagcatggcagtggttacctttcacgtcatccgcacgaactgataaccttcaactctatcactgggttagagttgttaatggtattcagccaactggggattatcagtttgcaaaatataacaagagggcggatgttcttaaatatacggatgaagagtatgagaagtatttagttgaccctgattggagcaaggaagaaacagatcaactatttgaattatgtgaacgatttgaccttcgcttcataataatagcagataagtttccaactgctcgcagtgtggaagatctgaaaagtccttactattctgcttctcgggctcttctaattcatagagctaggtcattcgaagatgtttctgggaatccccttgtgaaggatgcctatgatgctgctcatgagactgagaggaagcgtgcattatcagcacttctctcccaaacaaagcagcaagaacgaaaggacgccgagactttagcagaagcaaaacgtatcatggaatctcgtgctgctagcaaaaatgttgatgtagctgtaatgcctccgaactctgataatgctatggtacctgttgatggtgtatctccttcaagcagtactcatccatctttagcacatccaaatacatcagctaacatcttgatacctaattcactacgaacgcttcgagtgtatttgagaacccatgcgcttgaccaaatggtccaagcagtaggtgcttcagctggccttagagttatcaaaagggttgatcagacactacaagagctagcggtgaatttgaagcctaaggtcccaacgaaagcagtttgcatagagcatattgaactgcggaatgagctactcacattgcttaacctacaaaagcagctgcaaaataaagaggctgaagtttcagctaaccgggaaagttccttcacagaggcaccaagcacacctaagcgttctaatagggacattgatcggcccttcatccctgatacaagtgggtttacaggtgaaagagcaggcaaacgggatcacaagcggaagtccactggaagatttatagatgcgcctccatcaccaccccagtcgaagcggcctagaaaattgaagggatctgactgatagtgctgttcaaatgtcaggatgaaaactctagtcaaacaaccaagcacttgcagtcttacagtagagatgaactagtagaacctaataggtcagcaacggcatcaatggaaatccgttgggctggccagtcatgcaggaaccgactttcgctgcttgccctgacttcgggccatatgctgggtggaccggttttggatttataatgtatctatctattattgtcatgtaatgttacacagataactgagaggtcgaaatcgtcacttttcagcagatttctgaattctgagtatgggagaccggtaagcccgacaattccgtttttgctcctgtccaaccagcacggtcaatcggttcacccaatagacgttcaacaaacaggctttgagagcacgctagtgcctgtttgttcaccatgccttcccggaagctcatctgacagctcctttactttgtt

SEQ ID NO: 220783 - DNA, 1924 bp, Zea Mays
aaacgacttaacgtaggcgcggagatcggagcgtggtgcggcgtgccacgggcgtgcggagctctcctccgtggatctccgcgcagtcgtggcggcagcggcgtgcgtccctgcttgcgccttcctcgtgaggccgtatacatggacgcgaaggacatactagggcttccgaagacccccttctcgtcctcccaggagaagaaatcgcggccgcccaaggagccgcagcgcaagcctgatggcgtctcgcgcgaggtctatgccctcaccggaggggtgggaatgcccccgctcatgccgaccattgaggcatcgcacctgaagaggcggcctgctgcggagaaagagaaggtagcatggcagtggttacctttcacgtcatccgcacgaactgataaccttcaactctatcactgggttagagttgttaatggtattcagccaactggggattatcagtttgcaaaatataacaagagggcggatgttcttaaatatacggatgaagagtatgagaagtatttagttgaccctgattggagcaaggaagaaacagatcaactatttgaattatgtgaacgatttgaccttcgcttcataataatagcagataagtttccaactgctcgcagtgtggaagatctgaaaagtccttactattctgcttctcgggctcttctaattcatagagctaggtcattcgaagatgtttctgggaatccccttgtgaaggatgcctatgatgctgctcatgagactgagaggaagcgtgcattatcagcacttctctcccaaacaaagcagcaagaacgaaaggacgccgagactttagcagaagcaaaacgtatcatggaatctcgtgctgctagcaaaaatgttgatgtagctgtaatgcctccgaactctgataatgctatggtacctgttgatggtgtatctccttcaagcagtactcatccatctttagcacatccaaatacatcagctaacatcttgatacctaattcactacgaacgcttcgagtgtatttgagaacccatgcgcttgaccaaatggtccaagcagtaggtgcttcagctggccttagagttatcaaaagggttgatcagacactacaagagctagcggtgaatttgaagcctaaggtcccaacgaaagcagtttgcatagagcatattgaactgcggaatgagctactcacattgcttaacctacaaaagcagctgcaaaataaagaggctgaagtttcagctaaccgggaaagttccttcacagaggcaccaagcacacctaagcgttctaatagggacattgatcggcccttcatccctgatacaagtgggtttacaggtgaaagagcaggcaaacgggatcacaagcggaagtccactggaagatttatagatgcgcctccatcaccaccccagtcgaagcggcctagaaaattgaagggatctgactgatagtgctgttcaaatgtcaggatgaaaactctagtcaaacaaccaagcacttgcagtcttacagtagagatgaactagtagaacctaataggtcagcaacggcatcaatggaaatccgttgggctggccagtcatgcaggaaccgactttcgctgcttgccctgacttcgggccatatgctgggtggaccggttttggatttataatgtatctatctattattgtcatgtaatgttacacagataactgagaggtcgaaatcgtcacttttcagcagatttctgaattctgagtatgggagaccggtaagcccgacaattccgtttttgctcctgtccaaccagcacggtcaatcggttcacccaatagacgttcaacaaacaggctttgagagcacgctagtgcctgtttgttcaccatgccttcccggaagctcatctgacagctcctttactttgtt

SEQ ID NO: 220784 - DNA, 1604 bp, Zea Mays
aggcactcctgaagtcctgattgtatgaccttgctcgtttgatcattgggagtgaaggaactttgggtgtaattacagaagtgactttacgactccaaaagcttccatctcattctgtagttgcaatgtgcaatttcaaaacaattaaggatgctgctgatgttgctattgcaacaatgctttctgggatacaggtttcaagagtggaattgttggacgaggttcagataaaggcaataaatatggcaaatggcaaaaatttgcctgaagtgccgaccttgatgtttgaattcatagggacagaagcatatgctctggaacaaactctcttggttcaaaaaattgccactgaacaccatggatcagattttgtttttgtcgaggagccagatgctaaagcggaactatggaagatcaggaaggaggcactttgggctggttttgctatgaaacctgatcatgaagctatgataacgtctggttattgctcatgctggtgatggaaattttcacacaattatcctgtttgatccaagccaagaggaccaacgaaaggaagcagagagactaaaccatttcatggtccatacagctctgtctatggaaggtacatgcacaggagagcatggtgttggcacagggaaaatgaagtacctggagaaggagttgggcatcgagtcactcaggacgatgaaaagaataaaggcggcgctggatcccaacaacatcatgaatccgggaaagctgatcccgcctcacgtctgcatatgaccgtcacctgactggaggatcgatccccccatggccatcagtgggcttgttggctcactcatcaaaagctttggttccgcgaggcgtgacgcggtgctctgctgacagttgcaataatgcgctgaactgctctgtgcctgtatggcatgcgttggaggcaaatgcacgtaggcgtcacatcaaaactataccggtaccaaaaaaaaaaaaaaaaaactgaactgcctcagggaagggatgggaaataatggagcaaacattcgtctcctgacgccgttttaacaggagaaccctttttacgatcaagtacagcttgacggggccacctagcggtggcgagacggcagcgttctgtactacgcaccacttccgttgccggccgagtcgtcggcacggcacccaccacctcaccaggcggccgcgccacgtccttaccccacgtccccactgtcgcttccggcgatctcgtccggccccgagccgttctcctcgcaaaacgatgctacttccggatcctgattcccaacagtaacaggggcttgtgtcgtctggaacttatcagaccactatcaaaacgtgggctcaatattggttcacaccctgagtctggcccaacatgaataatacgaggaatggttggtgaatagctgctgctgctctacgcagcggtgcttttgcaaccgtggcgcaaatattgtgtagcatttttttttactgtttctgggtttcagctggtgttgtattcacttttcatcatatcgataaaatgtggggaagcatagtaaaacatgtcattactattgttggttcttccaaaatccggcgattgggaa

SEQ ID NO: 220785 - DNA, 1713 bp, Zea Mays
ggcgggcctccatctccacgcgcggcaaatcggcgagctgatgcggaggcggccgaggaggcgctcgacggctcggcgctgtccagtaatcagtaggcgccgctgcgtcggcgacttcttctccccaccagcgtggccgcgtgcagggttcaggctgtcacggaactcaagggtattagtgatatacaaaagtttgctttatggcaagtcagtgatgagtgaagggtgactaagaggcttctctaagtgtcaatatacaagacttcattgacgaggagatggtcccagttacattacatggttctgttggacacaatgaagccatccagatatgctattaaaatcctgctagttattatggatttaagttgtaccatgtctgttccatctacagctaggcagagcatgaactatcaaaggatcatgatacagacatctcacatcttagaaaattctgttcagtggttcttcaagggtacatcaggcgcataccaaaaccagtctcagccttctttcctgatccatgatgcctctcagcctataacattgatgacagtgactagtgatactagtgatcatgctggcgaatgctagacgtcattaccatacagcaggccagcagccagtaaggagctccactttggcagcctgccactctgcttcttccactcctgaaaccgagcctgcaggtgcaggcaatgcggttgcttgctggagtccttatccaatcagtgaaggcactaaactcgcaaagccgttggaatctgcgagcaaggtcatgcacatcttgttggatgaagttaatacagcctgcactgcaactcccgcactctcgcgatcgtgtggaagacgtgggcgccgttgagggtcaaaatcttcttgtggcttgcctggcggagacggctctggaccgcagacaggcgacgacgtcacggactcgatgcgagaaccacttgctacctctgcaatacagcggaagaaacttgcgaccatctactggccacttgcagcttctcccttcgagtttgggatggcattttgtcgcaattggggcttcacagaccgtcgctaactgactgcagttcagtccttggttggtggcaaagagtgcgggagctgtggccaccgggcgccaggaagggcggtgattctctctttgcgttggtgacttgggaagtttggaaagagagaaatgcaaggtgcttccggagtgaggcatcctcagttgacgccgtagtttcttccgctcttggtgttgctagcgagtgggtgagagcgggcgcgaaagcccttggttgtattctgagcgagtagtcggctctgtgttgagctggttggccagctcttgtttttgtatttgtgttcgtactcttcttctattaacaaagatgcgcagctctcctgcgtattcgacaaaaaaaaaaactctgcaagatatggaatctgtgagtggatctctaagatgatgactgtgcacctgacaacgtgccacttgggacttgcttgtttgggcccggtttatcacacctagagcttctgctctgctcctgcgtgcccttctcggttgccatcgtggcgtgttgattgctaggctgctcttttgagctggcctgaactgtccgccgtccccgtcccctccaatcacaattcacaactgcctcgcactctgcccgctgacaagggagcaatagtcatcaataaaaaatatagaag

SEQ ID NO: 220786 - DNA, 1210 bp, Zea Mays
gccttgccgccttgggttaatcacctgcaccgcaagtaacccaacactgtcttccaatgcaagtgactgccccgacccatcatgcgccaggcgaatcaaaccactacctgatttgtttaccccccgaaatttgccgtctcctcgtctcgctcctctccctgcgcagcccccagatccggcaccgcccgctcctcgatccccgcaccccacgcccgcaggccgggaccggcggggtcgcgcgccgggtaggaggaggagaagaggaagggtggtatggcggcgccgccggcgagggccagggccgactacgactaccttatcaagctgctcctcattggagacagcggtgttggcaagagttgcctcctgttgcggttctctgatggttccttcactacaagctttattaccacaattggtattgactttaagatacgaacgatagaattggatggcaagcgtataaagctacagatttgggatacggcgggccaagaacgcttccggactattaccaccgacatccgaaactggattcggaacattgaacaacacgcctctgataatgtcaacaagattttggttggcaacaaggccgatatggacgaaagcaagagggctgtacctactgcaaaaggacaagcacttgctgatgagtacgggatcaagttttttgaaacgagtgcgaagacaaacctgaatgtggagcaagtgttttttctccatcgcacgtgacatcaagcagaggcttgcggagactgattcaaagccagaggacaaggcaatcaaaattaacaagccagaccagggttccgaggcaccagctgcccagcgatctgcttgctgcggctcataagcagatgcacgatggccatagcctttggttatttgacattatttatttcccgcttggctgttataggaaggatttgaagaagccacttatgatataccgatgtggttgtactcgtggttgcttccattctttgaagcaaccacctcttgctgttgacgtagctattgctattgctgggagctattgcactcttgcattggatccgttggaaaaactctcccctccctacagtgtgtaatgaatgaaatccatgtcgttgggtttgcatggaataacgtgtcgctcttgtgtgtgtgttttaagtgtcgccgttccttgataatcgaatttgttgggaccaagaatatatctacc

SEQ ID NO: 220787 - DNA, 1308 bp, Zea Mays
caggctttaagctcaccggtcggtggctgggcgccttgccgccttgggttaatcacctgcaccgcaagtaacccaacactgtcttccaatgcaagtgactgccccgacccatcatgcgccaggcgaatcaaaccactacctgatttgtttaccccccgaaatttgccgtctcctcgtctcgctcctctccctgcgcagcccccagatccggcaccgcccgctcctcgatccccgcaccccacgcccgcaggccgggaccggcggggtcgcgcgccgggtaggaggaggagaagaggaagggtggtatggcggcgccgccggcgagggccagggccgactacgactaccttatcaagctgctcctcattggagacagcggtgttggcaagagttgcctcctgttgcggttctctgatggttccttcactacaagctttattaccacaattggtattgactttaagatacgaacgatagaattggatggcaagcgtataaagctacagatttgggatacggcgggccaagaacgcttccggactattaccaccgcgtactaccgaggagctatgggcatcttgctggtttatgatgtcaccgatgaatcttcttttaacaacatccgaaactggattcggaacattgaacaacacgcctctgataatgtcaacaagattttggttggcaacaaggccgatatggacgaaagcaagagggctgtacctactgcaaaaggacaagcacttgctgatgagtacgggatcaagttttttgaaacgagtgcgaagacaaacctgaatgtggagcaagtgttttttctccatcgcacgtgacatcaagcagaggcttgcggagactgattcaaagccagaggacaaggcaatcaaaattaacaagccagaccagggttccgaggcaccagctgcccagcgatctgcttgctgcggctcataagcagatgcacgatggccatagcctttggttatttgacattatttatttcccgcttggctgttataggaaggatttgaagaagccacttatgatataccgatgtggttgtactcgtggttgcttccattctttgaagcaaccacctcttgctgttgacgtagctattgctattgctgggagctattgcactcttgcattggatccgttggaaaaactctcccctccctacagtgtgtaatgaatgaaatccatgtcgttgggtttgcatggaataacgtgtcgctcttgtgtgtgtgttttaagtgtcgccgttccttgataatcgaatttgttgggaccaagaatatatctacc

SEQ ID NO: 220788 - DNA, 1180 bp, Zea Mays
caggctttaagctcaccggtcggtggctgggcgccttgccgccttgggttaatcacctgcaccgcaagtaacccaacactgtcttccaatgcaagtgactgccccgacccatcatgcgccaggcgaatcaaaccactacctgatttgtttaccccccgaaatttgccgtctcctcgtctcgctcctctccctgcgcagcccccagatccggcaccgcccgctcctcgatccccgcaccccacgcccgcaggtgttggcaagagttgcctcctgttgcggttctctgatggttccttcactacaagctttattaccacaattggtattgactttaagatacgaacgatagaattggatggcaagcgtataaagctacagatttgggatacggcgggccaagaacgcttccggactattaccaccgcgtactaccgaggagctatgggcatcttgctggtttatgatgtcaccgatgaatcttcttttaacaacatccgaaactggattcggaacattgaacaacacgcctctgataatgtcaacaagattttggttggcaacaaggccgatatggacgaaagcaagagggctgtacctactgcaaaaggacaagcacttgctgatgagtacgggatcaagttttttgaaacgagtgcgaagacaaacctgaatgtggagcaagtgttttttctccatcgcacgtgacatcaagcagaggcttgcggagactgattcaaagccagaggacaaggcaatcaaaattaacaagccagaccagggttccgaggcaccagctgcccagcgatctgcttgctgcggctcataagcagatgcacgatggccatagcctttggttatttgacattatttatttcccgcttggctgttataggaaggatttgaagaagccacttatgatataccgatgtggttgtactcgtggttgcttccattctttgaagcaaccacctcttgctgttgacgtagctattgctattgctgggagctattgcactcttgcattggatccgttggaaaaactctcccctccctacagtgtgtaatgaatgaaatccatgtcgttgggtttgcatggaataacgtgtcgctcttgtgtgtgtgttttaagtgtcgccgttccttgataatcgaatttgttgggaccaagaatatatctacc

SEQ ID NO: 220789 - DNA, 702 bp, Zea Mays
caaattgcctggcctcgtattcacatgacctcttatccgcatccttggtgatcggtttccatggcaagttaagtcagcaatcctatcaaccctgacaatcatcatcatgaaaggtggaattgcacttaagcccttccttccacaacttcaaactacattcgtgaaatgtctacaggataacaataagtctgtccggacgagggctgcagctgctctcggaaagcttagtgctcttagcacacgggtggatcctttagttagcgatcttctgtccatgttgcagtcaggagatgaatctgtaaaagaaagtgtgctttctgcactcaaaggtgttatcaaacatgctggcaaaagtgtcagtgctccaataaggtcacggggatgtgctcttcttgaagatctgctgcaggctgaagctgatgatatccgcagttgtgctgcaaaagtgattggcacattgtctcagtacatggatgacagagagattccagatttggtgcaaatccttttggaagtgggcacctcatcggactggtgtaccaggcatggtgctttgttagcattatcatccatatcaatgcattctccatcaaaattatgtgatttggcatcctttccatctctggttgatcttctgaaagattctcttaaagacgacaagttccctgttcgtgaagttgctacaagaactctggaaggaga

SEQ ID NO: 220790 - DNA, 3724 bp, Zea Mays
atttgcttctcgcaccatttcacactgctgcgacaacacgcctttggatctgctctgttttagtgctgccagtttgggaaatatcagtctttttcactaattattattatgtgctaccttaattacctcccattttcagtaggttcttgcaactggctactatcaactccactcatagttaagactaattagaaccactgcagcaaccataaacttgaaccactttccattactctgctatcagatcctgaaccagtgcagcaacatgcctagttatgccctcccgtttttctgatttgagcagttaacctcgcaatccaactgggtggctgtcttaactctgttactaccgccaccaataccttcggttactcaagttaacactgctgctgtgtgacaggagaagctgcgtgtcgctgtgctcgtctcaaaggctgcactgcagtttctacatggcctcacccttcgaagcgagtacgtcgtccctgaggaagtcaaggctgcagggtttcagatctgtgccgacgagctggggtctattgttgagggtcatgatagtaagaagctcatcacccaaggtggagttgatggaattgcggaaaaacttgcaacttcgaagacggatgggctaagcacagccgatgatagtattaagcgcaggcaagacatatatggagtaaacaggttcacagaaagtgaggtccgtagtttctgggtgtttgtatgggaagcgcttcaagatacaactcttataattcttgctgtctgtgcgttcgtatcgctggttgttggcattgtggtggaagggtggccaaaaggtgctcatgatggtcttggaattgttgcaagtatcctcttggttgtgtttgtcactgcaacaagtgactaccggcagtcactgcagttcaaggacctggacaaggagaaaaagaaaatccatgtacaggttacaaggaatggttttaggcaaaggctatcgatatatgatcttcttcctggtgatgttgtccatttagcaattggggatcaggtccctgcagatgggctcttcatttatggattctctctgttgatcaatgagtccagcctaactggtgaaagtgaacctgttgctgtaaatgaagataaccctttccttttgtctgggaccaaagtacaagatggctcctgcaagatgctggtaacaactgttggcatgcgcacccaatggggaaaactgatggccactctcagtgaaggcggcgatgatgaaaccccactgcaagtcaaacttaatggagttgcaactattattggccagattggattattttttgctgttataactttcattgtcctgtcgcaagggctattcagcaagaaataccatgagcagatgcttttaagctggtcaggagatgatgcattggagctgctggagcattttgctattgcagttactattgttgttgttgctgttcccgagggattgccgttagcagtcacgctgagtcttgcatttgccatgaagaaaatgatgaatgacaaggcacttgttcgccacttagctgcatgtgagactatgggttcggctactaccatctgcagtgacaagacaggaacactgacaactaatcatatggccgttgttaaggcctgcatctgtggaaacatcaaggaagttaatggttctcagaatgcatccaagttacgctctgagcttccagagattgttattaaaactcttttggagtctatatttaacaatacaggtggtgaggttgtaattaaccaggatggtaaatatcagatcctgggtacccccacggagacagctttactagagtttgcattgtcactaggcggagattttaaggcaaaacgtgatgaaactaagattgtgaaagtggagcctttcaattcaacaaaaaagaggatgagtgtcattcttgagcttccaggaggaggatgccgtgcacactgtaaaggtgcttcagagatagtcttggctgcctgtgataaattcgtagatgagacaggtggtgttcatcctctggataaaataactgctgacaagctcaatggtattattgatagttttgctggtgaagctcttagaacattatgccttgcttataaggatatggaagaaggtttttccaacgcagaccatataccgctacaagggtacacatgcattggaattataggtataaaagatcctgtccgcccaggggtgaaggagtctgttgctacttgccgggctgctggaattatggtgagaatggtcacaggagataacataaatacagcgaaggcaattgctcgtgaatgtggtatacttactgaagatggcatagctattgaaggaccagagttcagagagaaaagcctagctgaactccttgaactggttccaaaaatacaggtggcaaaagagagcgctgatgttataattctggacgacaacttctccacgattgtaactgttgccaagtggggacgatctgtttacatcaatattcaaaagtttgtgcagtttcagctgactgtcaatgtagtggcactgctagtgaacttctcttcagcctgctttacaggtgtctcctagcctcacaattctattaacctcagtgttttaagatgtctctctgtctaatcacgtgcttgtaatgccaggaaatgcaccactaacagctgttcagcttctttgggttaacatgatcatggacacccttggcgcgcttgccttagccacggagccacctaatgatgacttgatgaagagagagccagtaggaaggacagggaaattcattacaaatgtgatgtggaggaacattcttggtcagtctttctaccagttctttgtgatgtggtatctccaaacgcaagggaaaaatttctttgggcttgaaggctctggtactgatattgttctgaatacgataattttcaactcattcgtcttctgtcaggtgttcaatgaaataagctctcgggagatggagaagatcaacgtgctcaagggcatgacaaggaactacgtgttcatggctgtcctcagcagcacggtgatcttccagttcatcatggtgcagtttctaggagagttcgccaacacgacgcccctgaccatacaccagtggctagccagcgtgctcctcggtctggccgggatgcccatcgctgccgccgtcaagctgatcccagtcggctcgtcatgataccattgaagattgctgctgcctgggatgggaagcacggcatgaaaagcgtcaggctgtccaagctgcatggtattcggtggagctgagctctctctctgtctctctgtgtgcgtaaacttttggaatgcacggagggcaggctagggaaatggagcagccgctgcagtttgagaagttttgtagcctggaaatgtggctagattgcctcggacctgtaagaaacatcgtgtttgttggcgccgggaaaaaagcagctagctgtggtggtggtgcagcagagttgttagattgacttcgaaatggaatttagactgcaggatatttatggtggatgaatggacggaaaacatggttcgttggttatttttactcttgcttattagagctctggtttggtctttttaccttagtagttgaaaaagagtaaaatttagcatcgggtcgtcgaagccaaagttgtcttgaaggcgtcatttatgtctacaaaaaaaacgtaaaatgtatttttgggctcc

SEQ ID NO: 220791 - DNA, 2225 bp, Zea Mays
gtgccgttggcgtggacgccgccgcctcctcgcgctctctgtggcggacatcaaatcctctcggagaacagccaaacgagccaccaaaatgtggcgctccgggcaggggaggtgctgtccaagttggcgtcgttcggggtgaaggtcctactggacgagcggagaggggagtcgtcatcggagaggaggcgcgccagggcggtggagttgcgcaccatcttcactaggctcggcccaaccttcgtcaaaattggacagggcctgtccacgcgccccgacctctgcccggccgagtacctcgaggagctcgccgagctgcaggattcacttcccacatttccggatgaagaggcatttgcatgtattgagagagagcttggcttcacgcttgattcaatctactcgacaatttcaccttcccccattgcagcggctagtttaggtcaagtttataaagcacggttgaaatactctgggaagctggtagctgtgaaggtgcagagacccagtattgagaaagccattgggcttgatttttatctacttagaggacttggctttcttataaataagtatgttgacattgtaaccagcgatgttgttgccctcatcgatgaatttgctcgaagagtttttcaagagcttaattatgttcaggaaggccaaaatgcaagaaggtttaagaaattatatgccgataagcaagatgtattagtgcctgatatattttgggattacacaagtgcaaaggttctaacaatggagtggattgagggtgtaaaattaaaccaacaagcagttattgaaagtcaaggattgaaggttctggatttggtcaacattggtatccagtgtagcttgagacagcttctggagtatggttactttcatgcagaccctcatcctggtaatatattagcaacacctgaggggaaactggcttttcttgattttggcatgatgagtgaaacaccagaggatgcgagggtagccattataggacatgttgtccacttagtcaacagggactacgaagcaatggctcgtgattattatgcactagatttcttggaacccgatgtagatgtttccccgattgtgcctgctctcaagaattttttcgatgatgcactaaatgcaacagtgagtgagttgaacttcaagacaatagttgatggcctaggtgctgttctctatcagtacccattcaatgtaccagcatactatgcattgatactgcgatcgctcaccgtactggaaggtttagcactctatgctgaccctgattttaaggtgcttgctgcatcatacccttactttgcgaaaaggctactgactgatcccaacccatatctcagagatgctttaattgagcttgtattcaaggatggaaaattcagatggaataggcttgaaaatcttcttgttcaagggcgccaagatagggagtttgcagccaaagatgcactgcagcctgttctaaagcttctccttggtcctggtggggaggaattgcgtgcgttagttgtgaaagaggcagttcgtgtgacagaagccatcgccattggaacactggtcgattcatacaatgcagctccatcatttttgaagccattaatttccagcggcaatctagctgaaccctttaagtttagtgagactgaacaagaacagatgatggagctccgagaccaggttttcagagtatggggtcttttgagatcctcaaataactttgatccgagccttttgcagccaatcgttcaggttctacaagaaccagaggcccgtgtcttgggttctcgtgtcgcaggtggtgtaacacagcgccttgcggcacgtctgctgcaacagcttctcaggacccctcctgctcctggatcttcttagcagatatatagatataggctcgtatgattgtatgaagcatgtaaattgacacgatatttttcacaggaaatgagaaggaagcacaacccagaattcgagtatatagctagtttcttggttctaagtggataaagacattgtgcatcgagctttgtccagcagaccgtgtatatagttgtgtaaaaaacattgttttgtgctgtagattacactgtttacggagtgaagattgaaatgataagacatggacgagtgagctgctaagatgtcacgcagcttagatccaccgctgttcaccctgtaaatcatgatacgcggaccaattatgcatttac

SEQ ID NO: 220792 - DNA, 1481 bp, Zea Mays
gcgttgtaggggcattccagctgatgccatcctatttgtgacaataaggcccttttccaagagcttgtatcgccggatcaacaggttcttggccgagctgctgtggctccagcttgtctgggtggtggactggtgggcaggcgttaaggtacaactacatgcggatgaggaaacttaccgatcaatgggtaaagagcatgcactcgtcatatcaaatcatcgaagtgatattgattggcttattggatggatattggcccagcgctcagggtgccttggaagtacgctcgctgtcatgaagaagtcatccaagttccttccagtcattggctggtcaatgtggtttgcagagtacctctttttggagaggagctgggccaaggatgaaaagacactaaagtggggtctccaaaggttgaaagacttccctagaccattttggctagctctttttgttgagggtactcgctttactccagcaaagcttctcgcagctcaggagtatgcggcttcccagggcttaccagctcctagaaatgtacttattccacgtaccaagggatttgtatctgccgtaagtattatgcgagattttgttccagccatttacgatacaactgtaatagttcctaaagattcccctcaaccaacaatgctgcggattttgaaagggcaatcatcagtgatacatgtccgcatgaaacgtcatgcaatgagtgagatgccaaaatcagatgatgacgtttcaaaatggtgtaaagacatttttgtggcaaaggatgccttactggacaaacatttggcaacaggcactttcgatgaggagattagacctatcggccgcccagtgaaatcattgctggtgaccctgttttggtcgtgcctcctgttgtttggtgccatcgagttcttcaagtggacgcagctcctatcgacatggagaggagtggcattcactgccgcagggatggcgctcgtgacagggctcatgcacgtcttcatcatgttctcccaggctgagcggtcgagctcagccaaggcggcacggaaccgggtcaagaaggaatgaaaacggagggtggaaatgtgattctgggctctatttatgggcagctttcaaaatgactcgattcatattaatgtatacagcaccaaattccagacagaaacaggatgctctgctcctcttgtatttgtgtgcaggaaagaattttagggagttcatttttgcccccctcttttgggcagaggaactgtaggacatgaacttgatgttggtacatttgccctgtagacattctggaagcctttcagtagttcatttatcagtaaagcttgcatctttcatccatgtagttgtgcaccttgtctgtcactcatcacaatgttgttgtgttctaactgttctgtgatgaaaagcaagggatacagtatgttcaataaagcaatagaaatgttttgtgatgaaaagcagaggatat

SEQ ID NO: 220793 - DNA, 1390 bp, Zea Mays
ccttgctctaaattctaaaataacgcaaacggtaccagcaagcagcaagcctctctccattttcttcgccggcggcaggtgcacacatcggggaatggcgacctacgaccatgccgccaccccgacaccgcagtctccgggcgtcggcggcgtacccttctcgtcctgcatcggcgacctcctccgcttcgtcctctcctcccacgccgccgcctaccccggtgacgacacggtcgctttccccctctcgccctcctactgcgcccgcctcctcaacgacggcgaactgttcgagaagctggaggcctgtattcagcagtgcctcgaggaggggcggctcccggggccgcccgcggtggttgggattccggctgaggaggaggggccggaggagagagggtggaagctgctgctgccggagaaaggcgctgagttgaagcggatgtacgatgctgttgagtttgagctgcatgttcaggaaccctacttcactcaactcagagccggagtcaagaaggttgaagggagattagcgactggtaactacaaccggattacacaaggttctttgctgctattcaataaatgcctcttgcttaacgttgaggcagttaggaagtacaattcattctctgagatgctgaaaggagagaaaatctcaaatgttcttcctggtatttcatcaattgtagaaggtgtgaaagtatataggaaattctatgcagaggaaaaggagaactcttatggagttttagcgatatcagtttcaaagccaacatctcaaccttacataaccatgaataatatccttgctggattggggtatgatggactgggtagactccttggtatggcgaaaacaactggaactgttccagatggactacctcctccaagatctgcactgctgtcatcttgtatgggactggttcaaccaaatttcattggattcttggagccctacaccccagaaggctatgctaagggatggaaacactagcaccagctgcctagtagatcttgatctgtattagcgactctatcagggttcatctgcatatcttctgaaggcctacatgttctgttgaatcgaaagagacgatcatgtgttacgtcagctgcctgcctaagatcatgtgttgcatgaccactgttttatttctgaatatgttctttttttttgcaaggcgtatatcgacaccaagtactgatatatgcgtctgaatatgttctacttttattcaaacacacccgccaagatcagttcatagttttgcacaaagacatgcaaatgcaattggacacaacccaaatagaaaggtattttttgtttcaatccaaactattcctctactgcgactaagtactgatgtcatttctggcatctgac

SEQ ID NO: 220794 - DNA, 1181 bp, Zea Mays
cttgctctaaattctaaaataacgcaaacggtaccagcaagcagcaagcctctctccattttcttcgccggcggcaggtgcacacatcggggaatggcgacctacgaccatgccgccaccccgacaccgcagtctccgggcgtcggcggcgtacccttctcgtcctgcatcggcgacctcctccgcttcgtcctctcctcccacgccgccgcctaccccggtgacgacacggtcgctttccccctctcgccctcctactgcgcccgcctcctcaacgacggcgaactgttcgagaagctggaggcctgtattcagcagtgcctcgaggaggggcggctcccggggccgcccgcggtggttgggattccggctgaggaggaggggccggaggagagagggtggaagctgctgctgccggagaaaggcgctgagttgaagcggatgtacgatgctgttgagtttgagctgcatgttcaggaaccctacttcactcaactcagagccggagtcaagaaggttgaagggagattagcgactggtaactacaaccggattacacaaggttctttgctgctattcaataaatgcctcttgcttaacgttgaggcagttaggaagtacaattcattctctgagatgctgaaaggagagaaaatctcaaatgttcttcctggtatttcatcaattgtagaaggtgtgaaagtatataggaaattctatgcagaggaaaaggagaactcttatggagttttagcgatatcagtttcaaagccaacatctcaaccttacataaccatgaataatatccttgctggattggggtatgatggactgggtagactccttggtatggcgaaaacaactggaactgttccagatggactacctcctccaagatctgcactgctgtcatcttgtatgggactggttcaaccaaatgagtaggaaaggatggtggggcagctttaatgggagtgattcaagcaagaaccaagctgcatctgaaaccattgagtctttgctgcgtgtgtgttgttggatgaatgttcatctgactcaaccctatggtcctgtttttgaaatccgcgtgcatgaaggttatggtgccagatggtctcaagatggttcaaagattagcagttgggggttgttcacttgatatctggtgctgaaagattcca

SEQ ID NO: 220795 - DNA, 2005 bp, Zea Mays
caattcagaagggatatgcttattagaaattcgttataaggcatttgatgaggtcgaaggcattgaggtcgcctggaatcaaatcaacatagatgaggtgatgcagtgtccagataatcttgataggctctacacagaagttcatcttctgaagtcactcaagcatgaaaatgttatgaagttttattattcatggattgatgaccagagtaagaaaattaatgtcatcacagagttgttcacgtctggaagcctcaggcattaccgtcagaaacatccacgtgttaacttgaaggcaataaagaattgggcaaggcagattcttcatggattggattacctgcatagccaccaacctccgattatccatagagacttgaagtgtgataatatttttgttaatggaaaccatggagaagttaagattggagatcttggactagctacagtaatgcaaacacctagggtaccccagaattcatggcacctgaactttatgatgaaaattatgatgagcgtgttgatatttactcatttggaatgtgtttgttggagatctttactcttgaatatccatacagtgaatgtacgaatccagctcagatttttaagaaagtatccacagtaagtgctccttcacttatttgtagaattgcaacactattttatctaaactaccacctaatatctgtagggtgttaaacctgctgcattggctagaatttctgatcttcaagtaaagcagtttattgagaaatgtttagttcctgcttctgagaggtcgtctgccaaagaacttctgcaagacacatttctttgtcctgacaatacacatgaacctgctgtcactaagtttatatctccagcacctaaaaaaacagtagatatctctctggcgtctttgcatatggatgttgacactttggaatctagccatactgattcaggcaaggaaaatggatctgttgctccacatacaccagttttggagttcacaagaaccaacaaaaatacagagctaaagctaaagggcgagaaacttgataacaactccgtgtcactggttttgcgaattgctgatttctctggtatgccttacttggatacatttctttgaagctcagtttttgcatattgttggtgccttaacagctaatgcctttctgattccaggtcatgcaagaaatatccatttcctcttttacttggactctgatacagctatgtctgtagctgctgaaatggttgaacaattggagttagcggactgcgacgttacgttcattgctgattttattgaccttttgatagtgaatcttattccaggttggagacctgtaaatgatgcagcagcgaactcgtataggcgatctgaaagtgaacttgcagtcaattcccatcagaacatctcaaagttggtacctgattatgcattaattgatggtgtgatgcgcccaaaagatgtgaatgcatcaactagttgccttgactctgtctcaagtgcaaccaacctaggaggatcacaaggttctgaaggttcagtcatttctgtacagcttgctgagagttccaaaagtgtgagtgactatggggccgaggattatggcactatggactgtggtgggtacaaagacggaatcagcacattagattgcagccatgttttagataatggatcgaggtcgattttccatatagatcaagcatcacctttcttggagttggccagctgtggttcatcaacttcaactgataaccaggatgtgatgaacggggagcttgtttttattgaagctcagtacaagcacttggttgatgagttgacaaggatgcgagaagaggctagggaaggagctcgaaaaaactggttgccagatacatgatgtttttgttcaaatttggcatttcctctaaacatcataaactatgttcgatttcatgtttgaagtgtgagaaatgttaataatctgttttagttaaagcattgatgtagtttgcaagtcac

SEQ ID NO: 220796 - DNA, 1775 bp, Zea Mays
atctactgcaattcagaagggatatgcttattagaaattcgttataaggcatttgatgaggtcgaaggcattgaggtcgcctggaatcaaatcaacatagatgaggtgatgcagtgtccagataatcttgataggctctacacagaagttcatcttctgaagtcactcaagcatgaaaatgttatgaagttttattattcatggattgatgaccagagtaagaaaattaatgtcatcacagagttgttcacgtctggaagcctcaggcattaccgtcagaaacatccacgtgttaacttgaaggcaataaagaattgggcaaggcagattcttcatggattggattacctgcatagccaccaacctccgattatccatagagacttgaagtgtgataatatttttgttaatggaaaccatggagaagttaagattggagatcttggactagctacagtaatgcaaacacctagggtaccccagaattcatggcacctgaactttatgatgaaaattatgatgagcgtgttgatatttactcatttggaatgtgtttgttggagatctttactcttgaatatccatacagtgaatgtacgaatccagctcagatttttaagaaagtatccacagtaagtgctccttcacttatttgtagaattgcaacactattttatctaaactaccacctaatatctgtagggtgttaaacctgctgcattggctagaatttctgatcttcaagtaaagcagtttattgagaaatgtttagttcctgcttctgagaggtcgtctgccaaagaacttctgcaagacacatttctttgtcctgacaatacacatgaacctgctgtcactaagtttatatctccagcacctaaaaaaacagtagatatctctctggcgtctttgcatatggatgttgacactttggaatctagccatactgattcaggcaaggaaaatggatctgttgctccacatacaccagttttggagttcacaagaaccaacaaaaatacagagctaaagctaaagggcgagaaacttgataacaactccgtgtcactggttttgcgaattgctgatttctctggttggagacctgtaaatgatgcagcagcgaactcgtataggcgatctgaaagtgaacttgcagtcaattcccatcagaacatctcaaagttggtacctgattatgcattaattgatggtgtgatgcgcccaaaagatgtgaatgcatcaactagttgccttgactctgtctcaagtgcaaccaacctaggaggatcacaaggttctgaaggttcagtcatttctgtacagcttgctgagagttccaaaagtgtgagtgactatggggccgaggattatggcactatggactgtggtgggtacaaagacggaatcagcacattagattgcagccatgttttagataatggatcgaggtcgattttccatatagatcaagcatcacctttcttggagttggccagctgtggttcatcaacttcaactgataaccaggatgtgatgaacggggagcttgtttttattgaagctcagtacaagcacttggttgatgagttgacaaggatgcgagaagaggctagggaaggagctcgaaaaaactggttgccagatacatgatgtttttgttcaaatttggcatttcctctaaacatcataaactatgttcgatttcatgtttgaagtgtgagaaatgttaataatctgttttagttaaagcattgatgtagtttgcaagtcac

SEQ ID NO: 220797 - DNA, 2539 bp, Zea Mays
ccgaacgcccaactactagtatctcttctgtcttctccggttctccctatcccacctttccctccccaccacctacctaccgcttattcaccgtcgcctaccacctccccctcctccacgtgccgacttccgctccgcaccgccaatccgtcgtaaccctagcctagcccagcctggcctcacctgattccgatccgtccatgttcgccgcgaggaattttcctcccatgggttccgcatacgccgccgagaggacgccgatcgatggagaatgaggtgctgcgtctgccgcgtatcctccgccgggtgccgggccatgggcgtcgcgggacgggccaatccgacgtcgtcgctgcgcagccgacgctgcctccgcatgcggccgtcttacgccccgttctccgagcccttcactgaacccccggcacccgccgcaccatcataccctgctgccgcgcacagtgcgtaggagccgcgggcggaccaccgacatcttcggcgatctccattcctctttgcttcctctctctctctctctctctctctccccctccccccctctcgctcgtagagtcatttgcttgtcggggccgatccggaatggaggtgtttggttgtgggacccacaacgatgtggtcgatgctgaatacgcggaagtagatccaaccgggcgatacatgcgctataatttgattctggggagaggagctttcaagactgtttataaggcatttgatgaggtcgaaggcattgaggtcgcctggaatcaaatcaacatagatgaggtgatgcagtgtccagataatcttgataggctctacacagaagttcatcttctgaagtcactcaagcatgaaaatgttatgaagttttattattcatggattgatgaccagagtaagaaaattaatgtcatcacagagttgttcacgtctggaagcctcaggcattaccgtcagaaacatccacgtgttaacttgaaggcaataaagaattgggcaaggcagattcttcatggattggattacctgcatagccaccaacctccgattatccatagagacttgaagtgtgataatatttttgttaatggaaaccatggagaagttaagattggagatcttggactagctacagtaatgcaaacacctagggtaccccagaattcatggcacctgaactttatgatgaaaattatgatgagcgtgttgatatttactcatttggaatgtgtttgttggagatctttactcttgaatatccatacagtgaatgtacgaatccagctcagatttttaagaaagtatccacaggtgttaaacctgctgcattggctagaatttctgatcttcaagtaaagcagtttattgagaaatgtttagttcctgcttctgagaggtcgtctgccaaagaacttctgcaagacacatttctttgtcctgacaatacacatgaacctgctgtcactaagtttatatctccagcacctaaaaaaacagtagatatctctctggcgtctttgcatatggatgttgacactttggaatctagccatactgattcaggcaaggaaaatggatctgttgctccacatacaccagttttggagttcacaagaaccaacaaaaatacagagctaaagctaaagggcgagaaacttgataacaactccgtgtcactggttttgcgaattgctgatttctctggtcatgcaagaaatatccatttcctcttttacttggactctgatacagctatgtctgtagctgctgaaatggttgaacaattggagttagcggactgcgacgttacgttcattgctgattttattgaccttttgatagtgaatcttattccaggttggagacctgtaaatgatgcagcagcgaactcgtataggcgatctgaaagtgaacttgcagtcaattcccatcagaacatctcaaagttggtacctgattatgcattaattgatggtgtgatgcgcccaaaagatgtgaatgcatcaactagttgccttgactctgtctcaagtgcaaccaacctaggaggatcacaaggttctgaaggttcagtcatttctgtacagcttgctgagagttccaaaagtgtgagtgactatggggccgaggattatggcactatggactgtggtgggtacaaagacggaatcagcacattagattgcagccatgttttagataatggatcgaggtcgattttccatatagatcaagcatcacctttcttggagttggccagctgtggttcatcaacttcaactgataaccaggatgtgatgaacggggagcttgtttttattgaagctcagtacaagcacttggttgatgagttgacaaggatgcgagaagaggctagggaaggagctcgaaaaaactggttgccagatacatgatgtttttgttcaaatttggcatttcctctaaacatcataaactatgttcgatttcatgtttgaagtgtgagaaatgttaataatctgttttagttaaagcattgatgtagtttgcaagtcac

SEQ ID NO: 220798 - DNA, 2517 bp, Zea Mays
ccgaacgcccaactactagtatctcttctgtcttctccggttctccctatcccacctttccctccccaccacctacctaccgcttattcaccgtcgcctaccacctccccctcctccacgtgccgacttccgctccgcaccgccaatccgtcgtaaccctagcctagcccagcctggcctcacctgattccgatccgtccatgttcgccgcgaggaattttcctcccatgggttccgcatacgccgccgagaggacgccgatcgatggagaatgaggtgctgcgtctgccgcgtatcctccgccgggtgccgggccatgggcgtcgcgggacgggccaatccgacgtcgtcgctgcgcagccgacgctgcctccgcatgcggccgtcttacgccccgttctccgagcccttcactgaacccccggcacccgccgcaccatcataccctgctgccgcgcacagtgcgtaggagccgcgggcggaccaccgacatcttcggcgatctccattcctctttgcttcctctctctctctctctctctctctccccctccccccctctcgctcgtagagtcatttgcttgtcggggccgatccggaatggaggtgtttggttgtgggacccacaacgatgtggtcgatgctgaatacgcggaagtagatccaaccgggcgatacatgcgcttataaggcatttgatgaggtcgaaggcattgaggtcgcctggaatcaaatcaacatagatgaggtgatgcagtgtccagataatcttgataggctctacacagaagttcatcttctgaagtcactcaagcatgaaaatgttatgaagttttattattcatggattgatgaccagagtaagaaaattaatgtcatcacagagttgttcacgtctggaagcctcaggcattaccgtcagaaacatccacgtgttaacttgaaggcaataaagaattgggcaaggcagattcttcatggattggattacctgcatagccaccaacctccgattatccatagagacttgaagtgtgataatatttttgttaatggaaaccatggagaagttaagattggagatcttggactagctacagtaatgcaaacacctagggtgaggagtgttattggtaccccagaattcatggcacctgaactttatgatgaaaattatgatgagcgtgttgatatttactcatttggaatgtgtttgttggagatctttactcttgaatatccatacagtgaatgtacgaatccagctcagatttttaagaaagtatccacaggtgttaaacctgctgcattggctagaatttctgatcttcaagtaaagcagtttattgagaaatgtttagttcctgcttctgagaggtcgtctgccaaagaacttctgcaagacacatttctttgtcctgacaatacacatgaacctgctgtcactaagtttatatctccagcacctaaaaaaacagtagatatctctctggcgtctttgcatatggatgttgacactttggaatctagccatactgattcaggcaaggaaaatggatctgttgctccacatacaccagttttggagttcacaagaaccaacaaaaatacagagctaaagctaaagggcgagaaacttgataacaactccgtgtcactggttttgcgaattgctgatttctctggtcatgcaagaaatatccatttcctcttttacttggactctgatacagctatgtctgtagctgctgaaatggttgaacaattggagttagcggactgcgacgttacgttcattgctgattttattgaccttttgatagtgaatcttattccaggttggagacctgtaaatgatgcagcagcgaactcgtataggcgatctgaaagtgaacttgcagtcaattcccatcagaacatctcaaagttggtacctgattatgcattaattgatggtgtgatgcgcccaaaagatgtgaatgcatcaactagttgccttgactctgtctcaagtgcaaccaacctaggaggatcacaaggttctgaaggttcagtcatttctgtacagcttgctgagagttccaaaagtgtgagtgactatggggccgaggattatggcactatggactgtggtgggtacaaagacggaatcagcacattagattgcagccatgttttagataatggatcgaggtcgattttccatatagatcaagcatcacctttcttggagttggccagctgtggttcatcaacttcaactgataaccaggatgtgatgaacggggagcttgtttttattgaagctcagtacaagcacttggttgatgagttgacaaggatgcgagaagaggctagggaaggagctcgaaaaaactggttgccagatacatgatgtttttgttcaaatttggcatttcctctaaacatcataaactatgttcgatttcatgtttgaagtgtgagaaatgttaataatctgttttagttaaagcattgatgtagtttgcaagtcac

SEQ ID NO: 220799 - DNA, 2087 bp, Zea Mays
cgcgatctcgctcgtgatattccagccccgccgccgccgtccccgcccccatccgtgacaccccaccatcaccgccgcgccacgcgcgacaactccatcccccgtccgcacccctaccccgagcatcgcagcgcctcccgcacgaggtcgttgcgcttgtcgatctgatggcggcccatggcaaaggagcaggtagaaaatggccgatgccgaggatatccagcccctcgtctgcgacaacggaactggcatggtcaaggctgggttcgctggcgacgacgccccgagggccgtcttccccagcatcgtggggcgcccgcgccacattggtgtcatggtcgggatggggcagaaggacgcctacgtcggtgacgaggtgcagtccaagaggggtatcctgaccctcaagtacctcagcttacacatcacattattccccacattacagcaatcagtgcaacaatcagagcatttatttaggttctgcaaaccgatcatgacaaaaccaaaggtagctttgaagccgcagactctgtctccacaacctgaagcccaagcacctcatgatcctcaaacaccagagcaacaacaaagcgggactggtgtaggcgtgtagctggtgagccgggtagtgaaggaggtgtgtaccaggcctccagtgagcaaatgggcatggtgccggatgcatctgcggccggtggcaggaaggtcgagctggatggggacatgcgatggacatcacagaagacgaaatgaatcgcaaggggaaactaacatgcgagagaggaggagctagccacaaccaaagagcttggttcaatacttcaatggctagaataatgaacgatatgaagatcaggtagcattatatatgtcaataagaagcagaggagagaagcagcccacatcgcaggagacaaggacttcacttgtttggccagttcaggacttcaggatgttgtcgatgatgtccatgctatattccctcgcttcatgcttaacaatgagggagagactaagtgaggtggctgtttagcaggggctgaaggccgttggtgctgtcagaatgtttttttggagttttggtggatgatgctcagtgactgcaatgcaaaggatccttctgttttgtatattgaatgagattacatcactgtttttttcttagcgatatgttgagctcatgtgctcgtttatgttagtcgatctctggctcttgtagtaacttggaaagcttgctgctttttttaagggcatacatgcctgtgatgtgtggtcatgatcatttttttctcctgttattttagttgtcgtatcataaatgccatgtttgcattggtgttccaacatgtcaatattattgaataaatgtttgcattggcggcagcggggacgacgctaagtcgagcaatggcgaagcggcccgtggtggcagtaacggtggagagaagcagggggatgaatccaacggtggcgggatacttagcgctgtggcttccaggattggcgtggtcgtgtccagcgccaacggggaccgcagcggcagcgctgaggatggtgccaagacgagcgctggcgacgctggtcacggtagcaagggcgaggagaaggggcgtggtgtgaacggtggtagaatagtcgagcagatcatttccaatctgccctcagatgatcaggcgcctgatgccgatgaagcttccttgctcatcgccattatcgaagattagctccatgttccgaaggctctctaggtcgtcctcaacgccaggatcaaatcatcagctgagccggagactgaaaacaataaagaaaagcaagcagctggtcatagtaaacatcatgtagcgaggcttagcagattgcttttttttcccgttagaatcagtccacatgtcctcgacacgggctagatttgttctaggattatttttccagtagtaagccatgtatccatggacagtccacagcgcgacgtctaatgtaacatcatcaaggttcttttgactatcccataagaaaccattccttaagacaaccgatattgtgagttgataaccaacaactaatgttaccatgcgattgttccg

SEQ ID NO: 220800 - DNA, 2180 bp, Zea Mays
cgcgatctcgctcgtgatattccagccccgccgccgccgtccccgcccccatccgtgacaccccaccatcaccgccgcgccacgcgcgacaactccatcccccgtccgcacccctaccccgagcatcgcagcgcctcccgcacgaggtcgttgcgcttgtcgatctgatggcggcccatggcaaaggagcaggtagaaaatggccgatgccgaggatatccagcccctcgtctgcgacaacggaactggcatggtcaaggctgggttcgctggcgacgacgccccgagggccgtcttccccagcatcgtggggcgcccgcgccacattggtgtcatggtcgggatggggcagaaggacgcctacgtcggtgacgaggtgcagtccaagaggggtatcctgaccctcaagttctgcaaaccgatcatgacaaaaccaaaggtagctttgaagccgcagactctgtctccacaacctgaagcccaagcacctcatgatcctcaaacaccagagcaacaacaaagcgggactggtgtaggcgtgtagctggtgagccgggtagtgaaggaggtgtgtaccaggcctccagtgagcaaatgggcatggtgccggatgcatctgcggccggtggcaggaaggtcgagctggatggggacatgcgatggacatcacaggttggcccctccagtgatccatctcaaacactagccaggccataggaaaaacgttgaatcaaagcaaacttgatgcttaccgaaagcatgttcgatgagttactcagattcatggcccaggaattgaatctacacggtttaataactatttgcatggctctaaatgcttaattagaacagaagacgaaatgaatcgcaaggggaaactaacatgcgagagaggaggagctagccacaaccaaagagcttggttcaatacttcaatggctagaataatgaacgatatgaagatcaggtagcattatatatgtcaataagaagcagaggagagaagcagcccacatcgcaggagacaaggacttcacttgtttggccagttcaggacttcaggatgttgtcgatgatgtccatgctatattccctcgcttcatgcttaacaatgagggagagactaagtgaggggctgaaggccgttggtgctgtcagaatgtttttttggagttttggtggatgatgctcagtgactgcaatgcaaaggatccttctgttttgtatattgaatgagattacatcactgtttttttcttagcgatatgttgagctcatgtgctcgtttatgttagtcgatctctggctcttgtagtaacttggaaagcttgctgctttttttaagggcatacatgcctgtgatgtgtggtcatgatcatttttttctcctgttattttagttgtcgtatcataaatgccatgtttgcattggtgttccaacatgtcaatattattgaataaatgtttgcattggcggcagcggggacgacgctaagtcgagcaatggcgaagcggcccgtggtggcagtaacggtggagagaagcagggggatgaatccaacggtggcgggatacttagcgctgtggcttccaggattggcgtggtcgtgtccagcgccaacggggaccgcagcggcagcgctgaggatggtgccaagacgagcgctggcgacgctggtcacggtagcaagggcgaggagaaggggcgtggtgtgaacggtggtagaatagtcgagcagatcatttccaatctgccctcagatgatcaggcgcctgatgccgatgaagcttccttgctcatcgccattatcgaagattagctccatgttccgaaggctctctaggtcgtcctcaacgccaggatcaaatcatcagctgagccggagactgaaaacaataaagaaaagcaagcagctggtcatagtaaacatcatgtagcgaggcttagcagattgcttttttttcccgttagaatcagtccacatgtcctcgacacgggctagatttgttctaggattatttttccagtagtaagccatgtatccatggacagtccacagcgcgacgtctaatgtaacatcatcaaggttcttttgactatcccataagaaaccattccttaagacaaccgatattgtgagttgataaccaacaactaatgttaccatgcgattgttccg

SEQ ID NO: 220801 - DNA, 2148 bp, Zea Mays
cgcgatctcgctcgtgatattccagccccgccgccgccgtccccgcccccatccgtgacaccccaccatcaccgccgcgccacgcgcgacaactccatcccccgtccgcacccctaccccgagcatcgcagcgcctcccgcacgaggtcgttgcgcttgtcgatctgatggcggcccatggcaaaggagcaggtagaaaatggccgatgccgaggatatccagcccctcgtctgcgacaacggaactggcatggtcaaggctgggttcgctggcgacgacgccccgagggccgtcttccccagcatcgtggggcgcccgcgccacattggtgtcatggtcgggatggggcagaaggacgcctacgtcggtgacgaggttctgcaaaccgatcatgacaaaaccaaaggtagctttgaagccgcagactctgtctccacaacctgaagcccaagcacctcatgatcctcaaacaccagagcaacaacaaagcgggactggtgtaggcgtgtagctggtgagccgggtagtgaaggaggtgtgtaccaggcctccagtgagcaaatgggcatggtgccggatgcatctgcggccggtggcaggaaggtcgagctggatggggacatgcgatggacatcacaggttggcccctccagtgatccatctcaaacactagccaggccataggaaaaacgttgaatcaaagcaaacttgatgcttaccgaaagcatgttcgatgagttactcagattcatggcccaggaattgaatctacacggtttaataactatttgcatggctctaaatgcttaattagaacagaagacgaaatgaatcgcaaggggaaactaacatgcgagagaggaggagctagccacaaccaaagagcttggttcaatacttcaatggctagaataatgaacgatatgaagatcaggtagcattatatatgtcaataagaagcagaggagagaagcagcccacatcgcaggagacaaggacttcacttgtttggccagttcaggacttcaggatgttgtcgatgatgtccatgctatattccctcgcttcatgcttaacaatgagggagagactaagtgaggggctgaaggccgttggtgctgtcagaatgtttttttggagttttggtggatgatgctcagtgactgcaatgcaaaggatccttctgttttgtatattgaatgagattacatcactgtttttttcttagcgatatgttgagctcatgtgctcgtttatgttagtcgatctctggctcttgtagtaacttggaaagcttgctgctttttttaagggcatacatgcctgtgatgtgtggtcatgatcatttttttctcctgttattttagttgtcgtatcataaatgccatgtttgcattggtgttccaacatgtcaatattattgaataaatgtttgcattggcggcagcggggacgacgctaagtcgagcaatggcgaagcggcccgtggtggcagtaacggtggagagaagcagggggatgaatccaacggtggcgggatacttagcgctgtggcttccaggattggcgtggtcgtgtccagcgccaacggggaccgcagcggcagcgctgaggatggtgccaagacgagcgctggcgacgctggtcacggtagcaagggcgaggagaaggggcgtggtgtgaacggtggtagaatagtcgagcagatcatttccaatctgccctcagatgatcaggcgcctgatgccgatgaagcttccttgctcatcgccattatcgaagattagctccatgttccgaaggctctctaggtcgtcctcaacgccaggatcaaatcatcagctgagccggagactgaaaacaataaagaaaagcaagcagctggtcatagtaaacatcatgtagcgaggcttagcagattgcttttttttcccgttagaatcagtccacatgtcctcgacacgggctagatttgttctaggattatttttccagtagtaagccatgtatccatggacagtccacagcgcgacgtctaatgtaacatcatcaaggttcttttgactatcccataagaaaccattccttaagacaaccgatattgtgagttgataaccaacaactaatgttaccatgcgattgttccg

SEQ ID NO: 220802 - DNA, 2164 bp, Zea Mays
cgcgatctcgctcgtgatattccagccccgccgccgccgtccccgcccccatccgtgacaccccaccatcaccgccgcgccacgcgcgacaactccatcccccgtccgcacccctaccccgagcatcgcagcgcctcccgcacgaggtcgttgcgcttgtcgatctgatggcggcccatggcaaaggagcaggtagaaaatggccgatgccgaggatatccagcccctcgtctgcgacaacggaactggcatggtcaaggctgggttcgctggcgacgacgccccgagggccgtcttccccagcatcgtggggcgcccgcgccacattggtgtcatggtcgggatggggcagaaggacgcctacgtcggtgacgaggtgcagtccaagaggggttctgcaaaccgatcatgacaaaaccaaaggtagctttgaagccgcagactctgtctccacaacctgaagcccaagcacctcatgatcctcaaacaccagagcaacaacaaagcgggactggtgtaggcgtgtagctggtgagccgggtagtgaaggaggtgtgtaccaggcctccagtgagcaaatgggcatggtgccggatgcatctgcggccggtggcaggaaggtcgagctggatggggacatgcgatggacatcacaggttggcccctccagtgatccatctcaaacactagccaggccataggaaaaacgttgaatcaaagcaaacttgatgcttaccgaaagcatgttcgatgagttactcagattcatggcccaggaattgaatctacacggtttaataactatttgcatggctctaaatgcttaattagaacagaagacgaaatgaatcgcaaggggaaactaacatgcgagagaggaggagctagccacaaccaaagagcttggttcaatacttcaatggctagaataatgaacgatatgaagatcaggtagcattatatatgtcaataagaagcagaggagagaagcagcccacatcgcaggagacaaggacttcacttgtttggccagttcaggacttcaggatgttgtcgatgatgtccatgctatattccctcgcttcatgcttaacaatgagggagagactaagtgaggggctgaaggccgttggtgctgtcagaatgtttttttggagttttggtggatgatgctcagtgactgcaatgcaaaggatccttctgttttgtatattgaatgagattacatcactgtttttttcttagcgatatgttgagctcatgtgctcgtttatgttagtcgatctctggctcttgtagtaacttggaaagcttgctgctttttttaagggcatacatgcctgtgatgtgtggtcatgatcatttttttctcctgttattttagttgtcgtatcataaatgccatgtttgcattggtgttccaacatgtcaatattattgaataaatgtttgcattggcggcagcggggacgacgctaagtcgagcaatggcgaagcggcccgtggtggcagtaacggtggagagaagcagggggatgaatccaacggtggcgggatacttagcgctgtggcttccaggattggcgtggtcgtgtccagcgccaacggggaccgcagcggcagcgctgaggatggtgccaagacgagcgctggcgacgctggtcacggtagcaagggcgaggagaaggggcgtggtgtgaacggtggtagaatagtcgagcagatcatttccaatctgccctcagatgatcaggcgcctgatgccgatgaagcttccttgctcatcgccattatcgaagattagctccatgttccgaaggctctctaggtcgtcctcaacgccaggatcaaatcatcagctgagccggagactgaaaacaataaagaaaagcaagcagctggtcatagtaaacatcatgtagcgaggcttagcagattgcttttttttcccgttagaatcagtccacatgtcctcgacacgggctagatttgttctaggattatttttccagtagtaagccatgtatccatggacagtccacagcgcgacgtctaatgtaacatcatcaaggttcttttgactatcccataagaaaccattccttaagacaaccgatattgtgagttgataaccaacaactaatgttaccatgcgattgttccg

SEQ ID NO: 220803 - DNA, 2144 bp, Zea Mays
cgcgatctcgctcgtgatattccagccccgccgccgccgtccccgcccccatccgtgacaccccaccatcaccgccgcgccacgcgcgacaactccatcccccgtccgcacccctaccccgagcatcgcagcgcctcccgcacgaggtcgttgcgcttgtcgatctgatggcggcccatggcaaaggagcaggtagaaaatggccgatgccgaggatatccagcccctcgtctgcgacaacggaactggcatggtcaaggctgggttcgctggcgacgacgccccgagggccgtcttccccagcatcgtggggcgcccgcgccacattggtgtcatggtcgggatggggcagaaggacgcctacgtcggtgacgaggtgcagtccaagaggggtatcctgaccctcaagtacctcagcttacacatcacattattccccacattacagcaatcagtgcaacaatcagagcatttatttaggttctgcaaaccgatcatgacaaaaccaaaggtagctttgaagccgcagactctgtctccacaacctgaagcccaagcacctcatgatcctcaaacaccagagcaacaacaaagcgggactggtgtaggcgtgtagctggtgagccgggtagtgaaggaggtgtgtaccaggcctccagtgagcaaatgggcatggtgccggatgcatctgcggccggtggcaggaaggtcgagctggatggggacatgcgatggacatcacaggttggcccctccagtgatccatctcaaacactagccagggatgaatgaggctgctcatggtggacagaacagaagacgaaatgaatcgcaaggggaaactaacatgcgagagaggaggagctagccacaaccaaagagcttggttcaatacttcaatggctagaataatgaacgatatgaagatcaggtagcattatatatgtcaataagaagcagaggagagaagcagcccacatcgcaggagacaaggacttcacttgtttggccagttcaggacttcaggatgttgtcgatgatgtccatgctatattccctcgcttcatgcttaacaatgagggagagactaagtgaggggctgaaggccgttggtgctgtcagaatgtttttttggagttttggtggatgatgctcagtgactgcaatgcaaaggatccttctgttttgtatattgaatgagattacatcactgtttttttcttagcgatatgttgagctcatgtgctcgtttatgttagtcgatctctggctcttgtagtaacttggaaagcttgctgctttttttaagggcatacatgcctgtgatgtgtggtcatgatcatttttttctcctgttattttagttgtcgtatcataaatgccatgtttgcattggtgttccaacatgtcaatattattgaataaatgtttgcattggcggcagcggggacgacgctaagtcgagcaatggcgaagcggcccgtggtggcagtaacggtggagagaagcagggggatgaatccaacggtggcgggatacttagcgctgtggcttccaggattggcgtggtcgtgtccagcgccaacggggaccgcagcggcagcgctgaggatggtgccaagacgagcgctggcgacgctggtcacggtagcaagggcgaggagaaggggcgtggtgtgaacggtggtagaatagtcgagcagatcatttccaatctgccctcagatgatcaggcgcctgatgccgatgaagcttccttgctcatcgccattatcgaagattagctccatgttccgaaggctctctaggtcgtcctcaacgccaggatcaaatcatcagctgagccggagactgaaaacaataaagaaaagcaagcagctggtcatagtaaacatcatgtagcgaggcttagcagattgcttttttttcccgttagaatcagtccacatgtcctcgacacgggctagatttgttctaggattatttttccagtagtaagccatgtatccatggacagtccacagcgcgacgtctaatgtaacatcatcaaggttcttttgactatcccataagaaaccattccttaagacaaccgatattgtgagttgataaccaacaactaatgttaccatgcgattgttccg

SEQ ID NO: 220804 - DNA, 2150 bp, Zea Mays
tgcctcccgcgatctcgctcgtgatattccagccccgccgccgccgtccccgcccccatccgtgacaccccaccatcaccgccgcgccacgcgcgacaactccatcccccgtccgcacccctaccccgagcatcgcagcgcctcccgcacgaggtcgttgcgcttgtcgatctgatggcggcccatggcaaaggagcaggtagaaaatggccgatgccgaggatatccagcccctcgtctgcgacaacggaactggcatggtcaaggctgggttcgctggcgacgacgccccgagggccgtcttccccagcatcgtggggcgcccgcgccacattggtgtcatggtcgggatggggcagaaggacgcctacgtcggtgacgaggttctgcaaaccgatcatgacaaaaccaaaggtagctttgaagccgcagactctgtctccacaacctgaagcccaagcacctcatgatcctcaaacaccagagcaacaacaaagcgggactggtgtaggcgtgtagctggtgagccgggtagtgaaggaggtgtgtaccaggcctccagtgagcaaatgggcatggtgccggatgcatctgcggccggtggcaggaaggtcgagctggatggggacatgcgatggacatcacaggttggcccctccagtgatccatctcaaacactagccaggccataggaaaaacgttgaatcaaagcaaacttgatgcttaccgaaagcatgttcgatgagttactcagattcatggcccaggaattgaatctacacggtttaataactatttgcatggctctaaatgcttaattagaagacgaaatgaatcgcaaggggaaactaacatgcgagagaggaggagctagccacaaccaaagagcttggttcaatacttcaatggctagaataatgaacgatatgaagatcaggtagcattatatatgtcaataagaagcagaggagagaagcagcccacatcgcaggagacaaggacttcacttgtttggccagttcaggacttcaggatgttgtcgatgatgtccatgctatattccctcgcttcatgcttaacaatgagggagagactaagtgaggggctgaaggccgttggtgctgtcagaatgtttttttggagttttggtggatgatgctcagtgactgcaatgcaaaggatccttctgttttgtatattgaatgagattacatcactgtttttttcttagcgatatgttgagctcatgtgctcgtttatgttagtcgatctctggctcttgtagtaacttggaaagcttgctgctttttttaagggcatacatgcctgtgatgtgtggtcatgatcatttttttctcctgttattttagttgtcgtatcataaatgccatgtttgcattggtgttccaacatgtcaatattattgaataaatgtttgcattggcggcagcggggacgacgctaagtcgagcaatggcgaagcggcccgtggtggcagtaacggtggagagaagcagggggatgaatccaacggtggcgggatacttagcgctgtggcttccaggattggcgtggtcgtgtccagcgccaacggggaccgcagcggcagcgctgaggatggtgccaagacgagcgctggcgacgctggtcacggtagcaagggcgaggagaaggggcgtggtgtgaacggtggtagaatagtcgagcagatcatttccaatctgccctcagatgatcaggcgcctgatgccgatgaagcttccttgctcatcgccattatcgaagattagctccatgttccgaaggctctctaggtcgtcctcaacgccaggatcaaatcatcagctgagccggagactgaaaacaataaagaaaagcaagcagctggtcatagtaaacatcatgtagcgaggcttagcagattgcttttttttcccgttagaatcagtccacatgtcctcgacacgggctagatttgttctaggattatttttccagtagtaagccatgtatccatggacagtccacagcgcgacgtctaatgtaacatcatcaaggttcttttgactatcccataagaaaccattccttaagacaaccgatattgtgagttgataaccaacaactaatgttaccatgcgattgttccg

SEQ ID NO: 220805 - DNA, 2226 bp, Zea Mays
ctgcctcccgcgatctcgctcgtgatattccagccccgccgccgccgtccccgcccccatccgtgacaccccaccatcaccgccgcgccacgcgcgacaactccatcccccgtccgcacccctaccccgagcatcgcagcgcctcccgcacgaggtcgttgcgcttgtcgatctgatggcggcccatggcaaaggagcaggcggtgatggcagccacagcagaaagccgacgctcggcgtgattcccacccgtcgcgagccaagaggttcgaggtcatttttgagccaagaggttcgcggccacgggagcaaccctacagaaccatcaccaccaccgctctctcttcctctgctcttctctgcctgcctgagctcaccgcacctcgcctcctcaccgcggatcctccgttaatccggtagaaaatggccgatgccgaggatatccagcccctcgtctgcgacaacggaactggcatggtcaaggctgggttcgctggcgacgacgccccgagggccgtcttccccagcatcgtggggcgcccgcgccacattggtgtcatggtcgggatggggcagaaggacgcctacgtcggtgacgaggttctgcaaaccgatcatgacaaaaccaaaggtagctttgaagccgcagactctgtctccacaacctgaagcccaagcacctcatgatcctcaaacaccagagcaacaacaaagcgggactggtgtaggcgtgtagctggtgagccgggtagtgaaggaggtgtgtaccaggcctccagtgagcaaatgggcatggtgccggatgcatctgcggccggtggcaggaaggtcgagctggatggggacatgcgatggacatcacagggatgaatgaggctgctcatggtggacagaacagaagacgaaatgaatcgcaaggggaaactaacatgcgagagaggaggagctagccacaaccaaagagcttggttcaatacttcaatggctagaataatgaacgatatgaagatcaggtagcattatatatgtcaataagaagcagaggagagaagcagcccacatcgcaggagacaaggacttcacttgtttggccagttcaggacttcaggatgttgtcgatgatgtccatgctatattccctcgcttcatgcttaacaatgagggagagactaagtgaggggctgaaggccgttggtgctgtcagaatgtttttttggagttttggtggatgatgctcagtgactgcaatgcaaaggatccttctgttttgtatattgaatgagattacatcactgtttttttcttagcgatatgttgagctcatgtgctcgtttatgttagtcgatctctggctcttgtagtaacttggaaagcttgctgctttttttaagggcatacatgcctgtgatgtgtggtcatgatcatttttttctcctgttattttagttgtcgtatcataaatgccatgtttgcattggtgttccaacatgtcaatattattgaataaatgtttgcattggcggcagcggggacgacgctaagtcgagcaatggcgaagcggcccgtggtggcagtaacggtggagagaagcagggggatgaatccaacggtggcgggatacttagcgctgtggcttccaggattggcgtggtcgtgtccagcgccaacggggaccgcagcggcagcgctgaggatggtgccaagacgagcgctggcgacgctggtcacggtagcaagggcgaggagaaggggcgtggtgtgaacggtggtagaatagtcgagcagatcatttccaatctgccctcagatgatcaggcgcctgatgccgatgaagcttccttgctcatcgccattatcgaagattagctccatgttccgaaggctctctaggtcgtcctcaacgccaggatcaaatcatcagctgagccggagactgaaaacaataaagaaaagcaagcagctggtcatagtaaacatcatgtagcgaggcttagcagattgcttttttttcccgttagaatcagtccacatgtcctcgacacgggctagatttgttctaggattatttttccagtagtaagccatgtatccatggacagtccacagcgcgacgtctaatgtaacatcatcaaggttcttttgactatcccataagaaaccattccttaagacaaccgatattgtgagttgataaccaacaactaatgttaccatgcgattgttccg

SEQ ID NO: 220806 - DNA, 1264 bp, Zea Mays
cacatgtgcgcgtgttctgcctcccgcgatctcgctcgtgatattccagccccgccgccgccgtccccgcccccatccgtgacaccccaccatcaccgccgcgccacgcgcgacaactccatcccccgtccgcacccctaccccgagcatcgcagcgcctcccgcacgaggtcgttgcgcttgtcgatctgatggcggcccatggcaaaggagcaggggctgaaggccgttggtgctgtcagaatgtttttttggagttttggtggatgatgctcagtgactgcaatgcaaaggatccttctgttttgtatattgaatgagattacatcactgtttttttcttagcgatatgttgagctcatgtgctcgtttatgttagtcgatctctggctcttgtagtaacttggaaagcttgctgctttttttaagggcatacatgcctgtgatgtgtggtcatgatcatttttttctcctgttattttagttgtcgtatcataaatgccatgtttgcattggtgttccaacatgtcaatattattgaataaatgtttgcattggcggcagcggggacgacgctaagtcgagcaatggcgaagcggcccgtggtggcagtaacggtggagagaagcagggggatgaatccaacggtggcgggatacttagcgctgtggcttccaggattggcgtggtcgtgtccagcgccaacggggaccgcagcggcagcgctgaggatggtgccaagacgagcgctggcgacgctggtcacggtagcaagggcgaggagaaggggcgtggtgtgaacggtggtagaatagtcgagcagatcatttccaatctgccctcagatgatcaggcgcctgatgccgatgaagcttccttgctcatcgccattatcgaagattagctccatgttccgaaggctctctaggtcgtcctcaacgccaggatcaaatcatcagctgagccggagactgaaaacaataaagaaaagcaagcagctggtcatagtaaacatcatgtagcgaggcttagcagattgcttttttttcccgttagaatcagtccacatgtcctcgacacgggctagatttgttctaggattatttttccagtagtaagccatgtatccatggacagtccacagcgcgacgtctaatgtaacatcatcaaggttcttttgactatcccataagaaaccattccttaagacaaccgatattgtgagttgataaccaacaactaatgttaccatgcgattgttccg

SEQ ID NO: 220807 - DNA, 1835 bp, Zea Mays
atgtccaacgtgaccgtgtgcgtgcggttccgaccgctgagccacaaggagaggaaggccaacggcgacaacgtctgcttcaagaggctggactcggagtcttttgttctcaaggatgagagggaagaggatgtcgtattcagtttcgacaaggtgttctatgaagatgcccaacagtctgacgtctacaacttccttgcagtccccattgtttcagatgccatcaatggaataaatgggactataattacttacggtcagaccggggcaggaaagacgtacagcatggagggcccaagcatattgcattgcaatgaacagaaaactggactagtacagcgagttgtggatgagctttttatatgtttaggatcatcagcaagcacgtggactgtgaagttgtcaatggtggagatatatttggaaaaggtgagggaccttcttgacttgtccaaagacaacctgcagatcaaggaaagtaaaacccaaggaatttacatttctggagcaacagagatatctatcctcaacagttcagatgccttggagaacctttctcaaggaattgccaacagagctgttggggaaacacgtatcctctgtttgtaaatctggagtcctgaatcagttattctaaatttgatatggtatgccatctttaatgtaaacagaaatgaacctggctagcagtagaagtcactgcttatacattttctcagtacaatatggatgcacttcagatgagagggtaacaacagggaagattatacttgttgacttggctggttctgagaaagttgagaaaactggtgctgaaggacgggttcttgatgaggcaaagacaatcaacaaatccctctcagctctaggaaatgtcatcaatgccttaacgactggtaaacagaatcatgtgcctttccgtgactcaaaacttacgcgcattcttcaagattcgttgggtggcaactcaagagcggcattgctgtgttgctgttctccgagcccatcgaatgcagcagagagtctgtccacgcttcgctttggaaccaggacaaagctcataaaggctcctccgaaattgattcctgagtcagtggataacaccaagaagcccgccgtcgagactcatgatcaagatgatctgcgggacaggatactgagcaagctaaggttgagcctgaaggaggaggatgtggatttgttagaagaactgttcgtgcaggaaggcatcatcttcgatgccagttccgtcgtggacatcgactcggtgttccgggacactgcaagcgaggagatctcgttgctgatgcaagccgtcgaggagctcaaagaaactgtggaagagctcacggacgagaacgaaaagctaagacgtagcctccaagtcgcacaggagatgaccactcaggcccagctcgccgccgccgccgccgtcgctggagctgcccggagccgtactctgcttgatttcgtgccggcagtcctcttccggccatttgggtttgtaccagagtgacgacagggtcaatgcccattgtcctgtgaggctgtgaagaaccatacacttgggatatagtagatcacgaccatggtggtacacagtatataatagttgcaatacagatactagactactgatatccttggaacttcagtctgtttgaaatacggcgagaatactgatagctatgtcatgtgtatcggatatttttcgtttttttgtgtgctggaagtgtctactccgtagttgtttttgaggattcgcctcttccccctttcaaagtactgatgaattgtcgtttttctttttaataacagaactttaagttgacttc

SEQ ID NO: 220808 - DNA, 3123 bp, Zea Mays
atgtccaacgtgaccgtgtgcgtgcggttccgaccgctgagccacaaggagaggaaggccaacggcgacaacgtctgcttcaagaggctggactcggagtcttttgttctcaaggatgagagggaagaggatgtcgtattcagtttcgacaaggtgttctatgaagatgcccaacagtctgacgtctacaacttccttgcagtccccattgtttcagatgccatcaatggaataaatgggactataattacttacggtcagaccggggcaggaaagacgtacagcatggaggtggagatatatttggaaaaggtgagggaccttcttgacttgtccaaagacaacctgcagatcaaggaaagtaaaacccaaggaatttacatttctggagcaacagagatatctatcctcaacagttcagatgccttggagaacctttctcaaggaattgccaacagagctgttggggaaacacaaatgaacctggctagcagtagaagtcactgcttatacattttctcagtacaatatggatgcacttcagatgagagggtaacaacagggaagattatacttgttgacttggctggttctgagaaagttgagaaaactggtgctgaaggacgggttcttgatgaggcaaagacaatcaacaaatccctctcagctctaggaaatgtcatcaatgccttaacgactggtaaacagaatcatgtgcctttccgtgactcaaaacttacgcgcattcttcaagattcgttgggtggcaactcaagagcggcattgctgtgttgctgttctccgagcccatcgaatgcagcagagagtctgtccacgcttcgctttggaaccaggacaaagctcataaaggctcctccgaaattgattcctgagtcagtggataacaccaagaagcccgccgtcgagactcatgatcaagatgatctgcgggacaggatactgagcaagctaaggttgagcctgaaggaggaggatgtggatttgttagaagaactgttcgtgcaggaaggcatcatcttcgatgccagttccgtcgtggacatcgactcggtgttccgggacactgcaagcgaggagatctcgttgctgatgcaagccgtcgaggagctcaaagaaactgtggaagagctcacggacgagaacgaaaagctaagacgtagcctccaagtcgcacaggagatgaccactcaggcccagctcgccgccgccgccgccgtcgctggagctgcccggagccgtactctgcttgatttcgtgccggcagtcctcttccggccatttggaaaactaaaaatattcgtcggttcatctactgggcaggatgcacacgtggctccgcatccaaccgttcctgggtcgcacagcccatcccgccgcgccgtctccctctcgccccaaacccctctcctcctctctttctctatccacctttccaccgtcaccatggccaccgccactacgtccgcctatcattgcaacgccgtcctccaccttcccagacctccgcagttccgccggctcctgccccctctcccctccctcgtcacccgcagagccgcgagcgtcgggctgggggtcgcccgtctcggttcgagggcgagggcaagggcaagttccgtaccgccaccgccaccattttttgaaaccgtggaggaggaggaggaggaggaggaggagcgtgggtggtcggatgcggaggcgggattcagtgacgaggcagaggatgagcaggagtggtcgggcggcaacggcgcggcgcgcggggaggacctgggcgcggacgccggcgaggaccttagcgggtgggcgcggcagtggccgcgcccgcgggagctgttcgtgtgcaacctcccgcgccgctgcgacgtccaggacctgctcgagctcttcacgccccacggcaccgtcctctccgtcgagatctcacgcgatgccgagtccggaattagccgaggaacggcttctgtgacgatgcgatctctagcagaagctcgggcagccatcgacgctctggatggattcgacatggatgggcgtgaggttttcgtgaagctagcgtccgacgtcatttccaacaggaaaaacgtgaacctggcccacataacgcccacgaaggaccacatcttcgagaccccgcacaaggtctacgtcggcaacctcgcgtggtctgttcagccgcaagacctgagagagctctttacccagtgcggaaccgttgttagcacgaggctgctgacggaccgcaaagggggcaggaaccgagtctatgggttcctctcgttttcttccgcccaagagcttgaggaagcgttaaagctcgacagaacggtcttcttcggacgggatatcgtagtgaaggaagcccatgtagagcgccagacgcgctgagccgctgagtgttacccttgagaactgcactttttttgtctgcctcgttgactgactaagctcatgctccaggcacaagctacacagctgacgaagaagcaattgagcggttcatcgcgaaagagttaaaaaaaaaaacggtagtgtaaattagtaccattgctgcaactttgtcagcgccgccgtggatgctggtgtgagaaattctaggacgaactgagaactggtattgtagtggtaatacatgttgttttagcttcttataataccctccatacagtaatagtgctccttcaccacacgtttctaatgtctcgaatttttgtttgtgaaagggattctaattgagttggtcagattgtagaagacccggctctggttgtggtttgctgcacttctaaggctatctctagcaatctattcatctccatctctcatttcaaactttactattttaaacttgcaatatatagtgtaaaacaatgttttgcatgattatatgtacaatttagttatagtctaataccctaatatcttcaagtacacaaaggtcctgtgagttgttagatggcttgagtagaagtccggtattggtggtagtcgttctctgtagtttcctgtacatagacgtggcagtggtcgttctcacatgctacggtttcctgtgtgaagcagatgctgttagctgtttgccatttctccatccttttcaag

SEQ ID NO: 220809 - DNA, 3235 bp, Zea Mays
atgtccaacgtgaccgtgtgcgtgcggttccgaccgctgagccacaaggagaggaaggccaacggcgacaacgtctgcttcaagaggctggactcggagtcttttgttctcaaggatgagagggaagaggatgtcgtattcagtttcgacaaggtgttctatgaagatgcccaacagtctgacgtctacaacttccttgcagtccccattgtttcagatgccatcaatggaataaatgggactataattacttacggtcagaccggggcaggaaagacgtacagcatggagggcccaagcatattgcattgcaatgaacagaaaactggactagtacagcgagttgtggatgagctttttatatgtttaggatcatcagcaagcacgtggactgtgaagttgtcaatggtggagatatatttggaaaagggaccttcttgacttgtccaaagacaacctgcagatcaaggaaagtaaaacccaaggaatttacatttctggagcaacagagatatctatcctcaacagttcagatgccttggagaacctttctcaaggaattgccaacagagctgttggggaaacacaaatgaacctggctagcagtagaagtcactgcttatacattttctcagtacaatatggatgcacttcagatgagagggtaacaacagggaagattatacttgttgacttggctggttctgagaaagttgagaaaactggtgctgaaggacgggttcttgatgaggcaaagacaatcaacaaatccctctcagctctaggaaatgtcatcaatgccttaacgactggtaaacagaatcatgtgcctttccgtgactcaaaacttacgcgcattcttcaagattcgttgggtggcaactcaagagcggcattgctgtgttgctgttctccgagcccatcgaatgcagcagagagtctgtccacgcttcgctttggaaccaggacaaagctcataaaggctcctccgaaattgattcctgagtcagtggataacaccaagaagcccgccgtcgagactcatgatcaagatgatctgcgggacaggatactgagcaagctaaggttgagcctgaaggaggaggatgtggatttgttagaagaactgttcgtgcaggaaggcatcatcttcgatgccagttccgtcgtggacatcgactcggtgttccgggacactgcaagcgaggagatctcgttgctgatgcaagccgtcgaggagctcaaagaaactgtggaagagctcacggacgagaacgaaaagctaagacgtagcctccaagtcgcacaggagatgaccactcaggcccagctcgccgccgccgccgccgtcgctggagctgcccggagccgtactctgcttgatttcgtgccggcagtcctcttccggccatttggaaaactaaaaatattcgtcggttcatctactgggcaggatgcacacgtggctccgcatccaaccgttcctgggtcgcacagcccatcccgccgcgccgtctccctctcgccccaaacccctctcctcctctctttctctatccacctttccaccgtcaccatggccaccgccactacgtccgcctatcattgcaacgccgtcctccaccttcccagacctccgcagttccgccggctcctgccccctctcccctccctcgtcacccgcagagccgcgagcgtcgggctgggggtcgcccgtctcggttcgagggcgagggcaagggcaagttccgtaccgccaccgccaccattttttgaaaccgtggaggaggaggaggaggaggaggaggagcgtgggtggtcggatgcggaggcgggattcagtgacgaggcagaggatgagcaggagtggtcgggcggcaacggcgcggcgcgcggggaggacctgggcgcggacgccggcgaggaccttagcgggtgggcgcggcagtggccgcgcccgcgggagctgttcgtgtgcaacctcccgcgccgctgcgacgtccaggacctgctcgagctcttcacgccccacggcaccgtcctctccgtcgagatctcacgcgatgccgagtccggaattagccgaggaacggcttctgtgacgatgcgatctctagcagaagctcgggcagccatcgacgctctggatggattcgacatggatgggcgtgaggttttcgtgaagctagcgtccgacgtcatttccaacaggaaaaacgtgaacctggcccacataacgcccacgaaggaccacatcttcgagaccccgcacaaggtctacgtcggcaacctcgcgtggtctgttcagccgcaagacctgagagagctctttacccagtgcggaaccgttgttagcacgaggctgctgacggaccgcaaagggggcaggaaccgagtctatgggttcctctcgttttcttccgcccaagagcttgaggaagcgttaaagctcgacagaacggtcttcttcggacgggatatcgtagtgaaggaagcccatgtagagcgccagacgcgctgagccgctgagtgttacccttgagaactgcactttttttgtctgcctcgttgactgactaagctcatgctccaggcacaagctacacagctgacgaagaagcaattgagcggttcatcgcgaaagagttaaaaaaaaaaacggtagtgtaaattagtaccattgctgcaactttgtcagcgccgccgtggatgctggtgtgagaaattctaggacgaactgagaactggtattgtagtggtaatacatgttgttttagcttcttataataccctccatacagtaatagtgctccttcaccacacgtttctaatgtctcgaatttttgtttgtgaaagggattctaattgagttggtcagattgtagaagacccggctctggttgtggtttgctgcacttctaaggctatctctagcaatctattcatctccatctctcatttcaaactttactattttaaacttgcaatatatagtgtaaaacaatgttttgcatgattatatgtacaatttagttatagtctaataccctaatatcttcaagtacacaaaggtcctgtgagttgttagatggcttgagtagaagtccggtattggtggtagtcgttctctgtagtttcctgtacatagacgtggcagtggtcgttctcacatgctacggtttcctgtgtgaagcagatgctgttagctgtttgccatttctccatccttttcaag

SEQ ID NO: 220810 - DNA, 3240 bp, Zea Mays
atgtccaacgtgaccgtgtgcgtgcggttccgaccgctgagccacaaggagaggaaggccaacggcgacaacgtctgcttcaagaggctggactcggagtcttttgttctcaaggatgagagggaagaggatgtcgtattcagtttcgacaaggtgttctatgaagatgcccaacagtctgacgtctacaacttccttgcagtccccattgtttcagatgccatcaatggaataaatgggactataattacttacggtcagaccggggcaggaaagacgtacagcatggagggcccaagcatattgcattgcaatgaacagaaaactggactagtacagcgagttgtggatgagctttttatatgtttaggatcatcagcaagcacgtggactgtgaagttgtcaatggtggagatatatttggaaaaggtgagggaccttcttgacttgtccaaagacaacctgcagatcaaggaaagtaaaacccaaggaatttacatttctggagcaacagagatatctatcctcaacagttcagatgccttggagaacctttctcaaggaattgccaacagagctgttggggaaacacaaatgaacctggctagcagtagaagtcactgcttatacattttctcagtacaatatggatgcacttcagatgagagggtaacaacagggaagattatacttgttgacttggctggttctgagaaagttgagaaaactggtgctgaaggacgggttcttgatgaggcaaagacaatcaacaaatccctctcagctctaggaaatgtcatcaatgccttaacgactggtaaacagaatcatgtgcctttccgtgactcaaaacttacgcgcattcttcaagattcgttgggtggcaactcaagagcggcattgctgtgttgctgttctccgagcccatcgaatgcagcagagagtctgtccacgcttcgctttggaaccaggacaaagctcataaaggctcctccgaaattgattcctgagtcagtggataacaccaagaagcccgccgtcgagactcatgatcaagatgatctgcgggacaggatactgagcaagctaaggttgagcctgaaggaggaggatgtggatttgttagaagaactgttcgtgcaggaaggcatcatcttcgatgccagttccgtcgtggacatcgactcggtgttccgggacactgcaagcgaggagatctcgttgctgatgcaagccgtcgaggagctcaaagaaactgtggaagagctcacggacgagaacgaaaagctaagacgtagcctccaagtcgcacaggagatgaccactcaggcccagctcgccgccgccgccgccgtcgctggagctgcccggagccgtactctgcttgatttcgtgccggcagtcctcttccggccatttggaaaactaaaaatattcgtcggttcatctactgggcaggatgcacacgtggctccgcatccaaccgttcctgggtcgcacagcccatcccgccgcgccgtctccctctcgccccaaacccctctcctcctctctttctctatccacctttccaccgtcaccatggccaccgccactacgtccgcctatcattgcaacgccgtcctccaccttcccagacctccgcagttccgccggctcctgccccctctcccctccctcgtcacccgcagagccgcgagcgtcgggctgggggtcgcccgtctcggttcgagggcgagggcaagggcaagttccgtaccgccaccgccaccattttttgaaaccgtggaggaggaggaggaggaggaggaggagcgtgggtggtcggatgcggaggcgggattcagtgacgaggcagaggatgagcaggagtggtcgggcggcaacggcgcggcgcgcggggaggacctgggcgcggacgccggcgaggaccttagcgggtgggcgcggcagtggccgcgcccgcgggagctgttcgtgtgcaacctcccgcgccgctgcgacgtccaggacctgctcgagctcttcacgccccacggcaccgtcctctccgtcgagatctcacgcgatgccgagtccggaattagccgaggaacggcttctgtgacgatgcgatctctagcagaagctcgggcagccatcgacgctctggatggattcgacatggatgggcgtgaggttttcgtgaagctagcgtccgacgtcatttccaacaggaaaaacgtgaacctggcccacataacgcccacgaaggaccacatcttcgagaccccgcacaaggtctacgtcggcaacctcgcgtggtctgttcagccgcaagacctgagagagctctttacccagtgcggaaccgttgttagcacgaggctgctgacggaccgcaaagggggcaggaaccgagtctatgggttcctctcgttttcttccgcccaagagcttgaggaagcgttaaagctcgacagaacggtcttcttcggacgggatatcgtagtgaaggaagcccatgtagagcgccagacgcgctgagccgctgagtgttacccttgagaactgcactttttttgtctgcctcgttgactgactaagctcatgctccaggcacaagctacacagctgacgaagaagcaattgagcggttcatcgcgaaagagttaaaaaaaaaaacggtagtgtaaattagtaccattgctgcaactttgtcagcgccgccgtggatgctggtgtgagaaattctaggacgaactgagaactggtattgtagtggtaatacatgttgttttagcttcttataataccctccatacagtaatagtgctccttcaccacacgtttctaatgtctcgaatttttgtttgtgaaagggattctaattgagttggtcagattgtagaagacccggctctggttgtggtttgctgcacttctaaggctatctctagcaatctattcatctccatctctcatttcaaactttactattttaaacttgcaatatatagtgtaaaacaatgttttgcatgattatatgtacaatttagttatagtctaataccctaatatcttcaagtacacaaaggtcctgtgagttgttagatggcttgagtagaagtccggtattggtggtagtcgttctctgtagtttcctgtacatagacgtggcagtggtcgttctcacatgctacggtttcctgtgtgaagcagatgctgttagctgtttgccatttctccatccttttcaag

SEQ ID NO: 220811 - DNA, 1784 bp, Zea Mays
ctgtatggtgcacggttctaccactgtctcctctccgtgacgcacgcccgagatcctctccgcgacacacgcctccctctcctctgccccaccctcctccccacgccatcggcgccgccatcatcggatccggcccaagatgcctccgccccacgcgcccgagtcgtcgaggcacactccttcccgcctccgtcgtccacgcatatctccgcctcacctcggcgcccgagtcgtcgcacgcgttcgcggtggtgtccatcccggcaccggcctcacgcaccgtctacagctcccaactctgctcctctcagttctccctccgcatttcgccttctctcccttcctctccaagcagcgtcctcctcgcctagatccgtacaagcggcaaataacctctccggcggcgagacagatggagtcgacctccggcgaggatgctccgaagcacaacccgattccgtccgcgctcgtctccaacctacagtccgtgctcaccgcccgccgcttgtccgcagccgaggtcagcaccgccgccacagctagcgaggttgaggccttggcttaggaagcagaggcgttcgctgcccccacgggagatgggacgctggcgaggcccatcgtgctactgacctatgccggggggatccggtcggcgggtctcgcggcgctcgtcgacgccctcgttgccgccgaccgctgcgacgtccacgtgtgtgcccccgaatcgtacgtgctgcgacttagaaaaccaaaccacagcgggaccagtgctcggatagggtccgacgacgatgcaagcaaggagtggcgcgcggccgacggggcgcagatcggctcctgcacgtgcagcgcagccgcgtgacagtgaagcagggaggccgcgataggtggcgcagggagggtgcgacggaggcaaagtgcaagcacctggggacttcagaaagaaagagtacaagtctactactgcagaaagcaaggagaatgccaatagaagcagatttcatgtatggatcggataaaatcttgagcaaaatgggagaaggtttgggttttctgcaatctgtcgtctcctcttctgctgggtatctccattattattctaatgaagagggctacgagttggattttcgtaggtacatttgagcgtgttttggaatgctgggatcgtgaaacacgtgaatatgttgccataaaagttgtacacagtatccacaagtactgtgatgctgcaatgattgagatagatgtgctcaatcgccttgtagaaaatgaaaaatatagatttctgctacacttggggaatcaaagaaaagtgaaagtgccatgtcaaagttgatgaccagaagcttgctattggaaccctctctattgaaaaatacccctagatagaaattgatttggttttcaataaagagtgtgagctgtcacacacatcgaaaactacacgtgtatttttctttggttacaaggttgagcaaccaatcgaggaagatgaataatggatcttgattctgaagatgaagagaaggagctaaacattccagtaatcaaggaaaatggcaaaggtgatgggaaggaggaccagagaagtgaagagaaggcagttgctgcagcttcaaaatcaagtcttgggcttgaaaaaaagcaaggatgagtatgagtctgatgattctaatgagggagaaggtgaaaccggagaatgagcagatgcggctgttcatggacaacagcatcaagaaacctgcaacatgcaacctgattttaagaaatttgccacctgcaac

SEQ ID NO: 220812 - DNA, 3029 bp, Zea Mays
ctaccactgtctcctctccgtgacgcacgcccgagatcctctccgcgacacacgcctccctctcctctgccccaccctcctccccacgccatcggcgccgccatcatcggatccggcccaagatgcctccgccccacgcgcccgagtcgtcgaggcacactccttcccgcctccgtcgtccacgcatatctccgcctcacctcggcgcccgagtcgtcgcacgcgttcgcggtggtgtccatcccggcaccggcctcacgcaccgtctacagctcccaactctgctcctctcagttctccctccgcatttcgccttctctcccttcctctccaagcagcgtcctcctcgcctagatccgtacaagcggcaaataacctctccggcggcgagacagatggagtcgacctccggcgaggatgctccgaagcacaacccgattccgtccgcgctcgtctccaacctacagtccgtgctcaccgcccgccgcttgtccgcagccgaggtcagcaccgccgccacagctagcgaggttgaggccttggcttaggaagcagaggcgttcgctgcccccacgggagatgggacgctggcgaggcccatcgtgctactgacctatgccggggggatccggtcggcgggtctcgcggcgctcgtcgacgccctcgttgccgccgaccgctgcgacgtccacgtgtgtgcccccgaatcgtacgtgctgcgacttagaaaaccaaaccacagcgggaccagtgctcggatagggtccgacgacgatgcaagcaaggagtggcgcgcggccgacggggcgcagatcggctcctgcacgtgcagcgcagccgcgtgacagtgaagcagggaggccgcgataggtggcgcagggagggtgcgacggaggcaaagtgcaagcacctggggacttcaggtaagtagaaaaccaacactgaatttgtcggttctctgttttgtgattgaccgattggtttgttgatctcagaaaattgtttcaccgttaagcaccaatttttgggtaggtcagtgttttgggatgattctcctatgcatcaatagtaaccttgtgcttggcaaagttatttgccctgataatgttgtaggtttagtgaaaagaaatatactgacatatccacctatccatcgatgcccaatggagattgacctctatcaagatttagttatgtgtctcagtagggcaatatttctgtgagttgtatactgtggattcctcatctgcatcatgaattgatcgcactatttatgccctatttttcaaaccatggtttctgtaattctttgcaccatggtatttttctcaaatgattttatctttcacaacccggactgaactcactgaagcagaaagaaagagtacaagtctactactgcagaaagcaaggagaatgccaatagaagcagatttcatgtatggatcgggcgcccaacaatgaatgatgtggtgaaggaacttgagatcatcagatagaatgaaggggcacaattgttaaactcagcgtctttatcagttgaacaatttggaaacaaaaagagaagagatccttatgcatttgtctatggatgatggaagcaacaacaacacttttgactacaacagtgggagttcaattaagttgttcacccaagtagataattgtctccactctttcaacaagttattggagttattatatatgtctgctccatatgaatgccttttcattttagtatcacatctgaaattaccaaccttttatactggcagtgtgataagcattgaataaaagtttttttatatgttgaatattcaacaatatatgtataattttatatatacataaatataatattctcatacgcgtggttgctccgttggtatattgttgaaaggttgttttttacggtacatgtgctgaaatggccatgctttgatctgcctataggttgaaccatataagctttctctcagactcgattatgctgcttacatgatccatttagctgtctttggatttttggggtaactctccaatatctcacatgaggttctttgtgatagctgttacttaatctgtggtgatctatgtaaatgtggcaacacttgcagttcctcgagcccttgtgcatggatatatcgtttagttgtgtctaataatttgtaattagtggcaacatctttttgttattttggttttatctgatttttattgttataagatctcgattgcaaactggcagttagtacacctttaggttttcctttgtcgtatcaagctaataatgtgtgaagcagggttcccattctgatctttagttttttgtgattttaatagcaataacctttttcgcaaaaaagtaacaaactttatgcagtatgcggttcgtatagttcccagtatccttttggacttagatttagttcgatatatggttatgtttattgacagaatgcttttagctttgcagataaaatcttgagcaaaatgggagaaggtttgggttttctgcaatctgtcgtctcctcttctgctgggtatctccattattattctaatgaagagggctacgagttggattttcgtaggtacatttgagcgtgttttggaatgctgggatcgtgaaacacgtgaatatgttgccataaaagttgtacacagtatccacaagtactgtgatgctgcaatgattgagatagatgtgctcaatcgccttgtagaaaatgaaaaatatagatttctgtgagtatctcagagacctaattgcttaaagtataaccctattctgtttttgacttgacagttcctcttcaatttgtcagctgtgtttaaattcagagatggcttgactatcgtaatcatatatgcatggatgtgttactttatgtttgtttgtgtttaatatagaaggctcccttgccttcgttcgatcatgtggtatttgaaagtgatgtctctataaatgaagtaaggcagggcaatgcttatgttactgttgtcagttattagatttttaaaccaag

SEQ ID NO: 220813 - DNA, 2923 bp, Zea Mays
ctaccactgtctcctctccgtgacgcacgcccgagatcctctccgcgacacacgcctccctctcctctgccccaccctcctccccacgccatcggcgccgccatcatcggatccggcccaagatgcctccgccccacgcgcccgagtcgtcgaggcacactccttcccgcctccgtcgtccacgcatatctccgcctcacctcggcgcccgagtcgtcgcacgcgttcgcggtggtgtccatcccggcaccggcctcacgcaccgtctacagctcccaactctgctcctctcagttctccctccgcatttcgccttctctcccttcctctccaagcagcgtcctcctcgcctagatccgtacaagcggcaaataacctctccggcggcgagacagatggagtcgacctccggcgaggatgctccgaagcacaacccgattccgtccgcgctcgtctccaacctacagtccgtgctcaccgcccgccgcttgtccgcagccgaggtcagcaccgccgccacagctagcgaggttgaggccttggcttaggaagcagaggcgttcgctgcccccacgggagatgggacgctggcgaggcccatcgtgctactgacctatgccggggggatccggtcggcgggtctcgcggcgctcgtcgacgccctcgttgccgccgaccgctgcgacgtccacgtgtgtgcccccgaatcgtacgtgctgcgacttagaaaaccaaaccacagcgggaccagtgctcggatagggtccgacgacgatgcaagcaaggagtggcgcgcggccgacggggcgcagatcggctcctgcacgtgcagcgcagccgcgtgacagtgaagcagggaggccgcgataggtggcgcagggagggtgcgacggaggcaaagtgcaagcacctggggacttcaggtaagtagaaaaccaacactgaatttgtcggttctctgttttgtgattgaccgattggtttgttgatctcagaaaattgtttcaccgttaagcaccaatttttgggtaggtcagtgttttgggatgattctcctatgcatcaatagtaaccttgtgcttggcaaagttatttgccctgataatgttgtaggtttagtgaaaagaaatatactgacatatccacctatccatcgatgcccaatggagattgacctctatcaagatttagttatgtgtctcagtagggcaatatttctgtgagttgtatactgtggattcctcatctgcatcatgaattgatcgcactatttatgccctatttttcaaaccatggtttctgtaattctttgcaccatggtatttttctcaaatgattttatctttcacaacccggactgaactcactgaagcagaaagaaagagtacaagtctactactgcagaaagcaaggagaatgccaatagaagcagatttcatgtatggatcgggcgcccaacaatgaatgatgtggtgaaggaacttgagatcatcagatagaatgaaggggcacaattgttaaactcagcgtctttatcagttgaacaatttggaaacaaaaagagaagagatccttatgcatttgtctatggatgatggaagcaacaacaacacttttgactacaacagtgggagttcaattaagttgttcacccaaataaaatcttgagcaaaatgggagaaggtttgggttttctgcaatctgtcgtctcctcttctgctgggtatctccattattattctaatgaagagggctacgagttggattttcgtaggtacatttgagcgtgttttggaatgctgggatcgtgaaacacgtgaatatgttgccataaaagttgtacacagtatccacaagtactgtgatgctgcaatgattgagatagatgtgctcaatcgccttgtagaaaatgaaaaatatagatttctgctacacttggggaatcaaagaaaagtgaaagtgccatgtcaaagttgatgaccagaagcttgctattggaaccctctctattgaaaaatacccctagatagaaattgatttggttttcaataaagagtgtgagctgtcacacacatcgaaaactacacgtgtatttttctttggttacaaggttgagcaaccaatcgaggaagatgaataatggatcttgattctgaagatgaagagaaggagctaaacattccagtaatcaaggaaaatggcaaaggtgatgggaaggaggaccagagaagtgaagagaaggcagttgctgcagcttcaaaatcaagtcttgggcttgaaaaaaagcaaggatgagtatgagtctgatgattctaatgagggtgagtgattatctcctgaagaaggcaatgttgtgatttgaagggtatggtgcagaaaagttttgtctgcatgtcatgacagtttcatacaatgcacgggcgaacgcaccgggagcctaccacctcccgtgctcaccattgctgtgtttgatacctgactactactgctgttactttgaatctccggggtgctcatggagtcatggtgcatatgctcatgtttgcagggtgtcagtttttttcatcgtctacttctagagataacaactttagcatgttggttaaagattcttggtgtgctaagcttttcttttttgcttcatttgaaactcaactatatatatggtgccctactttacattttgcaaacacaatctgctcaaaaaaatggaagcttatgtcttcatctgtcatgtgcttcatcagtgtgcttggaattttagccccttcttttgcttctaactaacatagatgcttttgtgttacatgtatttggttaccgaattaggaccatgttttctgtttggatatttcagaactaaaatccccaaacgattcccttatctaaacacttgagtaggggaaacaaccatgttgtgctg

SEQ ID NO: 220814 - DNA, 3245 bp, Zea Mays
ctaccactgtctcctctccgtgacgcacgcccgagatcctctccgcgacacacgcctccctctcctctgccccaccctcctccccacgccatcggcgccgccatcatcggatccggcccaagatgcctccgccccacgcgcccgagtcgtcgaggcacactccttcccgcctccgtcgtccacgcatatctccgcctcacctcggcgcccgagtcgtcgcacgcgttcgcggtggtgtccatcccggcaccggcctcacgcaccgtctacagctcccaactctgctcctctcagttctccctccgcatttcgccttctctcccttcctctccaagcagcgtcctcctcgcctagatccgtacaagcggcaaataacctctccggcggcgagacagatggagtcgacctccggcgaggatgctccgaagcacaacccgattccgtccgcgctcgtctccaacctacagtccgtgctcaccgcccgccgcttgtccgcagccgaggtcagcaccgccgccacagctagcgaggttgaggccttggcttaggaagcagaggcgttcgctgcccccacgggagatgggacgctggcgaggcccatcgtgctactgacctatgccggggggatccggtcggcgggtctcgcggcgctcgtcgacgccctcgttgccgccgaccgctgcgacgtccacgtgtgtgcccccgaatcgtacgtgctgcgacttagaaaaccaaaccacagcgggaccagtgctcggatagggtccgacgacgatgcaagcaaggagtggcgcgcggccgacggggcgcagatcggctcctgcacgtgcagcgcagccgcgtgacagtgaagcagggaggccgcgataggtggcgcagggagggtgcgacggaggcaaagtgcaagcacctggggacttcaggtaagtagaaaaccaacactgaatttgtcggttctctgttttgtgattgaccgattggtttgttgatctcagaaaattgtttcaccgttaagcaccaatttttgggtaggtcagtgttttgggatgattctcctatgcatcaatagtaaccttgtgcttggcaaagttatttgccctgataatgttgtaggtttagtgaaaagaaatatactgacatatccacctatccatcgatgcccaatggagattgacctctatcaagatttagttatgtgtctcagtagggcaatatttctgtgagttgtatactgtggattcctcatctgcatcatgaattgatcgcactatttatgccctatttttcaaaccatggtttctgtaattctttgcaccatggtatttttctcaaatgattttatctttcacaacccggactgaactcactgaagcagaaagaaagagtacaagtctactactgcagaaagcaaggagaatgccaatagaagcagatttcatgtatggatcgggcgcccaacaatgaatgatgtggtgaaggaacttgagatcatcagatagaatgaaggggcacaattgttaaactcagcgtctttatcagttgaacaatttggaaacaaaaagagaagagatccttatgcatttgtctatggatgatggaagcaacaacaacacttttgactacaacagtgggagttcaattaagttgttcacccaagtagataattgtctccactctttcaacaagttattggagttattatatatgtctgctccatatgaatgccttttcattttagtatcacatctgaaattaccaaccttttatactggcagtgtgataagcattgaataaaagtttttttatatgttgaatattcaacaatatatgtataattttatatatacataaatataatattctcatacgcgtggttgctccgttggtatattgttgaaaggttgttttttacggtacatgtgctgaaatggccatgctttgatctgcctataggttgaaccatataagctttctctcagactcgattatgctgcttacatgatccatttagctgtctttggatttttggggtaactctccaatatctcacatgaggttctttgtgatagctgttacttaatctgtggtgatctatgtaaatgtggcaacacttgcagttcctcgagcccttgtgcatggatatatcgtttagttgtgtctaataatttgtaattagtggcaacatctttttgttattttggttttatctgatttttattgttataagatctcgattgcaaactggcagttagtacacctttaggttttcctttgtcgtatcaagctaataatgtgtgaagcagggttcccattctgatctttagttttttgtgattttaatagcaataacctttttcgcaaaaaagtaacaaactttatgcagtatgcggttcgtatagttcccagtatccttttggacttagatttagttcgatatatggttatgtttattgacagaatgcttttagctttgcagataaaatcttgagcaaaatgggagaaggtttgggttttctgcaatctgtcgtctcctcttctgctgggtatctccattattattctaatgaagagggctacgagttggattttcgtaggtacatttgagcgtgttttggaatgctgggatcgtgaaacacgtgaatatgttgccataaaagttgtacacagtatccacaagtactgtgatgctgcaatgattgagatagatgtgctcaatcgccttgtagaaaatgaaaaatatagatttctgctacacttggggaatcaaagaaaagtgaaagtgccatgtcaaagttgatgaccagaagcttgctattggaaccctctctattgaaaaatacccctagatagaaattgatttggttttcaataaagagtgtgagctgtcacacacatcgaaaactacacgtgtatttttctttggttacaaggttgagcaaccaatcgaggaagatgaataatggatcttgattctgaagatgaagagaaggagctaaacattccagtaatcaaggaaaatggcaaaggtgatgggaaggaggaccagagaagtgaagagaaggcagttgctgcagcttcaaaatcaagtcttgggcttgaaaaaaagcaaggatgagtatgagtctgatgattctaatgagggagaaggtgaaaccggagaatgagcagatgcggctgttcatggacaacagcatcaagaaacctgcaacatgcaacctgattttaagaaatttgccacctgcaac

SEQ ID NO: 220815 - DNA, 2799 bp, Zea Mays
ctaccactgtctcctctccgtgacgcacgcccgagatcctctccgcgacacacgcctccctctcctctgccccaccctcctccccacgccatcggcgccgccatcatcggatccggcccaagatgcctccgccccacgcgcccgagtcgtcgaggcacactccttcccgcctccgtcgtccacgcatatctccgcctcacctcggcgcccgagtcgtcgcacgcgttcgcggtggtgtccatcccggcaccggcctcacgcaccgtctacagctcccaactctgctcctctcagttctccctccgcatttcgccttctctcccttcctctccaagcagcgtcctcctcgcctagatccgtacaagcggcaaataacctctccggcggcgagacagatggagtcgacctccggcgaggatgctccgaagcacaacccgattccgtccgcgctcgtctccaacctacagtccgtgctcaccgcccgccgcttgtccgcagccgaggtcagcaccgccgccacagctagcgaggttgaggccttggcttaggaagcagaggcgttcgctgcccccacgggagatgggacgctggcgaggcccatcgtgctactgacctatgccggggggatccggtcggcgggtctcgcggcgctcgtcgacgccctcgttgccgccgaccgctgcgacgtccacgtgtgtgcccccgaatcgtacgtgctgcgacttagaaaaccaaaccacagcgggaccagtgctcggatagggtccgacgacgatgcaagcaaggagtggcgcgcggccgacggggcgcagatcggctcctgcacgtgcagcgcagccgcgtgacagtgaagcagggaggccgcgataggtggcgcagggagggtgcgacggaggcaaagtgcaagcacctggggacttcaggtaagtagaaaaccaacactgaatttgtcggttctctgttttgtgattgaccgattggtttgttgatctcagaaaattgtttcaccgttaagcaccaatttttgggtaggtcagtgttttgggatgattctcctatgcatcaatagtaaccttgtgcttggcaaagttatttgccctgataatgttgtaggtttagtgaaaagaaatatactgacatatccacctatccatcgatgcccaatggagattgacctctatcaagatttagttatgtgtctcagtagggcaatatttctgtgagttgtatactgtggattcctcatctgcatcatgaattgatcgcactatttatgccctatttttcaaaccatggtttctgtaattctttgcaccatggtatttttctcaaatgattttatctttcacaacccggactgaactcactgaagcagaaagaaagagtacaagtctactactgcagaaagcaaggagaatgccaatagaagcagatttcatgtatggatcgggcgcccaacaatgaatgatgtggtgaaggaacttgagatcatcagatagaatgaaggggcacaattgttaaactcagcgtctttatcagttgaacaatttggaaacaaaaagagaagagatccttatgcatttgtctatggatgatggaagcaacaacaacacttttgactacaacagtgggagttcaattaagttgttcacccaagtagataattgtctccactctttcaacaagttattggagttattatatatgtctgctccatatgaatgccttttcattttagtatcacatctgaaattaccaaccttttatactggcagtgtgataagcattgaataaaagtttttttatatgttgaatattcaacaatatatgtataattttatatatacataaatataatattctcatacgcgtggttgctccgttggtatattgttgaaaggttgttttttacggtacatgtgctgaaatggccatgctttgatctgcctataggttgaaccatataagctttctctcagactcgattatgctgcttacatgatccatttagctgtctttggatttttgggataaaatcttgagcaaaatgggagaaggtttgggttttctgcaatctgtcgtctcctcttctgctgggtatctccattattattctaatgaagagggctacgagttggattttcgtaggtacatttgagcgtgttttggaatgctgggatcgtgaaacacgtgaatatgttgccataaaagttgtacacagtatccacaagtactgtgatgctgcaatgattgagatagatgtgctcaatcgccttgtagaaaatgaaaaatatagatttctgctacacttggggaatcaaagaaaagtgaaagtgccatgtcaaagttgatgaccagaagcttgctattggaaccctctctattgaaaaatacccctagatagaaattgatttggttttcaataaagagtgtgagctgtcacacacatcgaaaactacacgtgtatttttctttggttacaaggttgagcaaccaatcgaggaagatgaataatggatcttgattctgaagatgaagagaaggagctaaacattccagtaatcaaggaaaatggcaaaggtgatgggaaggaggaccagagaagtgaagagaaggcagttgctgcagcttcaaaatcaagtcttgggcttgaaaaaaagcaaggatgagtatgagtctgatgattctaatgagggagaaggtgaaaccggagaatgagcagatgcggctgttcatggacaacagcatcaagaaacctgcaacatgcaacctgattttaagaaatttgccacctgcaac

SEQ ID NO: 220816 - DNA, 2334 bp, Zea Mays
ctaccactgtctcctctccgtgacgcacgcccgagatcctctccgcgacacacgcctccctctcctctgccccaccctcctccccacgccatcggcgccgccatcatcggatccggcccaagatgcctccgccccacgcgcccgagtcgtcgaggcacactccttcccgcctccgtcgtccacgcatatctccgcctcacctcggcgcccgagtcgtcgcacgcgttcgcggtggtgtccatcccggcaccggcctcacgcaccgtctacagctcccaactctgctcctctcagttctccctccgcatttcgccttctctcccttcctctccaagcagcgtcctcctcgcctagatccgtacaagcggcaaataacctctccggcggcgagacagatggagtcgacctccggcgaggatgctccgaagcacaacccgattccgtccgcgctcgtctccaacctacagtccgtgctcaccgcccgccgcttgtccgcagccgaggtcagcaccgccgccacagctagcgaggttgaggccttggcttaggaagcagaggcgttcgctgcccccacgggagatgggacgctggcgaggcccatcgtgctactgacctatgccggggggatccggtcggcgggtctcgcggcgctcgtcgacgccctcgttgccgccgaccgctgcgacgtccacgtgtgtgcccccgaatcgtacgtgctgcgacttagaaaaccaaaccacagcgggaccagtgctcggatagggtccgacgacgatgcaagcaaggagtggcgcgcggccgacggggcgcagatcggctcctgcacgtgcagcgcagccgcgtgacagtgaagcagggaggccgcgataggtggcgcagggagggtgcgacggaggcaaagtgcaagcacctggggacttcaggtaagtagaaaaccaacactgaatttgtcggttctctgttttgtgattgaccgattggtttgttgatctcagaaaattgtttcaccgttaagcaccaatttttgggtaggtcagtgttttgggatgattctcctatgcatcaatagtaaccttgtgcttggcaaagttatttgccctgataatgttgtaggtttagtgaaaagaaatatactgacatatccacctatccatcgatgcccaatggagattgacctctatcaagatttagttatgtgtctcagtagggcaatatttctgtgagttgtatactgtggattcctcatctgcatcatgaattgatcgcactatttatgccctatttttcaaaccatggtttctgtaattctttgcaccatggtatttttctcaaatgattttatctttcacaacccggactgaactcactgaagcagaaagaaagagtacaagtctactactgcagaaagcaaggagaatgccaatagaagcagatttcatgtatggatcgggcgcccaacaatgaatgatgtggtgaaggaacttgagatcatcagatagaatgaaggggcacaattgttaaactcagcgtctttatcagttgaacaatttggaaacaaaaagagaagagatccttatgcatttgtctatggatgatggaagcaacaacaacacttttgactacaacagtgggagttcaattaagttgttcacccaaataaaatcttgagcaaaatgggagaaggtacatttgagcgtgttttggaatgctgggatcgtgaaacacgtgaatatgttgccataaaagttgtacacagtatccacaagtactgtgatgctgcaatgattgagatagatgtgctcaatcgccttgtagaaaatgaaaaatatagatttctgctacacttggggaatcaaagaaaagtgaaagtgccatgtcaaagttgatgaccagaagcttgctattggaaccctctctattgaaaaatacccctagatagaaattgatttggttttcaataaagagtgtgagctgtcacacacatcgaaaactacacgtgtatttttctttggttacaaggttgagcaaccaatcgaggaagatgaataatggatcttgattctgaagatgaagagaaggagctaaacattccagtaatcaaggaaaatggcaaaggtgatgggaaggaggaccagagaagtgaagagaaggcagttgctgcagcttcaaaatcaagtcttgggcttgaaaaaaagcaaggatgagtatgagtctgatgattctaatgagggagaaggtgaaaccggagaatgagcagatgcggctgttcatggacaacagcatcaagaaacctgcaacatgcaacctgattttaagaaatttgccacctgcaac

SEQ ID NO: 220817 - DNA, 1981 bp, Zea Mays
ctaccactgtctcctctccgtgacgcacgcccgagatcctctccgcgacacacgcctccctctcctctgccccaccctcctccccacgccatcggcgccgccatcatcggatccggcccaagatgcctccgccccacgcgcccgagtcgtcgaggcacactccttcccgcctccgtcgtccacgcatatctccgcctcacctcggcgcccgagtcgtcgcacgcgttcgcggtggtgtccatcccggcaccggcctcacgcaccgtctacagctcccaactctgctcctctcagttctccctccgcatttcgccttctctcccttcctctccaagcagcgtcctcctcgcctagatccgtacaagcggcaaataacctctccggcggcgagacagatggagtcgacctccggcgaggatgctccgaagcacaacccgattccgtccgcgctcgtctccaacctacagtccgtgctcaccgcccgccgcttgtccgcagccgaggtcagcaccgccgccacagctagcgaggttgaggccttggcttaggaagcagaggcgttcgctgcccccacgggagatgggacgctggcgaggcccatcgtgctactgacctatgccggggggatccggtcggcgggtctcgcggcgctcgtcgacgccctcgttgccgccgaccgctgcgacgtccacgtgtgtgcccccgaatcgtacgtgctgcgacttagaaaaccaaaccacagcgggaccagtgctcggatagggtccgacgacgatgcaagcaaggagtggcgcgcggccgacggggcgcagatcggctcctgcacgtgcagcgcagccgcgtgacagtgaagcagggaggccgcgataggtggcgcagggagggtgcgacggaggcaaagtgcaagcacctggggacttcagaaagaaagagtacaagtctactactgcagaaagcaaggagaatgccaatagaagcagatttcatgtatggatcgggcgcccaacaatgaatgatgtggtgaaggaacttgagatcatcagatagaatgaaggggcacaattgttaaactcagcgtctttatcagttgaacaatttggaaacaaaaagagaagagatccttatgcatttgtctatggatgatggaagcaacaacaacacttttgactacaacagtgggagttcaattaagttgttcacccaactttgcagataaaatcttgagcaaaatgggagaaggtttgggttttctgcaatctgtcgtctcctcttctgctgggtatctccattattattctaatgaagagggctacgagttggattttcgtaggtacatttgagcgtgttttggaatgctgggatcgtgaaacacgtgaatatgttgccataaaagttgtacacagtatccacaagtactgtgatgctgcaatgattgagatagatgtgctcaatcgccttgtagaaaatgaaaaatatagatttctgctacacttggggaatcaaagaaaagtgaaagtgccatgtcaaagttgatgaccagaagcttgctattggaaccctctctattgaaaaatacccctagatagaaattgatttggttttcaataaagagtgtgagctgtcacacacatcgaaaactacacgtgtatttttctttggttacaaggttgagcaaccaatcgaggaagatgaataatggatcttgattctgaagatgaagagaaggagctaaacattccagtaatcaaggaaaatggcaaaggtgatgggaaggaggaccagagaagtgaagagaaggcagttgctgcagcttcaaaatcaagtcttgggcttgaaaaaaagcaaggatgagtatgagtctgatgattctaatgagggagaaggtgaaaccggagaatgagcagatgcggctgttcatggacaacagcatcaagaaacctgcaacatgcaacctgattttaagaaatttgccacctgcaac

SEQ ID NO: 220818 - DNA, 2000 bp, Zea Mays
ccactgtctcctctccgtgacgcacgcccgagatcctctccgcgacacacgcctccctctcctctgccccaccctcctccccacgccatcggcgccgccatcatcggatccggcccaagatgcctccgccccacgcgcccgagtcgtcgaggcacactccttcccgcctccgtcgtccacgcatatctccgcctcacctcggcgcccgagtcgtcgcacgcgttcgcggtggtgtccatcccggcaccggcctcacgcaccgtctacagctcccaactctgctcctctcagttctccctccgcatttcgccttctctcccttcctctccaagcagcgtcctcctcgcctagatccgtacaagcggcaaataacctctccggcggcgagacagatggagtcgacctccggcgaggatgctccgaagcacaacccgattccgtccgcgctcgtctccaacctacagtccgtgctcaccgcccgccgcttgtccgcagccgaggtcagcaccgccgccacagctagcgaggttgaggccttggcttaggaagcagaggcgttcgctgcccccacgggagatgggacgctggcgaggcccatcgtgctactgacctatgccggggggatccggtcggcgggtctcgcggcgctcgtcgacgccctcgttgccgccgaccgctgcgacgtccacgtgtgtgcccccgaatcgtacgtgctgcgacttagaaaaccaaaccacagcgggaccagtgctcggatagggtccgacgacgatgcaagcaaggagtggcgcgcggccgacggggcgcagatcggctcctgcacgtgcagcgcagccgcgtgacagtgaagcagggaggccgcgataggtggcgcagggagggtgcgacggaggcaaagtgcaagcacctggggacttcaggtaagtagaaaaccaacactgaatttgtcggttctctgttttgtgattgaccgattggtttgttgatctcagaaaattgtttcaccgttaagcaccaatttttgggtaggtcagtgttttgggatgattctcctatgcatcaatagtaaccttgtgcttggcaaagttatttgccctgataatgttgtaggtttagtgaaaagaaatatactgacatatccacctatccatcgatgcccaatggagattgacctctatcaagatttagttatgtgtctcagtagggcaatatttctgtgagttgtatactgtggattcctcatctgcatcatgaattgatcgcactatttatgccctatttttcaaaccatggtttctgtaattctttgcaccatggtatttttctcaaatgattttatctttcacaacccggactgaactcactgaagcagaaagaaagagtacaagtctactactgcagaaagcaaggagaatgccaatagaagcagatttcatgtatggatcggataaaatcttgagcaaaatgggagaaggtttgggttttctgcaatctgtcgtctcctcttctgctgggtatctccattattattctaatgaagagggctacgagttggattttcgtaggtacatttgagcgtgttttggaatgctgggatcgtgaaacacgtgaatatgttgccataaaagttgtacacagtatccacaagtactgtgatgctgcaatgattgagatagatgtgctcaatcgccttgtagaaaatgaaaaatatagatttctgtgagtatctcagagacctaattgcttaaagtataaccctattctgtttttgacttgacagttcctcttcaatttgtcagctgtgtttaaattcagagatggcttgactatcgtaatcatatatgcatggatgtgttactttatgtttgtttgtgtttaatatagaaggctcccttgccttcgttcgatcatgtggtatttgaaagtgatgtctctataaatgaagtaaggcagggcaatgcttatgttactgttgtcagttattagatttttaaaccaag

SEQ ID NO: 220819 - DNA, 2959 bp, Zea Mays
ccactgtctcctctccgtgacgcacgcccgagatcctctccgcgacacacgcctccctctcctctgccccaccctcctccccacgccatcggcgccgccatcatcggatccggcccaagatgcctccgccccacgcgcccgagtcgtcgaggcacactccttcccgcctccgtcgtccacgcatatctccgcctcacctcggcgcccgagtcgtcgcacgcgttcgcggtggtgtccatcccggcaccggcctcacgcaccgtctacagctcccaactctgctcctctcagttctccctccgcatttcgccttctctcccttcctctccaagcagcgtcctcctcgcctagatccgtacaagcggcaaataacctctccggcggcgagacagatggagtcgacctccggcgaggatgctccgaagcacaacccgattccgtccgcgctcgtctccaacctacagtccgtgctcaccgcccgccgcttgtccgcagccgaggtcagcaccgccgccacagctagcgaggttgaggccttggcttaggaagcagaggcgttcgctgcccccacgggagatgggacgctggcgaggcccatcgtgctactgacctatgccggggggatccggtcggcgggtctcgcggcgctcgtcgacgccctcgttgccgccgaccgctgcgacgtccacgtgtgtgcccccgaatcgtacgtgctgcgacttagaaaaccaaaccacagcgggaccagtgctcggatagggtccgacgacgatgcaagcaaggagtggcgcgcggccgacggggcgcagatcggctcctgcacgtgcagcgcagccgcgtgacagtgaagcagggaggccgcgataggtggcgcagggagggtgcgacggaggcaaagtgcaagcacctggggacttcaggtaagtagaaaaccaacactgaatttgtcggttctctgttttgtgattgaccgattggtttgttgatctcagaaaattgtttcaccgttaagcaccaatttttgggtaggtcagtgttttgggatgattctcctatgcatcaatagtaaccttgtgcttggcaaagttatttgccctgataatgttgtaggtttagtgaaaagaaatatactgacatatccacctatccatcgatgcccaatggagattgacctctatcaagatttagttatgtgtctcagtagggcaatatttctgtgagttgtatactgtggattcctcatctgcatcatgaattgatcgcactatttatgccctatttttcaaaccatggtttctgtaattctttgcaccatggtatttttctcaaatgattttatctttcacaacccggactgaactcactgaagcagaaagaaagagtacaagtctactactgcagaaagcaaggagaatgccaatagaagcagatttcatgtatggatcggggatatttatacaattggctatgtatacggtctgcccaggcgcccaacaatgaatgatgtggtgaaggaacttgagatcatcagatagaatgaaggggcacaattgttaaactcagcgtctttatcagttgaacaatttggaaacaaaaagagaagagatccttatgcatttgtctatggatgatggaagcaacaacaacacttttgactacaacagtgggagttcaattaagttgttcacccaaataaaatcttgagcaaaatgggagaaggtttgggttttctgcaatctgtcgtctcctcttctgctgggtatctccattattattctaatgaagagggctacgagttggattttcgtaggtacatttgagcgtgttttggaatgctgggatcgtgaaacacgtgaatatgttgccataaaagttgtacacagtatccacaagtactgtgatgctgcaatgattgagatagatgtgctcaatcgccttgtagaaaatgaaaaatatagatttctgctacacttggggaatcaaagaaaagtgaaagtgccatgtcaaagttgatgaccagaagcttgctattggaaccctctctattgaaaaatacccctagatagaaattgatttggttttcaataaagagtgtgagctgtcacacacatcgaaaactacacgtgtatttttctttggttacaaggttgagcaaccaatcgaggaagatgaataatggatcttgattctgaagatgaagagaaggagctaaacattccagtaatcaaggaaaatggcaaaggtgatgggaaggaggaccagagaagtgaagagaaggcagttgctgcagcttcaaaatcaagtcttgggcttgaaaaaaagcaaggatgagtatgagtctgatgattctaatgagggtgagtgattatctcctgaagaaggcaatgttgtgatttgaagggtatggtgcagaaaagttttgtctgcatgtcatgacagtttcatacaatgcacgggcgaacgcaccgggagcctaccacctcccgtgctcaccattgctgtgtttgatacctgactactactgctgttactttgaatctccggggtgctcatggagtcatggtgcatatgctcatgtttgcagggtgtcagtttttttcatcgtctacttctagagataacaactttagcatgttggttaaagattcttggtgtgctaagcttttcttttttgcttcatttgaaactcaactatatatatggtgccctactttacattttgcaaacacaatctgctcaaaaaaatggaagcttatgtcttcatctgtcatgtgcttcatcagtgtgcttggaattttagccccttcttttgcttctaactaacatagatgcttttgtgttacatgtatttggttaccgaattaggaccatgttttctgtttggatatttcagaactaaaatccccaaacgattcccttatctaaacacttgagtaggggaaacaaccatgttgtgctg

SEQ ID NO: 220820 - DNA, 2623 bp, Zea Mays
ccactgtctcctctccgtgacgcacgcccgagatcctctccgcgacacacgcctccctctcctctgccccaccctcctccccacgccatcggcgccgccatcatcggatccggcccaagatgcctccgccccacgcgcccgagtcgtcgaggcacactccttcccgcctccgtcgtccacgcatatctccgcctcacctcggcgcccgagtcgtcgcacgcgttcgcggtggtgtccatcccggcaccggcctcacgcaccgtctacagctcccaactctgctcctctcagttctccctccgcatttcgccttctctcccttcctctccaagcagcgtcctcctcgcctagatccgtacaagcggcaaataacctctccggcggcgagacagatggagtcgacctccggcgaggatgctccgaagcacaacccgattccgtccgcgctcgtctccaacctacagtccgtgctcaccgcccgccgcttgtccgcagccgaggtcagcaccgccgccacagctagcgaggttgaggccttggcttaggaagcagaggcgttcgctgcccccacgggagatgggacgctggcgaggcccatcgtgctactgacctatgccggggggatccggtcggcgggtctcgcggcgctcgtcgacgccctcgttgccgccgaccgctgcgacgtccacgtgtgtgcccccgaatcgtacgtgctgcgacttagaaaaccaaaccacagcgggaccagtgctcggatagggtccgacgacgatgcaagcaaggagtggcgcgcggccgacggggcgcagatcggctcctgcacgtgcagcgcagccgcgtgacagtgaagcagggaggccgcgataggtggcgcagggagggtgcgacggaggcaaagtgcaagcacctggggacttcaggtaagtagaaaaccaacactgaatttgtcggttctctgttttgtgattgaccgattggtttgttgatctcagaaaattgtttcaccgttaagcaccaatttttgggtaggtcagtgttttgggatgattctcctatgcatcaatagtaaccttgtgcttggcaaagttatttgccctgataatgttgtaggtttagtgaaaagaaatatactgacatatccacctatccatcgatgcccaatggagattgacctctatcaagatttagttatgtgtctcagtagggcaatatttctgtgagttgtatactgtggattcctcatctgcatcatgaattgatcgcactatttatgccctatttttcaaaccatggtttctgtaattctttgcaccatggtatttttctcaaatgattttatctttcacaacccggactgaactcactgaagcagaaagaaagagtacaagtctactactgcagaaagcaaggagaatgccaatagaagcagatttcatgtatggatcgggtaatgacctttttgtgttctcctcaactcattatttagctacatatcttattaaatcttaatctttggtcattagctaccagcttgcactattattgtgaaaatccattaactttagtcattgaaatggttagactatcaccacgtaggtgatattagtggcattaagtgattaatctgtggcaaatcctattatcaactattttcttggctaatcattacaatatataatgaagaatactatggcttgaagggatatttatacaattggctatgtatacggtctgcccaggcgcccaacaatgaatgatgtggtgaaggaacttgagatcatcagatagaatgaaggggcacaattgttaaactcagcgtctttatcagttgaacaatttggaaacaaaaagagaagagatccttatgcatttgtctatggatgatggaagcaacaacaacacttttgactacaacagtgggagttcaattaagttgttcacccaaataaaatcttgagcaaaatgggagaaggtacatttgagcgtgttttggaatgctgggatcgtgaaacacgtgaatatgttgccataaaagttgtacacagtatccacaagtactgtgatgctgcaatgattgagatagatgtgctcaatcgccttgtagaaaatgaaaaatatagatttctgctacacttggggaatcaaagaaaagtgaaagtgccatgtcaaagttgatgaccagaagcttgctattggaaccctctctattgaaaaatacccctagatagaaattgatttggttttcaataaagagtgtgagctgtcacacacatcgaaaactacacgtgtatttttctttggttacaaggttgagcaaccaatcgaggaagatgaataatggatcttgattctgaagatgaagagaaggagctaaacattccagtaatcaaggaaaatggcaaaggtgatgggaaggaggaccagagaagtgaagagaaggcagttgctgcagcttcaaaatcaagtcttgggcttgaaaaaaagcaaggatgagtatgagtctgatgattctaatgagggagaaggtgaaaccggagaatgagcagatgcggctgttcatggacaacagcatcaagaaacctgcaacatgcaacctgattttaagaaatttgccacctgcaac

SEQ ID NO: 220821 - DNA, 2200 bp, Zea Mays
taagtagaaaaccaacactgaatttgtcggttctctgttttgtgattgaccgattggtttgttgatctcagaaaattgtttcaccgttaagcaccaatttttgggtaggtcagtgttttgggatgattctcctatgcatcaatagtaaccttgtgcttggcaaagttatttgccctgataatgttgtaggtttagtgaaaagaaatatactgacatatccacctatccatcgatgcccaatggagattgacctctatcaagatttagttatgtgtctcagtagggcaatatttctgtgagttgtatactgtggattcctcatctgcatcatgaattgatcgcactatttatgccctatttttcaaaccatggtttctgtaattctttgcaccatggtatttttctcaaatgattttatctttcacaacccggactgaactcactgaagcagaaagaaagagtacaagtctactactgcagaaagcaaggagaatgccaatagaagcagatttcatgtatggatcgggcgcccaacaatgaatgatgtggtgaaggaacttgagatcatcagatagaatgaaggggcacaattgttaaactcagcgtctttatcagttgaacaatttggaaacaaaaagagaagagatccttatgcatttgtctatggatgatggaagcaacaacaacacttttgactacaacagtgggagttcaattaagttgttcacccaagtagataattgtctccactctttcaacaagttattggagttattatatatgtctgctccatatgaatgccttttcattttagtatcacatctgaaattaccaaccttttatactggcagtgtgataagcattgaataaaagtttttttatatgttgaatattcaacaatatatgtataattttatatatacataaatataatattctcatacgcgtggttgctccgttggtatattgttgaaaggttgttttttacggtacatgtgctgaaatggccatgctttgatctgcctataggttgaaccatataagctttctctcagactcgattatgctgcttacatgatccatttagctgtctttggatttttggggtaactctccaatatctcacatgaggttctttgtgatagctgttacttaatctgtggtgatctatgtaaatgtggcaacacttgcagttcctcgagcccttgtgcatggatatatcgtttagttgtgtctaataatttgtaattagtggcaacatctttttgttattttggttttatctgatttttattgttataagatctcgattgcaaactggcagttagtacacctttaggttttcctttgtcgtatcaagctaataatgtgtgaagcagggttcccattctgatctttagttttttgtgattttaatagcaataacctttttcgcaaaaaagtaacaaactttatgcagtatgcggttcgtatagttcccagtatccttttggacttagatttagttcgatatatggttatgtttattgacagaatgcttttagctttgcagataaaatcttgagcaaaatgggagaaggtttgggttttctgcaatctgtcgtctcctcttctgctgggtatctccattattattctaatgaagagggctacgagttggattttcgtaggtacatttgagcgtgttttggaatgctgggatcgtgaaacacgtgaatatgttgccataaaagttgtacacagtatccacaagtactgtgatgctgcaatgattgagatagatgtgctcaatcgccttgtagaaaatgaaaaatatagatttctgctacacttggggaatcaaagaaaagtgaaagtgccatgtcaaagttgatgaccagaagcttgctattggaaccctctctattgaaaaatacccctagatagaaattgatttggttttcaataaagagtgtgagctgtcacacacatcgaaaactacacgtgtatttttctttggttacaaggttgagcaaccaatcgaggaagatgaataatggatcttgattctgaagatgaagagaaggagctaaacattccagtaatcaaggaaaatggagaaggtgaaaccggagaatgagcagatgcggctgttcatggacaacagcatcaagaaacctgcaacatgcaacctgattttaagaaatttgccacctgcaac

SEQ ID NO: 220822 - DNA, 1493 bp, Zea Mays
ctgcccccctttcggcctttcctctcagtcctctctcgccactccgcctcgccgtccacacctccctctccgtgaaaattgctgagatggccatcgacaaggtggacgccaaggagagggagaagatcgaggccgtacgcaagctgctgtgcaagcaggcgccgctctccgcgaagcaggcgcagtactgcaacgacgcgtgcttggagcggttcctgcggtcgcggggggacagcgtcaagaaggcggcgaagcacctgaggaccgtcctctcatggagggagagcgtcggagctgatcacatcatggccgacgagttctccgccgagctcgccgacggcgtggccttcgtctccggccacgacgacgacggccgcccagtcgtggtgtttcgaatcaagcaggactaccccaagttccactctcagaaatcgctttttccgctcggcgtcggctttcctcaacctactcatgggcacgctcaagatcgtcgccgactactaccccggccgcctccaccgcgccttcgtcatcgacccgccctccctcttctccgtcctctggaagggggtgcggccgttcgtggagctggcgccagcgacggcggtggtgtgctccctggacttcgaggactcgctcgaggacgcgtctttcacggcgtacccgcggaccgcgtcgctgcggttcgagccggcggccgtcgtggggaagaacccgggcgtggggtcggtctcgtcgcggttctccgtcacccccaccgacaaccccatcaagccgtggtacctctccaccatccccacctcggtgggctcccgctccgtggtgcccacctccagcagcccgtcgctggtcggcgcgtccccgctctccgcgcgctccttctccttcgcctcgcccgccacgctgcgctccacggtcgccacgccgccgccgttcccgcgcggcgcgggcgcgcccctgacgccgtcctccgccgccaaggcccagaagaccccgccgcagccgcagcagttcccgcggacgccgcgcccgtcgttcctgcagtcgccgtcgatgctgttcgcgttccggaaggacgggcaggccagccgcgtggagcgcgagcgcgagtccttcctcccgtacctgcgcttctaccgccggccctacgacgagatttcctaccgcgccaagatgcgccccccgctcggcggcctcatatccatcgtcggcgacaagttcaggcagaagccggtgccgcagccgcagccgctgcgtcgccacgctgggctccaccaccagcaccattaccagcagcagcagaggatctgattctcgtctcgtcgctgcatggcgaccagagaatttttctccatacaccatagatccgatgctatattatgccaagttccaactttttttcccctccagtgcttagtgcctatgatattcttgaatccatgtataataacatcccgaaaaatgtgagtaaaatcgacccctttctgcaccgg

SEQ ID NO: 220823 - DNA, 667 bp, Zea Mays
tcatcatggagaaagctgtatatgacacgctcaacatgttgaactttgatgtgacaaagaagtgccttgttggagaaggatggtgtcctatatttgctaaatctcagatcaaggattgtttgcagcgttccacaattcacagcaattcacaagttggtacaatatttcatgagatggacactattgaatcaccacctacatatttccgaactgataagtttaccaatgctttccaggaaattgttgatgcatatggcgttgcccgatatcaagaagctaatccggctgtatattctgttgtgacgttcccatttctttttgctgttatgtttggagattggggtcatggaatatgtctattactaggagctttggttcttatacttcgcgagaagagattttcctctcagaagcttggtagctttatggagttggcattcggcggacgatatgttattcttctgatggcaatattctcaatatactgtggccttatatacaatgagttcttctcagttccattccatatatttggcaaatctgcatatgaatgccgggacaaaagctgcagcgatgcacatacttttggtctcatcaaagtccgtgaaccctatccttttggggtggacccaagctggcgtggaagtcggtctgagctaccctttct

SEQ ID NO: 220824 - DNA, 1839 bp, Zea Mays
ctgcgcgcctccctttccgagccgcttcctccctccgtcactcctcatgggtcatggcattggcagttgcgcactaggcagaacagagtggaaaatagaattaggcctaccctccgagagtcagatctgaggcgcgccacccgcgaccaccgcaccgcgtcgtcctcctcctcgctctagcgacgccttctggaagctttgggaggccgcgctacgctacgcgacgctacgctccggcgggcggtcgggatggggctgttcgaccggctgcccccgatggaccacatgcggtccgagaagatgtgcttcgtgcagctcatcatgcccgccgagagctcgcgcctcgccgtcacctacctcggcgagctcggcctactccagttcaaggacttgaatgaggataagagtcctttccagcgtatatttgtcaaccaggtaaagcgatgtgcagaaatgtcacgcaaactaaaatttttcagtgatcagatcaacagggcaggtttaagatcttctgttcgacctgcacttgaaccggatattgatctggaggagctagaggcaagattgggtgaacatgagcatgaactgcttgagatgaatacaaatagtgacaagctaaaacagacatacaatgagcttcttgaattcaagctggtcttgtcaaagccatgcagcttcagctgagcatgagctagatgaaaacatatatgacaatggaatacatgagggaaatgcctatctgctcgaacagggagtgcatcaaggagcacatggacattctggagtgagatttgttagtggaataatattaaagtcgaaggcacttgcttttgagcggatgctttttcgagctacaagaggaaacatgttattcaatcaggcatctgcaggggaacctgtaactgatcccatatctggtgaagaggtagagaaagctgtttttgtagttttcttttctggggaacaagcaaaagcaaagatactaaagatttgtgattcatttggagcaagttgctaccctgttcctgaggagatggtcaagcagagacaaattttcaatgaggtatcggctcgtctctctgacctggaagttactttggatgctggaatccagcacagaaacaaagctcttgagtcaataggatcacaattgtggaggtggacaatcatggttaaaaaggagaaagctgtatatgacacgctcaacatgttgaactttgatgtgacaaagaagtgccttgttggagaaggatggtgtcctatatttgctaaatctcagatcaaggattgtttgcagcgttccacaattcacagcaattcacaagttggtacaatatttcatgagatggacactattgaatcaccacctacatatttccgaactgataagtttaccaatgctttccaggaaattgttgatgcatatggcgttgcccgatatcaagaagctaatccggctgtatattctgttgtgacgttcccatttctttttgctgttatgtttggagattggggtcatggaatatgtctattactaggagctttggttcttatacttcgcgagaagagattttcctctcagaagcttggtagctttatggagttggcattcggcggacgatatgttattcttctgatggcaatattctcaatatactgtggccttatatacaatgagttcttctcagttccattccatatatttggcaaatctgcatatgaatgccgggacaaaagctgcagcgatgcacatacttttggtctcatcaaagtccgtgaaccctatccttttggggtggacccaagctggcgtggaagtcggtctgagctaccctttct

SEQ ID NO: 220825 - DNA, 2470 bp, Zea Mays
gaaatgtagttttttttttgtctccttggacataatttggatttttggaacttgattgacaatcattgacgctatggcgatacaatttatgtacgtgtccctagtgtacacaatgaatctaagttctagtctgctttggtctaattaggaacttgactgtgaatccatcgctgctggtttattgcatgatactgttgaagatacagatgtggttacttttgaaagaatagaaaatgagtttgggccaactgtgcgccgtattgttgaaggggagacaaaggtatctaagttggggaaacttcagtgtaaaagtgagggtagctccaaacaagatcttaaagcagaagacctaaggcagatgtttcttgccatgactgaagaggttcgtgtgatcattgtcaaactggcagataggttgcataacatgcgcactctcacacatatgcctcagcacaagcagtatgccatcgccatggagacactacaggtctttgcccccctagcaaaactccttgggatgtaccgtataaagtctgagctggaatatctatccttcatgtacgttaaccccactggttttgctgaactaagaaaaagagttgaagacttgtacaaggcccatgaacaagaattggaagaggcaaatagaattttaaggcaaaagattgctgatgatcagtttctcgatcttgttagtgttgaaacaaaagtgcgctcagtttacaaagagctctacagcatttacaaaactacactcaaatccaagagttcaataaatgaggtgaatcaggttgctcagctgaggatcatcataaaaccaaaatcctgcaatggtgttgggccattgtgcactgcacaacagatctgctatcatgttcttggccttgttcatggcatatggacacccgttcctcaagctgtggaagattacattgcaactccaaaacctaatggctaccaaagtctacacacaacagtgataccatttcttaacgagagtatgtttcatttggaagttcagataagaacagaagatatggatttaatagcagaaagaggcattgctgcacattacagtggaagaggagttgtttctggacctgttcggcctggaatatcaagtggaagaaatgccaaggggaaagtaatctgcttgaacaacacaggctttgctctgaggaaattatctagtaagtatgcattccagcgtcaccagcagtggctacagcatgcaaaaactcgcagtgctagacacaaaattatgaaattcttaagggagcaagctgctctttctgctgctgaaataactgctgacgcagttaataattttgttgctgatcttgaagacgaaagtgatagtgagctctcacttccaagcaccaagaatgaagatagtaaattcaactgggagaagatattaagttctgataaattattctttgtcaacaaaagtagtgatggctttttacctgttaataatgtccatacgaaggtcaatgggaagcaaaacaaaactgttaaggatttgggcatcaaaatcaatggtcattctacaattcgaggtgatagcttcagtgagttaatgcaccctggcaattctacctgcaaggaagttttccctggtttggatcactggaaatctggtaaaatttctggttggcataatacggaaggcaactctgtccaatggctttgcatagcctgtgttgaccgaaaagggatgatggcggaggttacatcggctcttacagcttgtggaattaccatatggtcttgtgtggcagaagtcaataaaaggaggggaatgggtgtgatgctgttccattttgagggaagctatgagaacgtggtcagtgcgtgttcaagtgttgacatgattcttggtgttcttggttggtctgtgggatgtagctggtgtccattgggtgttcttgagtgctaatcggtaccaagagacgtgtaccacaatagttcaccactgtcttctccaagatggagttaattttggaagcactaagacatcggtggctcaaaattttgttggtcagatcatggttggtgactggtgagcgagtggaaccctttacttctctgtcaaatcagaaagtgggggtgatcgaagtagaaccagatgtcattctgaaagtgagtgtacatagcagagcgagtagggtactgttagtgcagggattgatttgattgtacagaaggccttacaaaagattgttaagggcagttcgttcttctccccactttgtggttcgcatatactagtttgcttaaatgtgcagctagaattttgacctggacactgatcccaaattttgcctgtttaattttctcactccgcctgtaaatgttattgtacagcttcaattttgccagtgaaaatttgaacaaagttaactggtagatgcacgcctgaattacttgccattttccgcagtatgaatggtaacttaaactggag

SEQ ID NO: 220826 - DNA, 2757 bp, Zea Mays
cattccacaaagaacctgtcctaaaacccaccaaatatgtaatatctcacatcatattcctccaaagaaccttatgattctacctctgttttcaagtcgtccaactaatcgcgattagtcgggctagtcggttagtagagctcgattagcacaaccgactcgatcggagcacctaatcgccttggtcgtccgactagtcgacgattagggtcgattagttgctcgattagacgattctgcgtgactagggtttagtatccagattttttgattttgtgggcttttttggcgggcggcccggctacacggagatggaacgccagcgtcgtgccgtcgtctctactctctactaaaccgacggttagctctactttcctggcatctcaatctctttcctttccttctcttctctattttcctaccggctcctagacttctcattctagaatccatacttcaccagtacaccggctgaccgacgatcatctgtgcgcgctgcgcggttccagttccaagttccagacttcaccgacctagatttctcatctagacacgcacgcgcggttccagacacgcgcggttccagaaatccaggatatttcaccggcatgagatcatcttttggagaagtagtttcgaatgatatgtatgcttatttgaaaaggaacacaaggcttgtgctttctgttgaaagtgaggaaggaggacagaaagatggtgatgctactgaacctgaacaaaaggtacatgaaccaagttcagagacaaaacacaagcaagcgaagaagaaagcaactcaagccaccattagctcttttgttgtttcagctcatcccacccaaaagtccggcaagtcagtggctgccatgttttgcaagacgccagaagaagttgttgctgacaggcataaaaataaaaccactcagtcaactcttgaagcttgcacaaagaaaggaaaggaagccaagcaaattgttaacgaccatgtcgcagattttctatatgagaacaaaataccattgcacgtcgtcaattcaaggagctgggaggttatgttggagtcaattgggcaatttggtcctggatacagtggtccatcgtaccatgatgttagggtaccttggcttgatagggttgtcgatagggcaacaacattgaggtcgaagcatgaacaagcttggaaggaatatggctgcactgtttttgaatccagggaaattcttctccattagggagaaagacaagaagcaagctggaattctgagatctatgttcaatgatgtgatgtggaaaatgatcagtgatgaggaagaacaaactaaaataagtaatcaagcagatgactacgagaggtccgaaggggaagcattctcaaaacctagagcgataagagacagagagaaaaaaatcctagtaagtgttaaaccttccttctaattggttctgtctgttaatgtgctttctagtttctactgatctaagggtctgtttggttgggttgtggctgtggctgtgaaaaaagttcttgtgggctgtgagctatggaaaaagctactgtgagctgttaaaaagctagaaactgtttggtgaaaaccactaaaagccgttaaaagttcttcgatatatgttttcacagttctatccgaaagccactaaaagcatgtctatgggtgctttcagttttgcactgcgaagaagtcggcttttacaaaaaactgcttcctggatccagccctttggtttagcttttggcttttatcgggcaaaagtcaaagccaaaagtcaaaccaaagacatcctaagtatctaacaatctcaaatttatatgacagtcttatggtggggtgcctatggacaattggcatatgaactccaaagccttgcaaaaagaattataagcctatgttgctcagcatctggttgtgaaagaaactggagtgattttgcagatccatacaaaaaagagaaacagactggagcacaagagactaaataaattggcctatgtaagctacaacaggaagatggataataggttcacaaatataagagagctaggttccaagggaaagagaagcaatccactgttgcttgaagagtttacgtggcaaaattaatgggttgaagaagaatctgatggtgataacatttgggatgttgtggatgaagctctaggtgcaactcagggtcttcggggtcaaaatttgcctaggactgctgctgctggttcctcctctcaaactcagacacaaacctatgttagaaccagaaaacgacccagaaatgcaacagctacagctcaagacatacgtgaagaagatgacaattctcctgctgaagatgaacaagaacaagagacagcaagacaaatgaatgatgatgaagatgaaggcgaacaagaatcaggtggaaggggagctgcaggtgatgaatttcagttggatgaagatcttctttaggtaactgggtggtaatgggtgttgtgtggtatctgggactggtagtattagtaactagtaattgtttctttgctgttttcagtattgctgaattcatgtcatgtttaccctatccttcatatatattatatagttatataattatatactgttacagatatatgtacatgggcctggcccattaggacactagtactgtagctagggtttctgtaactgcagacattctcacatggtaccagagccttgactgttccagccgccgctgtcccatggctggccggccctctctcccctc

SEQ ID NO: 220827 - DNA, 731 bp, Zea Mays
ctacctcacccgacacgtggagcggtggacggctagatgcatggcgtggcggagagcaagtgtggcatggcggacgggacacccccgccgcgccggtccgccgacgtcaacgcccaaatcccgtagagaggaggtgtccctgctcttccgggtacggcgtgagcgcagttctcgcatgcgaactattcgtggtaggagagcgttccaagttccagacttcaccgacctagatttctcatctagacacgcacgcgcggttccagacacgcgcggttccagaaatccaggatatttcaccggcatgagatcatcttttggaggtattatttagtgtagttctgttcttcatccttgtatgtgttgtgtcattctggacttctgaatttttgttcttgtactccatcagttcatcctattcggctattcctgtagacttgtactccattgtccatcctattccttattcatttgatacattacatacagagtttggtcgtcgccgtcaggataatgttgaggtgctcttcccagaatcacaagttgtgggcagcggcaatccatcttctgttgcggataacaatgatcttgcttcgacatcatcagcctttgtggattctgcaacactcgttgagaaggttattgcaaagttgcctgctgaagttcatgcacacgcaactgattcaaagagaaaggccaaatcacaagatcctggttggaagtttggatggtgg

SEQ ID NO: 220828 - DNA, 2395 bp, Zea Mays
cccgcaccttccttccattcgactccacactccactcccagcctcgcctcccctcgcctttttagagagagaaaccacggctgccggcccccagcgagctagagagagaaaccaaggccaaggagcacagcaccccgtccgtccccagcaggagagcgagagacagaagggtgtgcgaaggaaagaagaggcggtgggagaggagggcgacatggagaggccggcaccggtgaggaagtctcacacgtcgacggcggacctgctgatctggccggagggggcgccgcaggagtcgcccgccggggccacgccgccatccaaccgccggccgcatcagccgtcggaggcgctcaggaaggtggtgttcggcgggcaggtgacggaggaggaggccgagagcctcaacaagagatctcccgagatttacggcacaactttgggcactgttatttcttttgtatgtgccgttgttgatctgtgctgctgtgggtggagaaattcgttggatttgaggaaaccatgctctgctcccaagtggaaggagatgacaggaagcggcatatttgctgctgggggcgaggctgaagaagatgaatctgccaatgcctctgcaactcccattcggaccgctccaaagaattatcaggtactgcttatgtaggttgatttttactctgttttgtttaggcttcatccctggcaacccttctgcgttgaactgttgatattaggattattgttttattttcaggtgctggctaacttgttgtgacaagatggatcacttgatttatctatttatgttcttgctttgctataaattttgaatgtcgttgatataagctgctggttgctatgatcaaaacttttaaatgttatacatacgttctagtcctacctctccttagggggctagaggttgttgagatgaatcttgtgagaagggtttgggcaagcattattattttgtatacacattggttggtgagctttccttgtgatagaactgggcattttgattggtaagttgagctgaacgagaaatattcgagaactttgattgatagacacatgagacttaggtactattttttttttgtagataactttggttaagatgtcaataaacaacaaaccttgattaaactctaaacatatatagtacagcaagtttcataatttttctacagactgcttagcatgcttctaatccataatcatcttgatgctggcttcaaatggaaagggtgaatatgcttaggtttgatatagatttaacctcttacgtcgctggaacactgttacacagactaatcctactgcattttctcaaacacaggcaattagcaccataagccacatctcattttccgaggaagaaagcatttctccgaagaagccgacttcgatagcagaggtggcgaagcagcgcgagctgagcggcacacttctgagcgaggacgacagcaagatgaagaagcagatatcggacctgaaatccaaggagctgagcggccacgacatctttgctcctccggaagacccacggccacgcaactcagagaacggctcgacctcgcagaccccgggcaaaaatgcacacgtcctgacctctgaactcacctcgccctaatataaactctcgcagtcacagaagctgcatgcagtgttgcttactgctgctggttgtcgttctctcacaacaggtaagcaacttcaagttcggcgaggccgacgaggacggcatggtgaagaccgcgaagaagatccccacaaagaaattcaccgacctcgcgggcaatatcttcaagggcgacgagaccccccctgggacggcggagaagcacctgagcacagcgaagctgaaggagatgaccggcagcgacatcttcgcggacgggaaggccccctcgcgggactacctcggcgggatccgcaagccgcctggcggggagagcagcatcgcgctggtttaacagcaacagcaacctgatggacatagcagcccctacatcattcgtttctttctcctcgccgtcaccgtcttaggagtgatcttttgttcttcttctttttcctttcctttggaggactgatcgattggaacccccggcttgctttcctgttccccgtaacttgcgccagattttcgttgtcgatcccctctgatggtggtgttgtgtgggcatgacaacaacgatggttatctctaatttaacattgatttggcttggctactgtttgttggttggtcggtcatggcgtacctgatgcagcaacaacaacccagtggtgcactatctcatttcccgtgactggatgtctcagctgctgagggaggagaaggacgacgacgaccaccatatcctccctagtgctagtgctgccctttttt

SEQ ID NO: 220829 - DNA, 502 bp, Zea Mays
gttgggtttaaccctactcttgagcactacacgtcttacaaaagcttcgatattagaacttgcgtgcgggctctacaggaactgcagcacaacaccagtaattgccccctcaacgccatccgtgagaagtatgggcagcagaagttcgagtgcgttgccaacctcaggtcaccggagctgctgcggtcgctcttcagttgatgtgctcccctgcactctgctgattcactcgccatttgctgcaacgatcctgacactgtataaaatatttcttcagtttctgttccatttccaaactttcttcagtttgaacatgcattctgtgacttgggtcaccgacaaaagaggcgcgacacactaatatatcaatttgtaactcaaagcatgtttcaccatttttttcataaaacatagaacagaaataaatgcacacactctgcccctacaccatgagtgcctttgaaaaactggactgatagatcatgagattaaccaagtcatt

SEQ ID NO: 220830 - DNA, 1997 bp, Zea Mays
ctctaaaaccccaaccgtcgacgttcactcctcaccccctgcggccctgctcttttgagcctcactcctcagtcttcacgccgccggggcagtgctaagatccaggacacgcgctgtcccgctagcaccacgcctccccttgtcatcgtcctcctcccacgtgctgctgtgggggtgcagacgggagacacatccggacctgattgatttcttcgttttgttctgctggtttacatggctgcaagaaagaaaaagcctttgcttattgcttgccaagcaaccagtgccagaataacaagatctcaggctgctgcaaatagtacaagatctgggctggctccttctgtaccagtacctctgaaaacggagcataaccatgcagcgaaaaaaaagatgaaaagggaagcttcagatgaaaatgcttctgctgatgctggagcttcagctcctctgcctaaaaggcgtacagttctcaagaatgtaactaacataagctgtgctaaaatttccaaaaggtgcactgctgtgactgggctgaagttgggtccctcccagaaggctgggcagagcataaacaagcaatgcacaaacaagatctccatgcttctccctctggctgttggagggagttcacttgtggatgattctaataatgctgaagaaacacaaatggtagaccttttggcacagaaagagaagcagattgttttgcttaaggaggctcagccattacagaatactgaacaaaacaaaggcggtgcttgtgatgaggcatctgttgaggaaagaaatgccatgaatgtacacgaaactgctgccttaaaggctggggtctctaatggtttaaacattgtagatattgacaaaaataatggtgatcctcaaatgtgtgttacctacgttgcagagatatacagaaatctaatggcctcagagcttataagaagacctaggtcaaattacatggagactttgcaacaggacatcacagctagcatgcgaggtgttctaattgattggcttgttgaggtttcggacgaatataagcttgtggcagatacactttaccttacagtatatcttattgaccaatttctttctcagaactgtatccaaacgcacaagctgcaacttcttgggataactagtatgctgattgcctcgaaatatgaagagtattctgctcctagtgctgaagaattttgtaacataacggctggtacatatgcaaaggctgaggttctggaaatggagcaacaagtgcttaatgatctgggctttcatttatctgttccaacaacaaacacatttctcaggagattccttagagcagcacaggcttctcgtacagctcatctgaccactttgaattatctggcgagttatcttgccgagttgactttaatcagttacgatttcatgaaatttcttccctcagaggtggcagcatcttcgattttccttgcaaaatggacacttgaccaatctgaccatccttgggtttaaccctactcttgagcactacacgtcttacaaaagcttcgatattagaacttgcgtgcgggctctacaggaactgcagcacaacaccagtaattgccccctcaacgccatccgtgagaagtatgggcagcagaagttcgagtgcgttgccaacctcaggtcaccggagctgctgcggtcgctcttcagttgatgtgctcccctgcactctgctgattcactcgccatttgctgcaacgatcctgacactgtataaaatatttcttcagtttctgttccatttccaaactttcttcagtttgaacatgcattctgtgacttgggtcaccgacaaaagaggcgcgacacactaatatatcaatttgtaactcaaagcatgtttcaccatttttttcataaaacatagaacagaaataaatgcacacactctgcccctacaccatgagtgcctttgaaaaactggactgatagatcatgagattaaccaagtcatt

SEQ ID NO: 220831 - DNA, 606 bp, Zea Mays
caacccctcctagtcctagctgcactgcacctgcattgcatgcacatgcaccgagaggtcgggctgctgaacgtggacggctactacaactcgctgctgaccttcatcgacaaggccgtggaggagggcttcatcaaccccagcgcccgccgcatcatcgtgctcgcgcccaccgcgcaggagctcatggacaagctcgaggagtacgagccttaccacgacagggtggcgtccacgctcaactgggagaccacgatggaccacctggcctactgacgcccacgctgccagagccgccagcaggcgactgggacgacatctctgatccatcgatgccattcaggaaacaagcttttagcttgccgtcagattggggcttttgtttcgtttttaactgcatgcagatcggttttatttggagtgccggagggagagagaaaaaaaaaacaggttgattattcggttcgcgtagcaggagtacgtagtacgtgcttgttttgtgtatatggtgccttgtgtttgcttcccaccaacggggatgattgatggcttgcagtgttgtctctgtaccagttcaaaaaaaaaaaacccgaccggtttccccta

SEQ ID NO: 220832 - DNA, 1027 bp, Zea Mays
gcatcagctgcgctgctcaccaggaaggccatctcatccatccttcattgtattgtagtggcatcaccaggaacagcccagccgcaagaagacagacgacagcagcgagtggggatcggaagaaagaggaagcggagacgaaggtgagagagagaggcaaaagggcagccatgacgatgaagcagtcgaggttcaagaggatctgcgtcttctgtggcagcagccaggggaagaaggcgagctaccatgacgccgccgttgagctcggcaaccagctggttgcccggagcatcgacctggtgtacggcggcggcagcatcgggctcatgggcctcgtctcccaggccgtctacggcggcggacggcacgtcatcggggtcattcccaagacgctcatgacaccagaggagggtatggcacgctggaggagctgctggaggtcatcacgtgggcgcagctgggcatccaccacaagccggtcgggctgctgaacgtggacggctactacaactcgctgctgaccttcatcgacaaggccgtggaggagggcttcatcaaccccagcgcccgccgcatcatcgtgctcgcgcccaccgcgcaggagctcatggacaagctcgaggagtacgagccttaccacgacagggtggcgtccacgctcaactgggagaccacgatggaccacctggcctactgacgcccacgctgccagagccgccagcaggcgactgggacgacatctctgatccatcgatgccattcaggaaacaagcttttagcttgccgtcagattggggcttttgtttcgtttttaactgcatgcagatcggttttatttggagtgccggagggagagagaaaaaaaaaacaggttgattattcggttcgcgtagcaggagtacgtagtacgtgcttgttttgtgtatatggtgccttgtgtttgcttcccaccaacggggatgattgatggcttgcagtgttgtctctgtaccagttcaaaaaaaaaaaacccgaccggtttccccta

SEQ ID NO: 220833 - DNA, 1013 bp, Zea Mays
agccacccgaccctcccccgcctctatataggccatgggtggcgcactcggtgccgggcatcagctgcgctgctcaccaggaaggccatctcatccatccttcattgtattgtagtggcatcaccaggaacagcccagccgcaagaagacagacgacagcagcgagtggggatcggaagaaagaggaagcggagacgaaggtgagagagagaggcaaaagggcagccatgacgatgaagcagtcgaggttcaagaggatctgcgtcttctgtggcagcagccaggggaagaaggcgagctaccatgacgccgccgttgagctcggcaaccagctggttgcccggagcatcgacctggtgtacggcggcggcagcatcgggctcatgggcctcgtctcccaggccgtctacggcggcggacggcacgtcatcggggtcattcccaagacgctcatgacaccagaggtcgggctgctgaacgtggacggctactacaactcgctgctgaccttcatcgacaaggccgtggaggagggcttcatcaaccccagcgcccgccgcatcatcgtgctcgcgcccaccgcgcaggagctcatggacaagctcgaggagtacgagccttaccacgacagggtggcgtccacgctcaactgggagaccacgatggaccacctggcctactgacgcccacgctgccagagccgccagcaggcgactgggacgacatctctgatccatcgatgccattcaggaaacaagcttttagcttgccgtcagattggggcttttgtttcgtttttaactgcatgcagatcggttttatttggagtgccggagggagagagaaaaaaaaaacaggttgattattcggttcgcgtagcaggagtacgtagtacgtgcttgttttgtgtatatggtgccttgtgtttgcttcccaccaacggggatgattgatggcttgcagtgttgtctctgtaccagttcaaaaaaaaaaaacccgaccggtttccccta

SEQ ID NO: 220834 - DNA, 960 bp, Zea Mays
ccaccagccacccgaccctcccccgcctctatataggccatgggtggcgcactcggtgccgggcatcagctgcgctgctcaccaggaaggccatctcatccatccttcattgtattgtagtggcatcaccaggaacagcccagccgcaagaagacagacgacagcagcgagtggggatcggaagaaagaggaagcggagacgaaggtgagagagagaggcaaaagggcagccatgacgatgaagcagtcgaggttcaagaggatctgcgtcttctgtggcagcagccaggggaagaaggcgagctaccatgacgccgccgttgagctcggcaaccagctggagggtatggcacgctggaggagctgctggaggtcatcacgtgggcgcagctgggcatccaccacaagccggtcgggctgctgaacgtggacggctactacaactcgctgctgaccttcatcgacaaggccgtggaggagggcttcatcaaccccagcgcccgccgcatcatcgtgctcgcgcccaccgcgcaggagctcatggacaagctcgaggagtacgagccttaccacgacagggtggcgtccacgctcaactgggagaccacgatggaccacctggcctactgacgcccacgctgccagagccgccagcaggcgactgggacgacatctctgatccatcgatgccattcaggaaacaagcttttagcttgccgtcagattggggcttttgtttcgtttttaactgcatgcagatcggttttatttggagtgccggagggagagagaaaaaaaaaacaggttgattattcggttcgcgtagcaggagtacgtagtacgtgcttgttttgtgtatatggtgccttgtgtttgcttcccaccaacggggatgattgatggcttgcagtgttgtctctgtaccagttcaaaaaaaaaaaacccgaccggtttccccta

SEQ ID NO: 220835 - DNA, 2432 bp, Zea Mays
caaacatgcaaaggattgttacttgtgtcctaaaaaaaggcacaaaaaaatgacattcgtgcccctctactgcctaggttcaccccgattcaactccgacttcgcgagtcgtgtctcacctctatcgccatccgttccctactccacttcaatctgctattcctgctccactccgcttcaatccgccgcccctgctccagtaggaacgttccccaccccggcaaccccccacgctagctactccggagcaccggaacgcaccgtcgcccccgtcaagcaggttgcgccgcccgcccgtggtgccggcgctgtgctggaggcggtggagctggggccgtggggaagcttctcgctggggagagccgggacaagctagagcgacggacatgggtcaccagtaagccacggtcaggggcatttcagtcctacctagcagtggtgatggcaaaaatctaacataatgattgaagtgttatctgaataggaatgctctggtggatttgcagcaagaaaaaccttggaatgaatgtacaagccacttagggtgctgtattagagctgtaacaggatgggttcgttatgctgcgtggcggcacggcctcatggggctagcacagcaagccgggagtggtcctctattagccgtagcgacccaccctggcgtactggtgctggcttctccccacctctgtctagagggtgggagtacaggatcaactcggaagggctgtcttatggatcccatggtgatagtggggtcgctgtgaactatggatcatcactatcatcaaatagtaaaggggctagtaggagctgggagaggaatgagcttccacaagatcaccgctactctacatctgagggtgccatttcgtatctcaacagcccagatatcagcttccagaatcaccatattatgctaccgatgctgcaagattctagtgttgatgaatacatgagagtttcagtcgctgagcctattggttctttattattgtcagagggaatgtcaggtcaacataatagtggtggttccacctcctcttgctctgatggaagcgaatatgatattgtacctaaatcatacacatcaacgccccgcaacttcccaagtcgtcgatcattcctgtcgaagccaatccaccctgtttcatttccagaacatgcactagaagcacaggaaactcgaagtcatgttgcaagcgcaagctccaacaatcctctgtgctctgaatacaagggaacaggagaactttgcttcccggactacggtagcggccgtcacggggagtcaggaaattggagtgctgcaagcagcatggatcttactgatctatcagaacaacccgaagctggacaagctggactactgcgtcctaacaatgcaatgcagaaaacaaggtgcgacctctgcgagaggcttctgacaaagaggtcaccttgtggttctcgtagaatcgtacgcaccggagatttgcctgttgctggtgttctaccatgctcccatgtctaccatgccgagtgtctagagcggaccacacccaaggggcagaagcacgaccctccttgccccgtgtgcgacaagctggctggtaaagataccgagcagtggtcaatctgcaggttgaaaaatgggttcccaaggttccgctcgctaggggaagggccttctcgggttttcagctgcgctgatgctggagattgcgttgctggggccgttcagattccaagatcaaatagcatcgggctattgactcgcagtggtcacaagaggcatgcatcttcgaagggagagcccagcaaagactcggctgagacatcaagaaatgcttgcatgtaacttcctaatgcactcagtaggtcttatgtccatgaccttgcattgttatagttgcaaggtcttatgtccatgacctcgcattgttatagttgcaaggttatgtatgcatgcttacggatgttttcatggcttaatggcgccgctaggaaatgacatagatatgcctgtttatctcctatcatccctggtttgatgacaaggggataggagaggagaggaaatcccttgctattcaaaaaattttcttcaccatggatcccctctaattctcttgtcgccaaactagctctcggttatcaggttgccacttgtgcataatgttgttcagttgtattgtgctggaaatcgcaagtaaactgctcatccagttctatgaaactaccgcaattacctggcccctacagtctacggccctacattgtaacactgtatggttgtaacgctgtcaatattgagacgagatttgacatggaacttggtcgctgctctgtattgatctgtaaaccgaaacgcaaattggatgaggctaggaaagcaaacttttcaggtgctcgatgaacctttcgtagaaggcgatgccattgctttggtt

SEQ ID NO: 220836 - DNA, 1935 bp, Zea Mays
ctgcctaggttcaccccgattcaactccgacttcgcgagtcgtgtctcacctctatcgccatccgttccctactccacttcaatctgctattcctgctccactccgcttcaatccgccgcccctgctccagtaggaacgttccccaccccggcaaccccccacgctagctactccggagcaccggaacgcaccgtcgcccccgtcaagcaggttgcgccgcccgcccgtggtgccggcgctgtgctggaggcggtggagctggggccgtggggaagcttctcgctggggagagccgggacaagctagagcgacggacatgggtcaccagtaagccacggtcaggggcatttcagtcctacctagcagtggtgatggcaaaaatctaacataatgcccagatatcagcttccagaatcaccatattatgctaccgatgctgcaagattctagtgttgatgaatacatgagagtcgctgagcctattggttctttattattgtcagagggaatgtcaggtcaacataatagtggtggttccacctcctcttgctctgatggaagcgaatatgatattgtacctaaatcatacacatcaacgccccgcaacttcccaagtcgtcgatcattcctgtcgaagccaatccaccctgtttcatttccagaacatgcactagaagcacaggaaactcgaagtcatgttgcaagcgcaagctccaacaatcctctgtgctctgaatacaagggaacaggagaactttgcttcccggactacggtagcggccgtcacggggagtcaggaaattggagtgctgcaagcagcatggatcttactgatctatcagaacaacccgaagctggacaagctggactactgcgtcctaacaatgcaatgcagaaaacaaggtgcgacctctgcgagaggcttctgacaaagaggtcaccttgtggttctcgtagaatcgtacgcaccggagatttgcctgttgctggtgttctaccatgctcccatgtctaccatgccgagtgtctagagcggaccacacccaaggggcagaagcacgaccctccttgccccgtgtgcgacaagctggctggtaaagataccgagcagtggtcaatctgcaggttgaaaaatgggttcccaaggttccgctcgctaggggaagggccttctcgggttttcagctgcgctgatgctggagattgcgttgctggggccgttcagattccaagatcaaatagcatcgggctattgactcgcagtggtcacaagaggcatgcatcttcgaagggagagcccagcaaagactcggctgagacatcaagaaatgcttgcatgtaacttcctaatgcactcagtaggtcttatgtccatgaccttgcattgttatagttgcaaggtcttatgtccatgacctcgcattgttatagttgcaaggttatgtatgcatgcttacggatgttttcatggcttaatggcgccgctaggaaatgacatagatatgcctgtttatctcctatcatccctggtttgatgacaaggggataggagaggagaggaaatcccttgctattcaaaaaattttcttcaccatggatcccctctaattctcttgtcgccaaactagctctcggttatcaggttgccacttgtgcataatgttgttcagttgtattgtgctggaaatcgcaagtaaactgctcatccagttctatgaaactaccgcaattacctggcccctacagtctacggccctacattgtaacactgtatggttgtaacgctgtcaatattgagacgagatttgacatggaacttggtcgctgctctgtattgatctgtaaaccgaaacgcaaattggatgaggctaggaaagcaaacttttcaggtgctcgatgaacctttcgtagaaggcgatgccattgctttggtt

SEQ ID NO: 220837 - DNA, 2617 bp, Zea Mays
cccataaacaatcaccccgaagaagaaaatcacgggcagacatcatcagcaacgccggccggcgtcaccgccaccctcccctctcgcggacaccggaaaccatcacatcaaaccggaaaccacccttccctccagaactccagaccattcccttctccctttcctcttctccacgcttcgcccctcgccgactattttaaacccacgcttcttttagttctttcttccccgtcggcttccggagtggaaaccattttcctaccacccgcgggagatccacacgcccacgagcagtggagctcggcagcgaggcttcggagttctgccatggcgtcgtcccacatcatcctgcccaaggaggaggaggaggaggcggctgcggcagcggtggcggaggtcgggttgggagcggcggtggaggcggaccacgaccaccggccgtaccaggagcaggggcccgggaaggcggcgctgccgttctcggcaacgtgcgtccggatctcccgcgactcgtacccgaacctccgcgcgctgcggaacgcgtcgaccatgacactccacgatgatgacgccgccttcgtcaagctcgaggagggcgactacggatacgtgctcgacgacgtcccgcacctcaccgactacctcccggacctccccacttttcctaatcctctgcaagatcatcctgcgtattcaactgtcaagcaatattttgtcaatgcagatgatacagtccctgaaaaggtagttgttcagaagaacagtccacgaggagttcacttccgtcgtgctggacctcgtcagagggtgtattttgagtcagaagaagcgaaagcttgcattgtaacctgtggaggcctttgccctgggctcaatactgtcatcagagagttggtttgtggcttgtcccacatgtacaacgttagcaatgtcttcggaatacagaatgggtacaaggggttctattcgagcaattatcttcccatgacaccaaagagtgtgaatgatatccacaaacgaggtggtacagttcttggaacatcacgaggtggccatgataccaaaaagattgttgacaacattcaagatcgtggaattaatcaggtgttcattataggaggagatggaactcagaagggtgcatatgagatttacaaggaaatccggagacgtggtctacaagtagctgttgctggtattcccaagactattgataatgatatagcggttatagacaagtcatttggttttgatactgctgtagaagaagcccagcgtgccattaatgcagctcatgtggaagcttcaagtgctgaaaatggaataggtttagtgaagcttatgggtcgctatagtggatttattgccatgtatgctactcttgcaagcagagatgtggactgctgcttgattcctgagtcacccttttatttggaaggggagggtggactatttgagtatatagataggaggttgaaggagaacaatcacacggttattgttgtcgcggagggagcaggacaggatcttattgctcaaagtatacctgctgcagatcagcaagatgcatctggaaataagctgcttcttgatgttggtctctggttgactcacaagattaaggattattgcaagagcaagaagatggagatgactattaaatacatagatccaacttacatgatccgtgctattccaagcaatgcatcagacaatgtctattgcaccctgctcgcacatagtgccattcatggtgcaatggcgggatacagctttacagtcggaatggttaatggcaggcatgcatatataccatttcatgcaccgacggcgtcgaagcgcaactcgccgcgccgatactcccacagcagccggcaaccgatggtcctgtgccacaacctgcaagacccgacgtcaacaacgcgacggcacctgatgcaggtgatcaggaggaagcacgaaccacggggaccgacgttgcaggcggaaccctgacgcaggcggaggtgaagccgacacccggaacaaacgtctcgtggcccacgacaccacctgatacgccagagcgcgacgtggcgccggcgcctcgaaccgagcacgcacaggcgaccgagatggaactggacgtcgacaccgcgaggcccgaaggctgcaccacgccgccgccggtgcaggactcggaggggtccgacacgcagagcgccgactgccgcgggagccccatgcatgggatgcaggcaggcgcgagcgtgaagcgggacgatgtggccgcctccaagtcgaggctgttcgcgttccggtccttcacgcgggacaagaagaaggtgatcaagcccgccggggccgcagacacggcatctccagatagtcgcaagacggaggaggcggccgcggagaacaaggagaggcggaagagattctggaagcgatgatggatggggtgtgtgctagtttttgccatgcacgtcacacagcggtgactgcagagttgtttagcaccatgtgtgtaataagtatcatgacaaggtatatataacatgaatttatcgctggttctcttttcgtgtaatattttgtcaacagatgaaaagttacgagcacgacgctggaggaggtg

SEQ ID NO: 220838 - DNA, 1253 bp, Zea Mays
caccatctctcttcctcttcttcctctgcagcaccccgcagaccagacgcaggcacaccgcaccgtgccccctccctgttcatcgcccgcaccccaacaacaaggaacaggccggagtccagccatccgaccttgaatccgcttgccctcctgcttgatcccaccgccacgcgccacctcaatcgcccactcctccctcaccctctagggttccctgccgctcccacaaatcacgcaatcggagacccccggtccgccctccaatgacgaccatgagcgatgatggcgaccgcacctgcccgctctgtgctgaggagatggacatcactgaccagcaactcaagccatgcaaatgcggctatgatatttgtgtttggtgctggcaccacatcatagacatggctgagaaggaggaaacagagggccgctgccctgcctgccgcacacgctatgacaaggataggatcgtcaagatggccgccacttgtgacaggacagtggcagataaaaatgcggagaagaagcaaaaggcccaaagggttaagccaaaggcagcaccaacagcaacaacaacatcaaccgtagaatctaagaagcatcttgctactgtcagggttatccagagaaatctggtgtacataattgggctacctgcgcatttatgcaatgagagcgtacttgagcgcagggagtactttggtcaatatgggaaagttttgaaggtttcagtttcccgtccgactgggcctccctctcagcaggcatcagcaaacagcagtattagtgtgtatgtctctctgaactatacggtgtacatgcatgatctgttcatacttcatatgaatttagatttctactttcagtactggtcaattagcctgatggaatatcaaataactatctactgattctatgcaattgcatgtttcaagtttctaatgctgccttgtaatactggaccattggtattataagaaagtaaattcagacttcaatattgttatgtggttttctattgaacttggtgaaaatgtgataattatgtccatatcgttgcaagcagttcagtcatttaagtttaatctaggctacttagcagtgtgattttcctgcagcctcttgatttgcatagccgtacagcccgtgcttgaaagtaacatttctatcctcattgccgacattaggatatgtattgtattattggtgtgaaattcaaagaatcagatagatgcaagatatctgtttgtgggata

SEQ ID NO: 220839 - DNA, 3111 bp, Zea Mays
ctctgcctggtgcggccaagatacatttgggcttaaactgaatatgggttcggtcgtcggcccacctagttccttatccgtcgtctcctacgcctccatccacactccacagccacgccacagtcgttgcccaccacccagagcacgcggcggcttgtcgccgtgcgcgccgccaccatcaccacacgaggcgccggagaaagacatcaagcgcacgcccatggccatgactcctcacgcctcggcggccaccgtagccgttacccctgcgttgcgctttccccacactttgtctgccacgggcctctcctcaccgcctctggctgggggctgcggcggctgccgggttcggttccggcccagccagcgcggccgaggcacgcaggggcggcgaggtggctctcacgtgtcgcgcgtggggggcctgctgggcaccgtattcggcgggggcggccgcgacgacggggaggccacgcggaagaagtacgcagacaccgtggcgcgtatcaactccatggagctcgaggtctccgcgctctcagacgctgatttgcgtgcacgcaccgctgcgctccaggaccgtgctcgctccggggaatccctggattcccttctccccgaagcatttgctgttgtgagggaggcttccaagagagttctaggcctccggccctttgatgtgcagttgattggtggtatggttctgcacaagggggagattgctgaaatgaagaccggagaggggaagactcttgtggccattctgccagcatacttaaatgctttgagtgggaaaggagtgcatgttgtcactgtaaatgattatctcgcaagacgtgattgtgagtgggttggtcaagtcccccgatttctaggactgcaggttggcttaattcaacagaacatgacacctgagcaaaggagggaaaattactcatatgatattacttatgtcacaaacagtgagcttggttttgattatctaagagataaccttgcaatgactgtagatgaacttgtcttgaggaacttcaattactgtgtgatagatgaagttgattcaatccttattgatgaagcaagaacacctcttataatatcaggcctagctgaaaagccaagtgatcggtattacaaagcagcaaaaatagctgaagcttttgagcgagacattcattacacggtggatgaaaagcagagaaacgttttacttacagaagaaggttatgctgatgctgaagaaatactggacatagatgatctgtacgatcctcgtgaacagtgggcttcgtatattctaaatgcaatcaaggctaaggagctcttccttaaagatgtcaattacattgttcgtagcaaggaagtgcttattgtagatgagtttactggcagagttatggcgggcaggcgatggagtgatggtctccatcaagcaattgaagcaaaagaaggtgtacctatacaaaatgaaaccataactctcgcatcaataagttaccaaaacttctttcttcagttccccaaactatgtggcatgactggaactgcagctacagagacccaagagtttgagagcatatataaacttaaagttactgttgtcccaacaaacaagccaatgatacggaaggatgactcagatgttgttttcagagcaacaaatggaaaatggcgtgctgttcttgttgagatatcaagaatgaataaagttggccgtcctgtgcttgttggtaccaccagtgttgagcaaagcgaatctttatcaaagcaattgcgtgaagctgggattcctcacgaggtcctgaatgctaagccagagaatgttgagagggaggcagagatcgtagctcagagtggacgccttggtgctgtgacaattgctaccaatatggcgggacgtggaactgatattatccttggtggcaatgcagaattcatggccaggttgaagttgcgtgagatccttatgccaagagtcgtcaatccaatagatggtgttattgtatccaaaaagcagatgccaccaagaaagacatggaagacaaatgaaagcttgttcccatgtgaactttcaaaagaaacattatcgtctgtcaaggatacagttgaaatggctgtcaaagaatggggagataaatcattaactgaactggaagcagaagagcggctgtcctattcatgtgagaagggaccaacacgtgatgaagtaatagcgaatttgagaaatgcatttgtgaagatagcagacgaatataaagtttacactgaggaggaaaagcagaaggtcattacagtaggtgggcttcacgtagtaggaacagagcgccatgaatcacgcagaattgacaatcagctccgtggtcgaagtggaagacagggggatcctggaagctctcgcttctttcttagtctcgaggataatattttccggatctttggaggtgacaggatacagggtctgatgcaagcattccgagttgaagatcttcctatcgaatcgaaaatgctaacgagggctctagatgaagcgcagcggaaagttgagaattacttttttgacatcaggaagcagttgtttgagtatgatgaggtattgaatagccagagagatcgtgtatatgcggaaagaagacgtgctcttgcatctgacagtcttcaatcacttattgtggaatatgctgaattgacaatggacgacatattaggggctaacataggacctgatactccaaaggaaaattgggacctgaacaaacttatagctaagctgcaacagtattgccatctgttggatgacttgacaccagaattgttggagggcaaaagctcaagctacgacgatttgcgggagtacctgcgtaagcgagggcgtgaagcttacttccagaaaactgttagttatttctccttttcctttcatggatattgttttttcgcatggttcaaaggttttaagaagttcaacaacaacaacatcaacatagccttttagtcccaaacaagttggggtaggctagagttgaaacccaacaagaagtcaccaaaaagagaaagagagagaaaggggaggggaaaaagtttttgagagaactaaaagggaaaaggcctaat

SEQ ID NO: 220840 - DNA, 2960 bp, Zea Mays
ctacgcctccatccacactccacagccacgccacagtcgttgcccaccacccagagcacgcggcggcttgtcgccgtgcgcgccgccaccatcaccacacgaggcgccggagaaagacatcaagcgcacgcccatggccatgactcctcacgcctcggcggccaccgtagccgttacccctgcgttgcgctttccccacactttgtctgccacgggcctctcctcaccgcctctggctgggggctgcggcggctgccgggttcggttccggcccagccagcgcggccgaggcacgcaggggcggcgaggtggctctcacgtgtcgcgcgtggggggcctgctgggcaccgtattcggcgggggcggccgcgacgacggggaggccacgcggaagaagtacgcagacaccgtggcgcgtatcaactccatggagctcgaggtctccgcgctctcagacgctgatttgcgtgcacgcaccgctgcgctccaggaccgtgctcgctccggggaatccctggattcccttctccccgaagcatttgctgttgtgagggaggcttccaagagagttctaggcctccggccctttgatgtgcagttgattggtggtatggttctgcacaagggggagattgctgaaatgaagaccggagaggggaagactcttgtggccattctgccagcatacttaaatgctttgagtgggaaaggagtgcatgttgtcactgtaaatgattatctcgcaagacgtgattgtgagtgggttggtcaagtcccccgatttctaggactgcaggttggcttaattcaacagaacatgacacctgagcaaaggagggaaaattactcatatgatattacttatgtcacaaacagtgagcttggttttgattatctaagagataaccttgcaatgactgtagatgaacttgtcttgaggaacttcaattactgtgtgatagatgaagttgattcaatccttattgatgaagcaagaacacctcttataatatcaggcctagctgaaaagccaagtgatcggtattacaaagcagcaaaaatagctgaagcttttgagcgagacattcattacacggtggatgaaaagcagagaaacgttttacttacagaagaaggttatgctgatgctgaagaaatactggacatagatgatctgtacgatcctcgtgaacagtgggcttcgtatattctaaatgcaatcaaggctaaggagctcttccttaaagatgtcaattacattgttcgtagcaaggaagtgcttattgtagatgagtttactggcagagttatggcgggcaggcgatggagtgatggtctccatcaagcaattgaagcaaaagaaggtgtacctatacaaaatgaaaccataactctcgcatcaataagttaccaaaacttctttcttcagttccccaaactatgtggcatgactggaactgcagctacagagacccaagagtttgagagcatatataaacttaaagttactgttgtcccaacaaacaagccaatgatacggaaggatgactcagatgttgttttcagagcaacaaatggaaaatggcgtgctgttcttgttgagatatcaagaatgaataaagttggccgtcctgtgcttgttggtaccaccagtgttgagcaaagcgaatctttatcaaagcaattgcgtgaagctgggattcctcacgaggtcctgaatgctaagccagagaatgttgagagggaggcagagatcgtagctcagagtggacgccttggtgctgtgacaattgctaccaatatggcgggacgtggaactgatattatccttggtggcaatgcagaattcatggccaggttgaagttgcgtgagatccttatgccaagagtcgtcaatccaatagatggtgttattgtatccaaaaagcagatgccaccaagaaagacatggaagttgaaatggctgtcaaagaatggggagataaatcattaactgaactggaagcagaagagcggctgtcctattcatgtgagaagggaccaacacgtgatgaagtaatagcgaatttgagaaatgcatttgtgaagatagcagacgaatataaagtttacactgaggaggaaaagcagaaggtcattacagtaggtgggcttcacgtagtaggaacagagcgccatgaatcacgcagaattgacaatcagctccgtggtcgaagtggaagacagggggatcctggaagctctcgcttctttcttagtctcgaggataatattttccggatctttggaggtgacaggatacagggtctgatgcaagcattccgagttgaagatcttcctatcgaatcgaaaatgctaacgagggctctagatgaagcgcagcggaaagttgagaattacttttttgacatcaggaagcagttgtttgagtatgatgaggtattgaatagccagagagatcgtgtatatgcggaaagaagacgtgctcttgcatctgacagtcttcaatcacttattgtggaatatgctgaattgacaatggacgacatattaggggctaacataggacctgatactccaaaggaaaattgggacctgaacaaacttatagctaagctgcaacagtattgccatctgttggatgacttgacaccagaattgttggagggcaaaagctcaagctacgacgatttgcgggagtacctgcgtaagcgagggcgtgaagcttacttccagaaaactgttagttatttctccttttcctttcatggatattgttttttcgcatggttcaaaggttttaagaagttcaacaacaacaacatcaacatagccttttagtcccaaacaagttggggtaggctagagttgaaacccaacaagaagtcaccaaaaagagaaagagagagaaaggggaggggaaaaagtttttgagagaactaaaagggaaaaggcctaat

SEQ ID NO: 220841 - DNA, 2991 bp, Zea Mays
ccacactccacagccacgccacagtcgttgcccaccacccagagcacgcggcggcttgtcgccgtgcgcgccgccaccatcaccacacgaggcgccggagaaagacatcaagcgcacgcccatggccatgactcctcacgcctcggcggccaccgtagccgttacccctgcgttgcgctttccccacactttgtctgccacgggcctctcctcaccgcctctggctgggggctgcggcggctgccgggttcggttccggcccagccagcgcggccgaggcacgcaggggcggcgaggtggctctcacgtgtcgcgcgtggggggcctgctgggcaccgtattcggcgggggcggccgcgacgacggggaggccacgcggaagaagtacgcagacaccgtggcgcgtatcaactccatggagctcgaggtctccgcgctctcagacgctgatttgcgtgcacgcaccgctgcgctccaggaccgtgctcgctccggggaatccctggattcccttctccccgaagcatttgctgttgtgagggaggcttccaagagagttctaggcctccggccctttgatgtgcagttgattggtggtatggttctgcacaagggggagattgctgaaatgaagaccggagaggggaagactcttgtggccattctgccagcatacttaaatgctttgagtgggaaaggagtgcatgttgtcactgtaaatgattatctcgcaagacgtgattgtgagtgggttggtcaagtcccccgatttctaggactgcagagaacatgacacctgagcaaaggagggaaaattactcatatgatattacttatgtcacaaacagtgagcttggttttgattatctaagagataaccttgcaatgactgtagatgaacttgtcttgaggaacttcaattactgtgtgatagatgaagttgattcaatccttattgatgaagcaagaacacctcttataatatcaggcctagctgaaaagccaagtgatcggtattacaaagcagcaaaaatagctgaagcttttgagcgagacattcattacacggtggatgaaaagcagagaaacgttttacttacagaagaaggttatgctgatgctgaagaaatactggacatagatgatctgtacgatcctcgtgaacagtgggcttcgtatattctaaatgcaatcaaggctaaggagctcttccttaaagatgtcaattacattgttcgtagcaaggaagtgcttattgtagatgagtttactggcagagttatggcggcgatggagtgatggtctccatcaagcaattgaagcaaaagaaggtgtacctatacaaaatgaaaccataactctcgcatcaataagttaccaaaacttctttcttcagttccccaaactatgtggcatgactggaactgcagctacagagacccaagagtttgagagcatatataaacttaaagttactgttgtcccaacaaacaagccaatgatacggaaggatgactcagatgttgttttcagagcaacaaatggaaaatggcgtgctgttcttgttgagatatcaagaatgaataaagttggccgtcctgtgcttgttggtaccaccagtgttgagcaaagcgaatctttatcaaagcaattgcgtgaagctgggattcctcacgaggtcctgaatgctaagccagagaatgttgagagggaggcagagatcgtagctcagagtggacgccttggtgctgtgacaattgctaccaatatggcgggacgtggaactgatattatccttggtggcaatgcagaattcatggccaggttgaagttgcgtgagatccttatgccaagagtcgtcaatccaatagatggtgttattgtatccaaaaagcagatgccaccaagaaagacatggaagacaaatgaaagcttgttcccatgtgaactttcaaaagaaacattatcgtctgtcaaggatacagttgaaatggctgtcaaagaatggggagataaatcattaactgaactggaagcagaagagcggctgtcctattcatgtgagaagggaccaacacgtgatgaagtaatagcgaatttgagaaatgcatttgtgaagatagcagacgaatataaagtttacactgaggaggaaaagcagaaggtcattacagtaggtgggcttcacgtagtaggaacagagcgccatgaatcacgcagaattgacaatcagctccgtggtcgaagtggaagacagggggatcctggaagctctcgcttctttcttagtctcgaggataatattttccggatctttggaggtgacaggatacagggtctgatgcaagcattccgagttgaagatcttcctatcgaatcgaaaatgctaacgagggctctagatgaagcgcagcggaaagttgagaattacttttttgacatcaggaagcagttgtttgagtatgatgaggtattgaatagccagagagatcgtgtatatgcggaaagaagacgtgctcttgcatctgacagtcttcaatcacttattgtggaatatgctgaattgacaatggacgacatattaggggctaacataggacctgatactccaaaggaaaattgggacctgaacaaacttatagctaagctgcaacagtattgccatctgttggatgacttgacaccagaattgttggagggcaaaagctcaagctacgacgatttgcgggagtacctgcgtaagcgagggcgtgaagcttacttccagaaaactgttagttatttctccttttcctttcatggatattgttttttcgcatggttcaaaggttttaagaagttcaacaacaacaacatcaacatagccttttagtcccaaacaagttggggtaggctagagttgaaacccaacaagaagtcaccaaaaagagaaagagagagaaaggggaggggaaaaagtttttgagagaactaaaagggaaaaggcctaat

SEQ ID NO: 220842 - DNA, 3014 bp, Zea Mays
ccacactccacagccacgccacagtcgttgcccaccacccagagcacgcggcggcttgtcgccgtgcgcgccgccaccatcaccacacgaggcgccggagaaagacatcaagcgcacgcccatggccatgactcctcacgcctcggcggccaccgtagccgttacccctgcgttgcgctttccccacactttgtctgccacgggcctctcctcaccgcctctggctgggggctgcggcggctgccgggttcggttccggcccagccagcgcggccgaggcacgcaggggcggcgaggtggctctcacgtgtcgcgcgtggggggcctgctgggcaccgtattcggcgggggcggccgcgacgacggggaggccacgcggaagaagtacgcagacaccgtggcgcgtatcaactccatggagctcgaggtctccgcgctctcagacgctgatttgcgtgcacgcaccgctgcgctccaggaccgtgctcgctccggggaatccctggattcccttctccccgaagcatttgctgttgtgagggaggcttccaagagagttctaggcctccggccctttgatgtgcagttgattggtggtatggttctgcacaagggggagattgctgaaatgaagaccggagaggggaagactcttgtggccattctgccagcatacttaaatgctttgagtgggaaaggagtgcatgttgtcactgtaaatgattatctcgcaagacgtgattgtgagtgggttggtcaagtcccccgatttctaggactgcaggttggcttaattcaacagaacatgacacctgagcaaaggagggaaaattactcatatgatattacttatgtcacaaacagtgagcttggttttgattatctaagagataaccttgcaatgactgtagatgaacttgtcttgaggaacttcaattactgtgtgatagatgaagttgattcaatccttattgatgaagcaagaacacctcttataatatcaggcctagctgaaaagccaagtgatcggtattacaaagcagcaaaaatagctgaagcttttgagcgagacattcattacacggtggatgaaaagcagagaaacgttttacttacagaagaaggttatgctgatgctgaagaaatactggacatagatgatctgtacgatcctcgtgaacagtgggcttcgtatattctaaatgcaatcaaggctaaggagctcttccttaaagatgtcaattacattgttcgtagcaaggaagtgcttattgtagatgagtttactggcagagttatggcgggcaggcgatggagtgatggtctccatcaagcaattgaagcaaaagaaggtgtacctatacaaaatgaaaccataactctcgcatcaataagttaccaaaacttctttcttcagttccccaaactatgtggcatgactggaactgcagctacagagacccaagagtttgagagcatatataaacttaaagttactgttgtcccaacaaacaagccaatgatacggaaggatgactcagatgttgttttcagagcaacaaatggaaaatggcgtgctgttcttgttgagatatcaagaatgaataaagttggccgtcctgtgcttgttggtaccaccagtgttgagcaaagcgaatctttatcaaagcaattgcgtgaagctgggattcctcacgaggtcctgaatgctaagccagagaatgttgagagggaggcagagatcgtagctcagagtggacgccttggtgctgtgacaattgctaccaatatggcgggacgtggaactgatattatccttggtggcaatgcagaattcatggccaggttgaagttgcgtgagatccttatgccaagagtcgtcaatccaatagatggtgttattgtatccaaaaagcagatgccaccaagaaagacatggaagagacaaatgaaagcttgttcccatgtgaactttcaaaagaaacattatcgtctgtcaaggatacagttgaaatggctgtcaaagaatggggagataaatcattaactgaactggaagcagaagagcggctgtcctattcatgtgagaagggaccaacacgtgatgaagtaatagcgaatttgagaaatgcatttgtgaagatagcagacgaatataaagtttacactgaggaggaaaagcagaaggtcattacagtaggtgggcttcacgtagtaggaacagagcgccatgaatcacgcagaattgacaatcagctccgtggtcgaagtggaagacagggggatcctggaagctctcgcttctttcttagtctcgaggataatattttccggatctttggaggtgacaggatacagggtctgatgcaagcattccgagttgaagatcttcctatcgaatcgaaaatgctaacgagggctctagatgaagcgcagcggaaagttgagaattacttttttgacatcaggaagcagttgtttgagtatgatgaggtattgaatagccagagagatcgtgtatatgcggaaagaagacgtgctcttgcatctgacagtcttcaatcacttattgtggaatatgctgaattgacaatggacgacatattaggggctaacataggacctgatactccaaaggaaaattgggacctgaacaaacttatagctaagctgcaacagtattgccatctgttggatgacttgacaccagaattgttggagggcaaaagctcaagctacgacgatttgcgggagtacctgcgtaagcgagggcgtgaagcttacttccagaaaactgttagttatttctccttttcctttcatggatattgttttttcgcatggttcaaaggttttaagaagttcaacaacaacaacatcaacatagccttttagtcccaaacaagttggggtaggctagagttgaaacccaacaagaagtcaccaaaaagagaaagagagagaaaggggaggggaaaaagtttttgagagaactaaaagggaaaaggcctaat

SEQ ID NO: 220843 - DNA, 2798 bp, Zea Mays
ccacactccacagccacgccacagtcgttgcccaccacccagagcacgcggcggcttgtcgccgtgcgcgccgccaccatcaccacacgaggcgccggagaaagacatcaagcgcacgcccatggccatgactcctcacgcctcggcggccaccgtagccgttacccctgcgttgcgctttccccacactttgtctgccacgggcctctcctcaccgcctctggctgggggctgcggcggctgccgggttcggttccggcccagccagcgcggccgaggcacgcaggggcggcgaggtggctctcacgtgtcgcgcgtggggggcctgctgggcaccgtattcggcgggggcggccgcgacgacggggaggccacgcggaagaagtacgcagacaccgtggcgcgtatcaactccatggagctcgaggtctccgcgctctcagacgctgatttgcgtgcacgcaccgctgcgctccaggaccgtgctcgctccggggaatccctggattcccttctccccgaagcatttgctgttgtgagggaggcttccaagagagttctaggcctccggccctttgatgtgcagttgattggtggtatggttctgcacaagggggagattgctgaaatgaagaccggagaggggaagactcttgtggccattctgccagcatacttaaatgctttgagtgggaaaggagtgcatgttgtcactgtaaatgattatctcgcaagacgtgattgtgagtgggttggtcaagtcccccgatttctaggactgcaggttggcttaattcaacagaacatgacacctgagcaaaggagggaaaattactcatatgatattacttatgtcacaaacagtgagcttggttttgattatctaagagataaccttgcaatgactgtagatgaacttgtcttgaggaacttcaattactgtgtgatagatgaagttgattcaatccttattgatgaagcaagaacacctcttataatatcaggcctagctgaaaagccaagtgatcggtattacaaagcagcaaaaatagctgaagcttttgagcgagacattcattacacggtggatgaaaagcagagaaacgttttacttacagaagaaggttatgctgatgctgaagaaatactggacatagatgatctgtacgatcctcgtgaacagtgggcttcgtatattctaaatgcaatcaaggctaaggagctcttccttaaagatgtcaattacattgttcgtagcaaggaagtgcttattgtagatgagtttactggcagagttatggcgggcaggcgatggagtgatggtctccatcaagcaattgaagcaaaagaaggtgtacctatacaaaatgaaaccataactctcgcatcaataagttaccaaaacttctttcttcagttccccaaactatgtggcatgactggaactgcagctacagagacccaagagtttgagagcatatataaacttaaagttactgttgtcccaacaaacaagccaatgatacggaaggatgactcagatgttgttttcagagcaacaaatggaaaatggcgtgctgttcttgttgagatatcaagaatgaataaagttggccgtcctgtgcttgttggtaccaccagtgttgagcaaagcgaatctttatcaaagcaattgcgtgaagctgggattcctcacgaggtcctgaatgctaagccagagaatgttgagagggaggcagagatcgtagctcagagtggacgccttggtgctgtgacaattgctaccaatatggcgggacgtggaactgatattatccttggtggcaatgcagaattcatggccaggttgaagttgcgtgagatccttatgccaagggaccaacacgtgatgaagtaatagcgaatttgagaaatgcatttgtgaagatagcagacgaatataaagtttacactgaggaggaaaagcagaaggtcattacagtaggtgggcttcacgtagtaggaacagagcgccatgaatcacgcagaattgacaatcagctccgtggtcgaagtggaagacagggggatcctggaagctctcgcttctttcttagtctcgaggataatattttccggatctttggaggtgacaggatacagggtctgatgcaagcattccgagttgaagatcttcctatcgaatcgaaaatgctaacgagggctctagatgaagcgcagcggaaagttgagaattacttttttgacatcaggaagcagttgtttgagtatgatgaggtattgaatagccagagagatcgtgtatatgcggaaagaagacgtgctcttgcatctgacagtcttcaatcacttattgtggaatatgctgaattgacaatggacgacatattaggggctaacataggacctgatactccaaaggaaaattgggacctgaacaaacttatagctaagctgcaacagtattgccatctgttggatgacttgacaccagaattgttggagggcaaaagctcaagctacgacgatttgcgggagtacctgcgtaagcgagggcgtgaagcttacttccagaaaactgttagttatttctccttttcctttcatggatattgttttttcgcatggttcaaaggttttaagaagttcaacaacaacaacatcaacatagccttttagtcccaaacaagttggggtaggctagagttgaaacccaacaagaagtcaccaaaaagagaaagagagagaaaggggaggggaaaaagtttttgagagaactaaaagggaaaaggcctaat

SEQ ID NO: 220844 - DNA, 3022 bp, Zea Mays
ccacactccacagccacgccacagtcgttgcccaccacccagagcacgcggcggcttgtcgccgtgcgcgccgccaccatcaccacacgaggcgccggagaaagacatcaagcgcacgcccatggccatgactcctcacgcctcggcggccaccgtagccgttacccctgcgttgcgctttccccacactttgtctgccacgggcctctcctcaccgcctctggctgggggctgcggcggctgccgggttcggttccggcccagccagcgcggccgaggcacgcaggggcggcgaggtggctctcacgtgtcgcgcgtggggggcctgctgggcaccgtattcggcgggggcggccgcgacgacggggaggccacgcggaagaagtacgcagacaccgtggcgcgtatcaactccatggagctcgaggtctccgcgctctcagacgctgatttgcgtgcacgcaccgctgcgctccaggaccgtgctcgctccggggaatccctggattcccttctccccgaagcatttgctgttgtgagggaggcttccaagagagttctaggcctccggccctttgatgtgcagttgattggtggtatggttctgcacaagggggagattgctgaaatgaagaccggagaggggaagactcttgtggccattctgccagcatacttaaatgctttgagtgggaaaggagtgcatgttgtcactgtaaatgattatctcgcaagacgtgattgtgagtgggttggtcaagtcccccgatttctaggactgcaggttggcttaattcaacagaacatgacacctgagcaaaggagggaaaattactcatatgatattacttatgtcacaaacagtgagcttggttttgattatctaagagataaccttgcaatgactgtagatgaacttgtcttgaggaacttcaattactgtgtgatagatgaagttgattcaatccttattgatgaagcaagaacacctcttataatatcaggcctagctgaaaagccaagtgatcggtattacaaagcagcaaaaatagctgaagcttttgagcgagacattcattacacggtggatgaaaagcagagaaacgttttacttacagaagaaggttatgctgatgctgaagaaatactggacatagatgatctgtacgatcctcgtgaacagtgggcttcgtatattctaaatgcaatcaaggctaaggagctcttccttaaagatgtcaattacattgttcgtagcaaggaagtgcttattgtagatgagtttactggcagagttatggcgggcaggcgatggagtgatggtctccatcaagcaattgaagcaaaagaaggtgtacctatacaaaatgaaaccataactctcgcatcaataagttaccaaaacttctttcttcagttccccaaactatgtggcatgactggaactgcagctacagagacccaagagtttgagagcatatataaacttaaagttactgttgtcccaacaaacaagccaatgatacggaaggatgactcagatgttgttttcagagcaacaaatggaaaatggcgtgctgttcttgttgagatatcaagaatgaataaagttggccgtcctgtgcttgttggtaccaccagtgttgagcaaagcgaatctttatcaaagcaattgcgtgaagctgggattcctcacgaggtcctgaatgctaagccagagaatgttgagagggaggcagagatcgtagctcagagtggacgccttggtgctgtgacaattgctaccaatatggcgggacgtggaactgatattatccttggtggcaatgcagaattcatggccaggttgaagttgcgtgagatccttatgccaagagtcgtcaatccaatagatggtgttattgtatccaaaaagcagatgccaccaagaaagacatggaagacaaatgaaagcttgttcccatgtgaactttcaaaagaaacattatcgtctgtcaaggatacagttgaaatggctgtcaaagaatggggagataaatcattaactgaactggaagcagaagagcggctgtcctattcatgtgagaagggaccaacacgtgatgaagtaatagcgaatttgagaaatgcatttgtgaagatagcagacgaatataaagtttacactgaggaggaaaagcagaaggtcattacagtaggtgggcttcacgtagtaggaacagagcgccatgaatcacgcagaattgacaatcagctccgtggtcgaagtggaagacagggggatcctggaagctctcgcttctttcttagtctcgaggataatattttccggatctttggaggtgacaggatacagggtctgatgcaagcattccgagttgaagatcttcctatcgaatcgaaaatgctaacgagggctctagatgaagcgcagcggaaagttgagaattacttttttgacatcaggaagcagttgtttgagtatgatgaggtattgaatagccagagagatcgtgtatatgcggaaagaagacgtgctcttgcatctgacagtcttcaatcacttattgtggaatatgctgaattgacaatggacgacatattaggggttggttatggctaacataggacctgatactccaaaggaaaattgggacctgaacaaacttatagctaagctgcaacagtattgccatctgttggatgacttgacaccagaattgttggagggcaaaagctcaagctacgacgatttgcgggagtacctgcgtaagcgagggcgtgaagcttacttccagaaaactgttagttatttctccttttcctttcatggatattgttttttcgcatggttcaaaggttttaagaagttcaacaacaacaacatcaacatagccttttagtcccaaacaagttggggtaggctagagttgaaacccaacaagaagtcaccaaaaagagaaagagagagaaaggggaggggaaaaagtttttgagagaactaaaagggaaaaggcctaat

SEQ ID NO: 220845 - DNA, 2996 bp, Zea Mays
ccacactccacagccacgccacagtcgttgcccaccacccagagcacgcggcggcttgtcgccgtgcgcgccgccaccatcaccacacgaggcgccggagaaagacatcaagcgcacgcccatggccatgactcctcacgcctcggcggccaccgtagccgttacccctgcgttgcgctttccccacactttgtctgccacgggcctctcctcaccgcctctggctgggggctgcggcggctgccgggttcggttccggcccagccagcgcggccgaggcacgcaggggcggcgaggtggctctcacgtgtcgcgcgtggggggcctgctgggcaccgtattcggcgggggcggccgcgacgacggggaggccacgcggaagaagtacgcagacaccgtggcgcgtatcaactccatggagctcgaggtctccgcgctctcagacgctgatttgcgtgcacgcaccgctgcgctccaggaccgtgctcgctccggggaatccctggattcccttctccccgaagcatttgctgttgtgagggaggcttccaagagagttctaggcctccggccctttgatgtgcagttgattggtggtatggttctgcacaagggggagattgctgaaatgaagaccggagaggggaagactcttgtggccattctgccagcatacttaaatgctttgagtgggaaaggagtgcatgttgtcactgtaaatgattatctcgcaagacgtgattgtgagtgggttggtcaagtcccccgatttctaggactgcagagaacatgacacctgagcaaaggagggaaaattactcatatgatattacttatgtcacaaacagtgagcttggttttgattatctaagagataaccttgcaatgactgtagatgaacttgtcttgaggaacttcaattactgtgtgatagatgaagttgattcaatccttattgatgaagcaagaacacctcttataatatcaggcctagctgaaaagccaagtgatcggtattacaaagcagcaaaaatagctgaagcttttgagcgagacattcattacacggtggatgaaaagcagagaaacgttttacttacagaagaaggttatgctgatgctgaagaaatactggacatagatgatctgtacgatcctcgtgaacagtgggcttcgtatattctaaatgcaatcaaggctaaggagctcttccttaaagatgtcaattacattgttcgtagcaaggaagtgcttattgtagatgagtttactggcagagttatggcgggcaggcgatggagtgatggtctccatcaagcaattgaagcaaaagaaggtgtacctatacaaaatgaaaccataactctcgcatcaataagttaccaaaacttctttcttcagttccccaaactatgtggcatgactggaactgcagctacagagacccaagagtttgagagcatatataaacttaaagttactgttgtcccaacaaacaagccaatgatacggaaggatgactcagatgttgttttcagagcaacaaatggaaaatggcgtgctgttcttgttgagatatcaagaatgaataaagttggccgtcctgtgcttgttggtaccaccagtgttgagcaaagcgaatctttatcaaagcaattgcgtgaagctgggattcctcacgaggtcctgaatgctaagccagagaatgttgagagggaggcagagatcgtagctcagagtggacgccttggtgctgtgacaattgctaccaatatggcgggacgtggaactgatattatccttggtggcaatgcagaattcatggccaggttgaagttgcgtgagatccttatgccaagagtcgtcaatccaatagatggtgttattgtatccaaaaagcagatgccaccaagaaagacatggaagacaaatgaaagcttgttcccatgtgaactttcaaaagaaacattatcgtctgtcaaggatacagttgaaatggctgtcaaagaatggggagataaatcattaactgaactggaagcagaagagcggctgtcctattcatgtgagaagggaccaacacgtgatgaagtaatagcgaatttgagaaatgcatttgtgaagatagcagacgaatataaagtttacactgaggaggaaaagcagaaggtcattacagtaggtgggcttcacgtagtaggaacagagcgccatgaatcacgcagaattgacaatcagctccgtggtcgaagtggaagacagggggatcctggaagctctcgcttctttcttagtctcgaggataatattttccggatctttggaggtgacaggatacagggtctgatgcaagcattccgagttgaagatcttcctatcgaatcgaaaatgctaacgagggctctagatgaagcgcagcggaaagttgagaattacttttttgacatcaggaagcagttgtttgagtatgatgaggtattgaatagccagagagatcgtgtatatgcggaaagaagacgtgctcttgcatctgacagtcttcaatcacttattgtggaatatgctgaattgacaatggacgacatattaggggctaacataggacctgatactccaaaggaaaattgggacctgaacaaacttatagctaagctgcaacagtattgccatctgttggatgacttgacaccagaattgttggagggcaaaagctcaagctacgacgatttgcgggagtacctgcgtaagcgagggcgtgaagcttacttccagaaaactgttagttatttctccttttcctttcatggatattgttttttcgcatggttcaaaggttttaagaagttcaacaacaacaacatcaacatagccttttagtcccaaacaagttggggtaggctagagttgaaacccaacaagaagtcaccaaaaagagaaagagagagaaaggggaggggaaaaagtttttgagagaactaaaagggaaaaggcctaat

SEQ ID NO: 220846 - DNA, 3007 bp, Zea Mays
ccacactccacagccacgccacagtcgttgcccaccacccagagcacgcggcggcttgtcgccgtgcgcgccgccaccatcaccacacgaggcgccggagaaagacatcaagcgcacgcccatggccatgactcctcacgcctcggcggccaccgtagccgttacccctgcgttgcgctttccccacactttgtctgccacgggcctctcctcaccgcctctggctgggggctgcggcggctgccgggttcggttccggcccagccagcgcggccgaggcacgcaggggcggcgaggtggctctcacgtgtcgcgcgtggggggcctgctgggcaccgtattcggcgggggcggccgcgacgacggggaggccacgcggaagaagtacgcagacaccgtggcgcgtatcaactccatggagctcgaggtctccgcgctctcagacgctgatttgcgtgcacgcaccgctgcgctccaggaccgtgctcgctccggggaatccctggattcccttctccccgaagcatttgctgttgtgagggaggcttccaagagagttctaggcctccggccctttgatgtgcagttgattggtggtatggttctgcacaagggggagattgctgaaatgaagaccggagaggggaagactcttgtggccattctgccagcatacttaaatgctttgagtgggaaaggagtgcatgttgtcactgtaaatgattatctcgcaagacgtgattgtgagtgggttggtcaagtcccccgatttctaggactgcaggttggcttaattcaacagaacatgacacctgagcaaaggagggaaaattactcatatgatattacttatgtcacaaacagtgagcttggttttgattatctaagagataaccttgcaatgactgtagatgaacttgtcttgaggaacttcaattactgtgtgatagatgaagttgattcaatccttattgatgaagcaagaacacctcttataatatcaggcctagctgaaaagccaagtgatcggtattacaaagcagcaaaaatagctgaagcttttgagcgagacattcattacacggtggatgaaaagcagagaaacgttttacttacagaagaaggttatgctgatgctgaagaaatactggacatagatgatctgtacgatcctcgtgaacagtgggcttcgtatattctaaatgcaatcaaggctaaggagctcttccttaaagatgtcaattacattgttcgtagcaaggaagtgcttattgtagatgagtttactggcagagttatggcggcgatggagtgatggtctccatcaagcaattgaagcaaaagaaggtgtacctatacaaaatgaaaccataactctcgcatcaataagttaccaaaacttctttcttcagttccccaaactatgtggcatgactggaactgcagctacagagacccaagagtttgagagcatatataaacttaaagttactgttgtcccaacaaacaagccaatgatacggaaggatgactcagatgttgttttcagagcaacaaatggaaaatggcgtgctgttcttgttgagatatcaagaatgaataaagttggccgtcctgtgcttgttggtaccaccagtgttgagcaaagcgaatctttatcaaagcaattgcgtgaagctgggattcctcacgaggtcctgaatgctaagccagagaatgttgagagggaggcagagatcgtagctcagagtggacgccttggtgctgtgacaattgctaccaatatggcgggacgtggaactgatattatccttggtggcaatgcagaattcatggccaggttgaagttgcgtgagatccttatgccaagagtcgtcaatccaatagatggtgttattgtatccaaaaagcagatgccaccaagaaagacatggaagacaaatgaaagcttgttcccatgtgaactttcaaaagaaacattatcgtctgtcaaggatacagttgaaatggctgtcaaagaatggggagataaatcattaactgaactggaagcagaagagcggctgtcctattcatgtgagaagggaccaacacgtgatgaagtaatagcgaatttgagaaatgcatttgtgaagatagcagacgaatataaagtttacactgaggaggaaaagcagaaggtcattacagtaggtgggcttcacgtagtaggaacagagcgccatgaatcacgcagaattgacaatcagctccgtggtcgaagtggaagacagggggatcctggaagctctcgcttctttcttagtctcgaggataatattttccggatctttggaggtgacaggatacagggtctgatgcaagcattccgagttgaagatcttcctatcgaatcgaaaatgctaacgagggctctagatgaagcgcagcggaaagttgagaattacttttttgacatcaggaagcagttgtttgagtatgatgaggtattgaatagccagagagatcgtgtatatgcggaaagaagacgtgctcttgcatctgacagtcttcaatcacttattgtggaatatgctgaattgacaatggacgacatattaggggctaacataggacctgatactccaaaggaaaattgggacctgaacaaacttatagctaagctgcaacagtattgccatctgttggatgacttgacaccagaattgttggagggcaaaagctcaagctacgacgatttgcgggagtacctgcgtaagcgagggcgtgaagcttacttccagaaaactgttagttatttctccttttcctttcatggatattgttttttcgcatggttcaaaggttttaagaagttcaacaacaacaacatcaacatagccttttagtcccaaacaagttggggtaggctagagttgaaacccaacaagaagtcaccaaaaagagaaagagagagaaaggggaggggaaaaagtttttgagagaactaaaagggaaaaggcctaat

SEQ ID NO: 220847 - DNA, 684 bp, Zea Mays
acaaagctagggatgccttctcacagtgggtctgatgcaagcattccgagttgaagatcttcctatcgaatcgaaaatgctaacgagggctctagatgaagcgcagcggaaagttgagaattacttttttgacatcaggaagcagttgtttgagtatgatgaggtattgaatagccagagagatcgtgtatatgcggaaagaagacgtgctcttgcatctgacagtcttcaatcacttattgtggaatatgctgaattgacaatggacgacatattaggggctaacataggacctgatactccaaaggaaaattgggacctgaacaaacttatagctaagctgcaacagtattgccatctgttggatgacttgacaccagaattgttggagggcaaaagctcaagctacgacgatttgcgggagtacctgcgtaagcgagggcgtgaagcttacttccagaaaactgttagttatttctccttttcctttcatggatattgttttttcgcatggttcaaaggttttaagaagttcaacaacaacaacatcaacatagccttttagtcccaaacaagttggggtaggctagagttgaaacccaacaagaagtcaccaaaaagagaaagagagagaaaggggaggggaaaaagtttttgagagaactaaaagggaaaaggcctaat

SEQ ID NO: 220848 - DNA, 2804 bp, Zea Mays
gttagccaggagccagggcccaggaggccagaagccgcacacgcggtcacgcggaccgcggacgactgccgccgccgtcgtcgtcgattggctcttctgctctccatcccgacacatcgcgccgcttcaagctaaagtgccactgcgccaccatccatcccggcatctcgcgccgtttcagtctcaagagcagatacgcaggtatggagccacgcactgagggagatgcttccaggaacttgcgccaaggtcgattgctagagccgccaccggtacctgctgtgaggacttctccagaaggagtgcagaggcacacaggtcaggatgtgattgctagtagaagtcaaagtgcagcagcatctgagacgggctcttctttgccatgtgaagatggaaatgcaacggctgaaactattggcagcagcacccatcctgtgcacattggtgtgcaaaaccaagacattgaacaagagcaagttcatgagactggaaagagatacaagaggttgacatctgatgtatggaattactttaccaagaaaaaagagataatagaggagaatgggaagaagcgtgagcaaatttggggttattgcaacttcccaaattgtaagcggcgatatagagcagagggccgccaaggtacaactgcatttaagaatcatttgaggtccgcacacagcatagttcgaggccaacaacaacttaaatttgagaaggaccttggtaataacattacccatatccagcctttcatgtatgatcaagaagttagcgtgaagaaacttatcatggcaataattatgcatgattatcctttcaatatagtagagcatggatatttcgttgatttcattaaatcacttcatcctagctttccaatcaagagttgtaatgctgttggtaaagaagtaatggatacatatttggaagagaaggagaaattatatgcacatttaaaaactgtgcattgtcgctttagtgtaaccatggatatgtggacatcatgctcgaataaatcatacatgtgtgttactgttcattggataaatgatgattggtgtattcagaagaggattattggtttcttcaatgtcaaaggacgacacactggtaaaaagttgtcagagacctttactgaagctatggttagatggaatcttgataagaagctattttccttgaccttggataatgctagtgcgaatgaattggcagtcaaagatataatttcagatctaaaagatggccaggcttccttagtttgtgatggtctgttttttcatgtaagatgtgcatgtcatatactaaatttagttgctagagatggcctgaaagtaatttcgaaaacaattgacaagatcaaagctcttgtactagctgtgaagggatctccattgcagtggaaggaacttatgaagtgtgctagcgagtcagaattagatacaaagaggggcatctcacttgatgtttcagcaagatggaattcaacttatttaatgctgcgggatgccttgtactacaaggatgcttttgcaaggcttaagtcttcaaatcgtcatatgtatgtaaaaaattatccatctccggatgagtgggacatggcactaaaaatctttcaatgcttgaaaaaagtttatagtctcgctgaaattctctctggcacttcatatccaacagcaaacttgttctatagaggtttttgtgacataaaagtattgctagatgactggtgttctagtgatgatgccaccatcagtgaaatggcaattgccatgagtcaaaaaattgagaaatattgggaacattctaacttggctcttgctgtggcatgctttcttgatcctcgatacaagaaaaaagttatagagtattacatgaagaaattccacggtgatgggtaccatgtggaacttgaaaaaattgttaatgtggtaagagggctctattgtttttattctagctctacacctgcaccagcaaagagtacatcaccggaaccagctaatagtgcatcagatattttaatggcaagtgtatctgatgaactggacagttttctgtatggtacaaatgaacctactctagttcggtccaatgagttggaaaagtacatggcagatccacttttgcgtcttggtggtccatttgatggcccatttgatattttagcgtggtggaagagcaagagggaagtgtatcctattctttcacaaattgttcgagatgtgatggccatacaagtatcaacggttgcatctgaatctgtttttaatgctgctggccgttttgttgatccttatcgtaatcgtcttgagccggagatggtagaggcattgatatgcaccaaagattggatagctgcagaaagaaaagattctaagattgttggttcaattgtgagtgaccttgaaattgagactttatctaccgtcatggctaacaaaataagagctgtggatgacaaggacatagaatggaaggaccaggagcatgatggtgagaacgaatatattgatagtgatcttgatgttatggatgaccacaatgaactttgagctatagctgtaggcttctagtttcagcttaatgtctactgcctttgagttactatgttatgtgtcttgggacttttataaactattatcgtgattgtgcatttgtgggtgtctgcttaattaattagacattgatgttgacttgttatatactccgtccgtcccaaaatatagctgtttctagtctactttttttgtccatatttattcaaatgataataaatatagacatatatgcaaactgta

SEQ ID NO: 220849 - DNA, 2520 bp, Zea Mays
gttagccaggagccagggcccaggaggccagaagccgcacacgcggtcacgcggaccgcggacgactgccgccgccgtcgtcgtcgattggctcttctgctctccatcccgacacatcgcgccgcttcaagctaaagtgccactgcgccaccatccatcccggcatctcgcgccgtttcagtctcaagagcagatacgcaggtatggagccacgcactgagggagatgcttccaggaacttgcgccaaggtcgattgctagagccgccaccggtacctgctgtgaggacttctccagaaggagtgcagaggcacacaggtcaggatgtgattgctagtagaagtcaaagtgcagcagcatctgagacgggctcttctttgccatgtgaagatggaaatgcaacggctgaaactattggcagcagcacccatcctgtgcacattggtgtgcaaaaccaagacattgaacaagagcaagttcatgagactggaaagagatacaagaggttgacatctgatgtatggaattactttaccaagaaaaaagagataatagaggagaatgggaagaagcgtgagcaaatttggggttattgcaacttcccaaattgtaagcggcgatatagagcagagggccgccaaggtacaactgcatttaagaatcatttgaggtccgcacacagcatagttcgaggccaacaacaacttaaatttgagaaggaccttggtaataacattacccatatccagcctttcatgtatgatcaagaagttagcgtgaagaaacttatcatggcaataattatgcatgattatcctttcaatatagtagagcatggatatttcgttgatttcattaaatcacttcatcctagctttccaatcaagagttgtaatgctgttggtaaagaagtaatggatacatatttggaagagaaggagaaattatatgcacatttaaaaactgtgcattgtcgctttagtgtaaccatggatatgtggacatcatgctcgaataaatcatacatgtgtgttactgttcattggataaatgatgattggtgtattcagaagaggattattggtttcttcaatgtcaaaggacgacacactggtaaaaagttgtcagagacctttactgaagctatggttagatggaatcttgataagaagctattttccttgaccttggataatgctagtgcgaatgaattggcagtcaaagatataatttcagatctaaaagatggccaggcttccttagtttgtgatggtctgttttttcatgtaagatgtgcatgtcatatactaaatttagttgctagagatggcctgaaagtaatttcgaaaacaattgacaagatcaaagctcttgtactagctgtgaagggatctccattgcagtggaaggaacttatgaagtgtgctagcgagtcagaattagatacaaagaggggcatctcacttgatgtttcagcaagatggaattcaacttatttaatgctgcgggatgccttgtactacaaggatgcttttgcaaggcttaagtcttcaaatcgtcatatgtatgtaaaaaattatccatctccggatgagtgggacatggcactaaaaatctttcaatgcttgaaaaaagtttatagtctcgctgaaattctctctggcacttcatatccaacagcaaacttgttctatagaggtttttgtgacataaaagtattgctagatgactggtgttctagtgatgatgccaccatcagtgaaatggcaattgccatgagtcaaaaaattgagaaatattgggaacattctaacttggctcttgctgtggcatgctttcttgatcctcgatacaagaaaaaagttatagagtattacatgaagaaattccacggtgatgggtaccatgtggaacttgaaaaaattgttaatgtggtaagagggctctattgtttttattctagctctacacctgcaccagcaaagagtacatcaccggaaccagctaatagtgcatcagatattttaatggcaagtgtatctgatgaactggacagttttctgtatggtacaaatgaacctactctagttcggtccaatgagttggaaaagtacatggcagatccacttttgcgtcttggtggtccatttgatggcccatttgatattttagcgtggtggaagagcaagagggaagtgtatcctattctttcacaaattgttcgagatgtgatggccatacaagtatcaacggttgcatctgaatctgtttttaatgctgctggccgttttgttgatccttatcgtaatcgtcttgagccggagatggtagaggcattgatatgcaccaaagattggatagctgcagaaagaaaagattctaagattgttggttcaattgtgagtgaccttgaaattgagactttatctaccgtcatggctaacaaaataagagctgtggatgacaaggacatagaatggaaggaccaggagcatgatggatgttcatagcacctctagg

SEQ ID NO: 220850 - DNA, 2669 bp, Zea Mays
cagaagccgcacacgcggtcacgcggaccgcggacgactgccgccgccgtcgtcgtcgattggctcgtatggagccacgcactgagggagatgcttccaggaacttgcgccaaggtcgattgctagagccgccaccggtacctgctgtgaggacttctccagaaggagtgcagaggcacacaggtcaggatgtgattgctagtagaagtcaaagtgcagcagcatctgagacgggctcttctttgccatgtgaagatggaaatgcaacggctgaaactattggcagcagcacccatcctgtgcacattggtgtgcaaaaccaagacattgaacaagagcaagttcatgagactggaaagagatacaagaggttgacatctgatgtatggaattactttaccaagaaaaaagagataatagaggagaatgggaagaagcgtgagcaaatttggggttattgcaacttcccaaattgtaagcggcgatatagagcagagggccgccaaggtacaactgcatttaagaatcatttgaggtccgcacacagcatagttcgaggccaacaacaacttaaatttgagaaggaccttggtaataacattacccatatccagcctttcatgtatgatcaagaagttagcgtgaagaaacttatcatggcaataattatgcatgattatcctttcaatatagtagagcatggatatttcgttgatttcattaaatcacttcatcctagctttccaatcaagagttgtaatgctgttggtaaagaagtaatggatacatatttggaagagaaggagaaattatatgcacatttaaaaactgtgcattgtcgctttagtgtaaccatggatatgtggacatcatgctcgaataaatcatacatgtgtgttactgttcattggataaatgatgattggtgtattcagaagaggattattggtttcttcaatgtcaaaggacgacacactggtaaaaagttgtcagagacctttactgaagctatggttagatggaatcttgataagaagctattttccttgaccttggataatgctagtgcgaatgaattggcagtcaaagatataatttcagatctaaaagatggccaggcttccttagtttgtgatggtctgttttttcatgtaagatgtgcatgtcatatactaaatttagttgctagagatggcctgaaagtaatttcgaaaacaattgacaagatcaaagctcttgtactagctgtgaagggatctccattgcagtggaaggaacttatgaagtgtgctagcgagtcagaattagatacaaagaggggcatctcacttgatgtttcagcaagatggaattcaacttatttaatgctgcgggatgccttgtactacaaggatgcttttgcaaggcttaagtcttcaaatcgtcatatgtatgtaaaaaattatccatctccggatgagtgggacatggcactaaaaatctttcaatgcttgaaaaaagtttatagtctcgctgaaattctctctggcacttcatatccaacagcaaacttgttctatagaggtttttgtgacataaaagtattgctagatgactggtgttctagtgatgatgccaccatcagtgaaatggcaattgccatgagtcaaaaaattgagaaatattgggaacattctaacttggctcttgctgtggcatgctttcttgatcctcgatacaagaaaaaagttatagagtattacatgaagaaattccacggtgatgggtaccatgtggaacttgaaaaaattgttaatgtggtaagagggctctattgtttttattctagctctacacctgcaccagcaaagagtacatcaccggaaccagctaatagtgcatcagatattttaatggcaagtgtatctgatgaactggacagttttctgtatggtacaaatgaacctactctagttcggtccaatgagttggaaaagtacatggcagatccacttttgcgtcttggtggtccatttgatggcccatttgatattttagcgtggtggaagagcaagagggaagtgtatcctattctttcacaaattgttcgagatgtgatggccatacaagtatcaacggttgcatctgaatctgtttttaatgctgctggccgttttgttgatccttatcgtaatcgtcttgagccggagatggtagaggcattgatatgcaccaaagattggatagctgcagaaagaaaagattctaagattgttggttcaattgtgagtgaccttgaaattgagactttatctaccgtcatggctaacaaaataagagctgtggatgacaaggacatagaatggaaggaccaggagcatgatggtgagaacgaatatattgatagtgatcttgatgttatggatgaccacaatgaactttgagctatagctgtaggcttctagtttcagcttaatgtctactgcctttgagttactatgttatgtgtcttgggacttttataaactattatcgtgattgtgcatttgtgggtgtctgcttaattaattagacattgatgttgacttgttatatactccgtccgtcccaaaatatagctgtttctagtctactttttttgtccatatttattcaaatgataataaatatagacatatatgcaaactgta

SEQ ID NO: 220851 - DNA, 2571 bp, Zea Mays
cccactaatcagatccccgcaggctggttcactgagccggcttccgagcggcccatgggcttgcccaggaccggctcttccagtcgcctcaacgcgcaggcgccggagttcgtgccgcggggcccgccaccaccgacgccgccccggccgtttgagtactatgcgcctatggtgaacgcagcggatttgctgccaaggagcaacaggcgcgggagccggaagcggagatgctcccgcccgccgcggtgaagacggagctggtgtatctgggcaatttggtcggttggcacggggtatgcatcaataggcaccgtcatcgcagtaggacgcgtgcgtgatcaagcctggatgggacggttttgacacagcacgtcctgtgtgcgaggatctcgaactgggtcagttcgtggtgatgttcttctaggattctttcgtcatttcttttactgcatcgttgaaactgatccagggtagtgcggcggtgttgggggttgcggcgggcctcgccctcatcgtcggcttcgtccgctgcgatacctgtgaagttaacaatctacgctattatcgatagcaatccagcgctgaagtcaagaagttacctgggcaaaaacagtatacccgattctaggtgagaagctcaaagaaggggaagacatctacatctatcaggggtgacaaatccttttgctatgaagatgaccacagggttcttgtttgcgagttcatcctctagaatgtattgggttgtcgccacgaaaaaacacacgaatacataaattcaaataatttctggtgctgtggagtattcataattgtgtgcttttgttgaatccttcatgtaccataattcttactgctttcaagcccttttagaatatgactttaggatgtagaaattggtgaaaggagacaagaaattattctctaaactactattttttataggcaagggaggctggaagcaccttttttgcatgggagctgcatggagagaaattattggcagaaaacaaacttagaccagattcttgaatgtgccaagggaataagcttcgcttgctgcaattcatgtgctgcttggcgccacaaaaggagtagaggtgtgatttgcttgctttgcagggagcggggtcatagtctgaagaactgtcctgacaaaagcgagggaaatttgaagaaattttgctagaactgtggtgaatctggacactgtctttccaagtgccccaagctcattgagaatgggttacaaattttgcaagctgctttatctgcaatcagcaaggacatttgagcaagaactgccctgaaaacaaacatgacatcccatccaaagctccatcttggcgccaacagtggttcacataggtttgctcttgagaattaagttgttaatgaagctactttccgttgccctgatgagctaggatggaaaccacagaggacacctatcatatcatcagatggaagcatcttacacgcaagacagcaagctttctggtatggagctgaatggtactctggattatcaattgttaagtctacaggctctgaaaacaatggacttaagcaacaaccacttgcatgattcaatcccttaccagttgccatcaaaccttacctatctgaatctggcaaaaaataacttctctggtaatcttccatactctatatccaacttggtttcacttgagtacctcaatctcagccacaactcgttatttcagaaaattggtgaattttctttcagaattgtatattgtgtaaggcctactgtatatttcagaaaattggaagcctcaattcactttcagaactagacgtatctttcaacaacctcacgggaatcttcctttctcaatgggcgctctgtcgaagctttctaccctctgatcactcttaaaaaactaacgggtcctggtgtgagtggcagaactattggataggatcgccctgagggcactcaacatcaccactgttgtacaaaaaggcaaccctttccagtagggtcgcgcccctctggtaagagggtcgctgttaagttgcctgattaatccattctttcactgtgtctgcatgttgcagtagatgccagcagatcatgaagcgcccaaatgagctacagtactatcagaagctgaatagattgctgctggaattagagcaaaggagtggaggagtttctgaagagagcagacctgcaaaataaccgtcgtcatgtcagtgacatggccgctcaacttcttcctcttactgcattgtatctgaactgcgtcgacctaccaactacatcactgcaccgactgctatactgcatcaaccaaccgaacggctatatgaaacgacacaatgtcagccgtcagatatgaatattaacttcataaaagtaattgtaacttgtgtaggctggttatagcttgtgatttcacatttcatttgttagcggccaagatttatttctgttagtttatgaccaccactcaggaaagttgattgattctccattccaatctttgttagacctgcaagttgtttgctaacagtgatccttcagataaatggggacatggg

SEQ ID NO: 220852 - DNA, 2830 bp, Zea Mays
cccactaatcagatccccgcaggctggttcactgagccggcttccgagcggcccatgggcttgcccaggaccggctcttccagtcgcctcaacgcgcaggcgccggagttcgtgccgcggggcccgccaccaccgacgccgccccggccgtttgagtactatgcgcctatggtgaacgcagcggatttgctgccaaggagcaacaggcgcgggagccggaagcggagatgctcccgcccgccgcggtgaagacggagctggtgtatctgggcaatttggtcggttggcacggggtatgcatcaataggcaccgtcatcgcagtaggacgcgtgcgtgatcaagcctggatgggacggttttgacacagcacgtcctgtgtgcgaggatctcgaactgggtcagttcgtggtgatgttcttctaggattctttcgtcatttcttttactgcatcgttgaaactgatccagggtagtgcggcggtgttgggggttgcggcgggcctcgccctcatcgtcggcttcgtccgctgcgatacctgtgaagttaacaatctacgctattatcgatagcaatccagcgctgaagtcaagaagttacctgggcaaaaacagtatacccgattctaggtgagaagctcaaagaaggggaagacatctacatctatcaggggtgacaaatccttttgctatgaagatgaccacagggttcttgtttgcgagttcatcctctagaatgtattgggttgtcgccacgaaaaaacacacgaatacataaattcaaataatttctggtgctgtggagtattcataattgtgtgcttttgttgaatccttcatgtaccataattcttactgctttcaagcccttttagaatatgactttaggatgtagaaattggtgaaaggagacaagaaattattctctaaactactattttttataggcaagggaggctggaagcaccttttttgcatgggagctgcatggagagaaattattggcagaaaacaaacttagaccagattcttgaatgtgccaagggaataagcttcgcttgctgcaattcatgtgctgcttggcgccacaaaaggagtagaggtgtgatttgcttgctttgcagggagcggggtcatagtctgaagaactgtcctgacaaaagcgagggaaatttgaagaaattttgctagaactgtggtgaatctggacactgtctttccaagtgccccaagctcattgagaatgggttacaaattttgcaagctgctttatctgcaatcagcaaggacatttgagcaagaactgccctgaaaacaaacatgacatcccatccaaagctccatcttggcgccaacagtggttcacataggtttgctcttgagaattaagttgttaatgaagctactttccgttgccctgatgagctaggatggaaaccacagaggacacctatcatatcatcagatggaagcatcttacacgcaagacagcaagctttctggtatggagctgaatggtactctggattatcaattgttaagtctacaggctctgaaaacaatggacttaagcaacaaccacttgcatgattcaatcccttaccagttgccatcaaaccttacctatctgaatctggcaaaaaataacttctctggtaatcttccatactctatatccaacttggtttcacttgagtacctcaatctcagccacaactcgttatttcagaaaattggtgaattttctttcagaattgtatattgtgtaaggcctactgtatatttcagaaaattggaagcctcaattcactttcagaactttatatgcaaaacaatcaactatcaggcacatttgatgtccttagcaacattagccttgcgacactctgatcactcttaaaaaactaacgggtcctggtgtgagtggcagaactattggataggatcgccctgagggcactcaacatcaccactgttgtacaaaagtaggccaattgacatatacactttgttcatttatgttggtcgattctacccagtttaaagagagactaaaatgtgggcgttgttgcttgtgtccatccatgccacaagctgtaatattttcttctaataagcttttatacattacctctcttgttgactggttgaccatttgtgcagaggcaaccctttccagtagggtcgcgcccctctggtaagagggtcgctgttaagttgcctgattaatccattctttcactgtgtctgcatgttgcagtagatgccagcagatcatgaagcgcccaaatggtgctggtacagatacaaaatatgctcctgcacaagatatatatatatatacatattcacgtgagtttgttctttcttacatccagagctacagtactatcagaagctgaatagattgctgctggaattagagcaaaggagtggaggagtttctgaagagagcagacctgcaaaataaccgtcgtcatgtcagtgacatggccgctcaacttcttcctcttactgcattgtatctgaactgcgtcgacctaccaactacatcactgcaccgactgctatactgcatcaaccaaccgaacggctatatgaaacgacacaatgtcagccgtcagatatgaatattaacttcataaaagtaattgtaacttgtgtaggctggttatagcttgtgatttcacatttcatttgttagcggccaagatttatttctgttagtttatgaccaccactcaggaaagttgattgattctccattccaatctttgttagacctgcaagttgtttgctaacagtgatccttcagataaatggggacatggg

SEQ ID NO: 220853 - DNA, 2104 bp, Zea Mays
cccactaatcagatccccgcaggctggttcactgagccggcttccgagcggcccatgggcttgcccaggaccggctcttccagtcgcctcaacgcgcaggcgccggagttcgtgccgcggggcccgccaccaccgacgccgccccggccgtttgagtactatgcgcctatggtgaacgcagcggatttgctgccaaggagcaacaggcgcgggagccggaagcggagatgctcccgcccgccgcggtgaagacggagctggtgtatctgggcaatttggtcggttggcacggggtatgcatcaataggcaccgtcatcgcagtaggacgcgtgcgtgatcaagcctggatgggacggttttgacacagcacgtcctgtgtgcgaggatctcgaactgggtcagttcgtggtgatgttcttctaggattctttcgtcatttcttttactgcatcgttgaaactgatccagggtagtgcggcggtgttgggggttgcggcgggcctcgccctcatcgtcggcttcgtccgctgcgatacctgtgaagttaacaatctacgctattatcgatagcaatccagcgctgaagtcaagaagttacctgggcaaaaacagtatacccgattctaggtgagaagctcaaagaaggggaagacatctacatctatcagcaagggaggctggaagcaccttttttgcatgggagctgcatggagagaaattattggcagaaaacaaacttagaccagattcttgaatgtgccaagggaataagcttcgcttgctgcaattcatgtgctgcttggcgccacaaaaggagtagaggtgtgatttgcttgctttgcagggagcggggtcatagtctgaagaactgtcctgacaaaagcgagggaaatttgaagaaattttgctagaactgtggtgaatctggacactgtctttccaagtgccccaagctcattgagaatgggttacaaattttgcaagctgctttatctgcaatcagcaaggacatttgagcaagaactgccctgaaaacaaacatgacatcccatccaaagctccatcttggcgccaacagtggttcacataggtttgctcttgagaattaagttgttaatgaagctactttccgttgccctgatgagctaggatggaaaccacagaggacacctatcatatcatcagatggaagcatcttacacgcaagacagcaagctttctggtatggagctgaatggtactctggattatcaattgttaagtctacaggctctgaaaacaatggacttaagcaacaaccacttgcatgattcaatcccttaccagttgccatcaaaccttacctatctgaatctggcaaaaaataacttctctggtaatcttccatactctatatccaacttggtttcacttgagtacctcaatctcagccacaactcgttatttcagaaaattggtgaattttctttcagaattgtatattgtgtaaggcctactgtatatttcagaaaattggaagcctcaattcactttcagaactagacgtatctttcaacaacctcacgggaatcttcctttctcaatgggcgctctgtcgaagctttctacccttagatgccagcagatcatgaagcgcccaaatggtgctgagctacagtactatcagaagctgaatagattgctgctggaattagagcaaaggagtggaggagtttctgaagagagcagacctgcaaaataaccgtcgtcatgtcagtgacatggccgctcaacttcttcctcttactgcattgtatctgaactgcgtcgacctaccaactacatcactgcaccgactgctatactgcatcaaccaaccgaacggctatatgaaacgacacaatgtcagccgtcagatatgaatattaacttcataaaagtaattgtaacttgtgtaggctggttatagcttgtgatttcacatttcatttgttagcggccaagatttatttctgttagtttatgaccaccactcaggaaagttgattgattctccattccaatctttgttagacctgcaagttgtttgctaacagtgatccttcagataaatggggacatggg

SEQ ID NO: 220854 - DNA, 4341 bp, Zea Mays
cccactaatcagatccccgcaggctggttcactgagccggcttccgagcggcccatgggcttgcccaggaccggctcttccagtcgcctcaacgcgcaggcgccggagttcgtgccgcggggcccgccaccaccgacgccgccccggccgtttgagtactatgcgcctatggtgaacgcagcggatttgctgccaaggagcaacaggcgcgggagccggaagcggagatgctcccgcccgccgcggtgaagacggagctggtgtatctgggcaatttggtcggttggcacggggtatgcatcaataggcaccgtcatcgcagtaggacgcgtgcgtgatcaagcctggatgggacggttttgacacagcacgtcctgtgtgcgaggatctcgaactgggtcagttcgtggtgatgttcttctaggattctttcgtcatttcttttactgcatcgttgaaactgatccagggtagtgcggcggtgttgggggttgcggcgggcctcgccctcatcgtcggcttcgtccgctgcgatacctgtgaagttaacaatctacgctattatcgatagcaatccagcgctgaagtcaagaagttacctgggcaaaaacagtatacccgattctaggtgagaagctcaaagaaggggaagacatctacatctatcaggggtgacaaatccttttgctatgaagatgaccacagggttcttgtttgcgagttcatcctctagaatgtattgggttgtcgccacgaaaaaacacacgaatacataaattcaaataatttctggtgctgtggagtattcataattgtgtgcttttgttgaatccttcatgtaccataattcttactgctttcaagcccttttagaatatgactttaggatgtagaaattggtgaaaggagacaagaaattattctctaaactactattttttataggcaagggaggctggaagcaccttttttgcatgggagctgcatggagagaaattattggcagaaaacaaacttagaccagattcttgaatgtgccaagggaataagcttcgcttgctgcaattcatgtgctgcttggcgccacaaaaggagtagaggtgtgatttgcttgctttgcagggagcggggtcatagtctgaagaactgtcctgacaaaagcgagggaaatttgaagaaattttgctagaactgtggtgaatctggacactgtctttccaagtgccccaagctcattgagaatgggttacaaattttgcaagctgctttatctgcaatcagcaaggacatttgagcaagaactgccctgaaaacaaacatgacatcccatccaaagctccatcttggcgccaacagtggttcacataggtttgctcttgagaattaagttgttaatgaagctactttccgttgccctgatgagctaggatggaaaccacagaggacacctatcatatcatcagatggaagcatcttacacgcaagacagcaagctttctggtatggagctgaatggtactctggattatcaattgttaagtctacaggctctgaaaacaatggacttaagcaacaaccacttgcatgattcaatcccttaccagttgccatcaaaccttacctatctgaatctggcaaaaaataacttctctgttaaaacaatctaactgcaaggaaccattgggtgcagcaatctcagccacaactcgttatttcagaaaattggtgaattttctttcagaattgtatattgtgtaaggcctactgtatatttcagaaaattggaagcctcaattcactttcagaactgtaaggcctacttaatcgttgttttcgtatgcaaacttgacttgaatattgtgttgttgaaattattaatcatgcacaaaccatttcagtattgaatgcccttttcattagaaattaagtataattttgagcacaaatacaattcaaaatataacattaccaccaataaaattataacatatttattttggtcacaaatgtaaggccatctacgtctgtcctaagtcaaaaaaagttaactctgattaacaatatattatatgaaactcaagcttattatattataaaatcaattttctttgcagatacaccagaacacttttttaacataggaacgcttattttactaagaggacaagcatattataaacctagtttttataattaatctggtaagaaaatattttgctgtaactctatataattttttggataaataatagtgcaaagttaaactaatttgacttaggacaaagctagttggacttcaattttcgatcatagcaggtatctgtagaatctaataaagagatttttcaagaaaatctactgataccattttcatgtggccaatctaacaatcatatatagacattattggttcaaattaaaataatttgactcatggatcctagttttttttattttgactcgaaagagaatccatttataatacatagagctttcagatactatctgactttttaaccttttaaagaaaggcattcaaaattgctttgagctatccaagcgaggatgacactaattttattagtgttagtatagtatatgagtagctgctcctaaaccctatgaattcatattgtgataattaaaatccttacagagacgtatctttcaacaacctcacgggaatcttcctttctcaatgggcgctctgtcgaagctttctaccctgtaagtattcatggttctgatagctctcttcttgactggtatgcagttatatgcaaaacaatcaactatcaggcacatttgatgtccttagcaacattagccttgcgacactgtaagtagcttcccatgtatcgataagattgctaattttccttttatgttgtgctatatagttgttgatatatttgttatgttgtggaatatggtgtaaaataaaaataaatagcatttgtaatgctactcaaattaacttcctagaggcttattaagccgtaggaagttagccagcaaactttctaggggctacagtaagccgtaggaagttatccagctaacttcctaaaggctacagtaagccgtaggaagttagctagctgacggcgctgacggcgtgaagctactaacttccgagaatctactaacttccgagaggcttagcaagccgtagaaagttagctaacttcctagagccctctaggaagttaagctaacttccgacaaaaaattttcgagagccaaacttccgacgggatggcttaacttccgagagtttcgctaacttcctagagtttaggcctaacttcctagggtttaggctctaggaagtttactattttggtgtagtgccagcaatctagatgtttcaactatatacctaatcattgaccatttctaaatgaatgcacttgctagaaaattatttgttcctcgtgtttttcttctcatcctgcctattggaatctcgcagctgatcactcttaaaaaactaacgggtcctggtgtgagtggcagaactattggataggatcgccctgagggcactcaacatcaccactgttgtacaaaagtaggccaattgacatatacactttgttcatttatgttggtcgattctacccagtttaaagagagactaaaatgtgggcgttgttgcttgtgtccatccatgccacaagctgtaatattttcttctaataagcttttatacattacctctcttgttgactggttgaccatttgtgcagaggcaaccctttccagtagggtcgcgcccctctggtaagagggtcgctgttaagttgcctgattaatccattctttcactgtgtctgcatgttgcagtagatgccagcagatcatgaagcgcccaaatggtgctgagctacagtactatcagaagctgaatagattgctgctggaattagagcaaaggagtggaggagtttctgaagagagcagacctgcaaaataaccgtcgtcatgtcagtgacatggccgctcaacttcttcctcttactgcattgtatctgaactgcgtcgacctaccaactacatcactgcaccgactgctatactgcatcaaccaaccgaacggctatatgaaacgacacaatgtcagccgtcagatatgaatattaacttcataaaagtaattgtaacttgtgtaggctggttatagcttgtgatttcacatttcatttgttagcggccaagatttatttctgttagtttatgaccaccactcaggaaagttgattgattctccattccaatctttgttagacctgcaagttgtttgctaacagtgatccttcagataaatggggacatggg

SEQ ID NO: 220855 - DNA, 2021 bp, Zea Mays
cttttttgtgctggaattagagtttagtactgacgctattatcgatagcaatccagcgctgaagtcaagaagttacctgggcaaaaacagtatacccgattctaggtgagaagctcaaagaaggggaagacatctacatctatcagcaagggaggctggaagcaccttttttgcatgggagctgcatggagagaaattattggcagaaaacaaacttagaccagattcttgaatgtgccaagggaataagcttcgcttgctgcaattcatgtgctgcttggcgccacaaaaggagtagaggtttgcttgctttgcagggagcggggtcatagtctgaagaactgtcctgacaaaagcgagggaaatttgaagaaattttgctagaactgtggtgaatctggacactgtctttccaagtgccccaagctcattgagaatgggttacaaattttgcaagctgctttatctgcaatcagcaaggacatttgagcaagaactgccctgaaaacaaacatgacatcccatccaaagctccatcttggcgccaacagtggttcacataggtttgctcttgagaattaagttgttaatgaagctactttccgttgccctgatgagctaggatggaaaccacagaggacacctatcatatcatcagatggaagcatcttacacgcaagacagcaagctttctggtatggagctgaatggtactctggattatcaattgttaagtctacaggctctgaaaacaatggacttaagcaacaaccacttgcatgattcaatcccttaccagttgccatcaaaccttacctatctgtaatgtctcccaacctgtacatattattgatgctattcgatttttgaaatttgattcaaagcgaatacaggaatctggcaaaaaataacttctctggtaatcttccatactctatatccaacttggtttcacttgagtacctcaatctcagccacaactcgttatttcagaaaattggtgaattttctttcagaattgtatattgtgtaaggcctactgtatatttcagaaaattggaagcctcaattcactttcagaactagacgtatctttcaacaacctcacgggaatcttcctttctcaatgggcgctctgtcgaagctttctaccctctgatcactcttaaaaaactaacgggtcctggtgtgagtggcagaactattggataggatcgccctgagggcactcaacatcaccactgttgtacaaaagtaggccaattgacatatacactttgttcatttatgttggtcgattctacccagtttaaagagagactaaaatgtgggcgttgttgcttgtgtccatccatgccacaagctgtaatattttcttctaataagcttttatacattacctctcttgttgactggttgaccatttgtgcagaggcaaccctttccagtagggtcgcgcccctctggtaagagggtcgctgttaagttgcctgattaatccattctttcactgtgtctgcatgttgcagtagatgccagcagatcatgaagcgcccaaatggtgctgagctacagtactatcagaagctgaatagattgctgctggaattagagcaaaggagtggaggagtttctgaagagagcagacctgcaaaataaccgtcgtcatgtcagtgacatggccgctcaacttcttcctcttactgcattgtatctgaactgcgtcgacctaccaactacatcactgcaccgactgctatactgcatcaaccaaccgaacggctatatgaaacgacacaatgtcagccgtcagatatgaatattaacttcataaaagtaattgtaacttgtgtaggctggttatagcttgtgatttcacatttcatttgttagcggccaagatttatttctgttagtttatgaccaccactcaggaaagttgattgattctccattccaatctttgttagacctgcaagttgtttgctaacagtgatccttcagataaatggggacatggg

SEQ ID NO: 220856 - DNA, 1562 bp, Zea Mays
caccgttacccctgcaaccatttccttcttcaaggcaagggaggctggaagcaccttttttgcatgggagctgcatggagagaaattattggcagaaaacaaacttagaccagattcttgaatgtgccaagggaataagcttcgcttgctgcaattcatgtgctgcttggcgccacaaaaggagtagagatttgcttgctttgcagggagcggggtcatagtctgaagaactgtcctgacaaaagcgagggaaatttgaagaaattttgctagaactgtggtgaatctggacactgtctttccaagtgccccaagctcattgagaatgggttacaaattttgcaagctgctttatctgcaatcagcaaggacatttgagcaagaactgccctgaaaacaaacatgacatcccatccaaagctccatcttggcgccaacagtggttcacataggtttgctcttgagaattaagttgttaatgaagctactttccgttgccctgatgagctaggatggaaaccacagaggacacctatcatatcatcagatggaagcatcttacacgcaagacagcaagctttctggtatggagctgaatggtactctggattatcaattgttaagtctacaggctctgaaaacaatggacttaagcaacaaccacttgcatgattcaatcccttaccagttgccatcaaaccttacctatctgaatctggcaaaaaataacttctctggtaatcttccatactctatatccaacttggtttcacttgagtacctcaatctcagccacaactcgttatttcagaaaattggtgaattttctttcagaattgtatattgtgtaaggcctactgtatatttcagaaaattggaagcctcaattcactttcagaactagacgtatctttcaacaacctcacgggaatcttcctttctcaatgggcgctctgtcgaagctttctaccctaggcaaccctttccagtagggtcgcgcccctctggtaagagggtcgctgttaagttgcctgattaatccattctttcactgtgtctgcatgttgcagtagatgccagcagatcatgaagcgcccaaatggtgctgagctacagtactatcagaagctgaatagattgctgctggaattagagcaaaggagtggaggagtttctgaagagagcagacctgcaaaataaccgtcgtcatgtcagtgacatggccgctcaacttcttcctcttactgcattgtatctgaactgcgtcgacctaccaactacatcactgcaccgactgctatactgcatcaaccaaccgaacggctatatgaaacgacacaatgtcagccgtcagatatgaatattaacttcataaaagtaattgtaacttgtgtaggctggttatagcttgtgatttcacatttcatttgttagcggccaagatttatttctgttagtttatgaccaccactcaggaaagttgattgattctccattccaatctttgttagacctgcaagttgtttgctaacagtgatccttcagataaatggggacatggg

SEQ ID NO: 220857 - DNA, 1864 bp, Zea Mays
caaccatttccttcttcaagtgagaagctcaaagaaggggaagacatctacatctatcaggggtgacaaatccttttgctatgaagatgaccacagggttcttgtttgcgagttcatcctctagaatgtattgggttgtcgccacgaaaaaacacacgaatacataaattcaaataatttctggtgctgtggagtattcataattgtgtgcttttgttgaatccttcatgtaccataattcttactgctttcaagcccttttagaatatgactttaggatgtagaaattggtgaaaggagacaagaaattattctctaaactactattttttataggcaagggaggctggaagcaccttttttgcatgggagctgcatggagagaaattattggcagaaaacaaacttagaccagattcttgaatgtgccaagggaataagcttcgcttgctgcaattcatgtgctgcttggcgccacaaaaggagtagagatttgcttgctttgcagggagcggggtcatagtctgaagaactgtcctgacaaaagcgagggaaatttgaagaaattttgctagaactgtggtgaatctggacactgtctttccaagtgccccaagctcattgagaatgggttacaaattttgcaagctgctttatctgcaatcagcaaggacatttgagcaagaactgccctgaaaacaaacatgacatcccatccaaagctccatcttggcgccaacagtggttcacataggtttgctcttgagaattaagttgttaatgaagctactttccgttgccctgatgagctaggatggaaaccacagaggacacctatcatatcatcagatggaagcatcttacacgcaagacagcaagctttctggtatggagctgaatggtactctggattatcaattgttaagtctacaggctctgaaaacaatggacttaagcaacaaccacttgcatgattcaatcccttaccagttgccatcaaaccttacctatctgaatctggcaaaaaataacttctctggtaatcttccatactctatatccaacttggtttcacttgagtacctcaatctcagccacaactcgttatttcagaaaattggtgaattttctttcagaattgtatattgtgtaaggcctactgtatatttcagaaaattggaagcctcaattcactttcagaactagacgtatctttcaacaacctcacgggaatcttcctttctcaatgggcgctctgtcgaagctttctaccctaggcaaccctttccagtagggtcgcgcccctctggtaagagggtcgctgttaagttgcctgattaatccattctttcactgtgtctgcatgttgcagtagatgccagcagatcatgaagcgcccaaatggtgctgagctacagtactatcagaagctgaatagattgctgctggaattagagcaaaggagtggaggagtttctgaagagagcagacctgcaaaataaccgtcgtcatgtcagtgacatggccgctcaacttcttcctcttactgcattgtatctgaactgcgtcgacctaccaactacatcactgcaccgactgctatactgcatcaaccaaccgaacggctatatgaaacgacacaatgtcagccgtcagatatgaatattaacttcataaaagtaattgtaacttgtgtaggctggttatagcttgtgatttcacatttcatttgttagcggccaagatttatttctgttagtttatgaccaccactcaggaaagttgattgattctccattccaatctttgttagacctgcaagttgtttgctaacagtgatccttcagataaatggggacatggg

SEQ ID NO: 220858 - DNA, 1547 bp, Zea Mays
tttccttcttcaaggcaagggaggctggaagcaccttttttgcatgggagctgcatggagagaaattattggcagaaaacaaacttagaccagattcttgaatgtgccaagggaataagcttcgcttgctgcaattcatgtgctgcttggcgccacaaaaggagtagaggtgtgatttgcttgctttgcagggagcggggtcatagtctgaagaactgtcctgacaaaagcgagggaaatttgaagaaattttgctagaactgtggtgaatctggacactgtctttccaagtgccccaagctcattgagaatgggttacaaattttgcaagctgctttatctgcaatcagcaaggacatttgagcaagaactgccctgaaaacaaacatgacatcccatccaaagctccatcttggcgccaacagtggttcacataggtttgctcttgagaattaagttgttaatgaagctactttccgttgccctgatgagctaggatggaaaccacagaggacacctatcatatcatcagatggaagcatcttacacgcaagacagcaagctttctggtatggagctgaatggtactctggattatcaattgttaagtctacaggctctgaaaacaatggacttaagcaacaaccacttgcatgattcaatcccttaccagttgccatcaaaccttacctatctgaatctggcaaaaaataacttctctggtaatcttccatactctatatccaacttggtttcacttgagtacctcaatctcagccacaactcgttatttcagaaaattggtgaattttctttcagaattgtatattgtgtaaggcctactgtatatttcagaaaattggaagcctcaattcactttcagaactagacgtatctttcaacaacctcacgggaatcttcctttctcaatgggcgctctgtcgaagctttctaccctaggcaaccctttccagtagggtcgcgcccctctggtaagagggtcgctgttaagttgcctgattaatccattctttcactgtgtctgcatgttgcagtagatgccagcagatcatgaagcgcccaaatggtgctgagctacagtactatcagaagctgaatagattgctgctggaattagagcaaaggagtggaggagtttctgaagagagcagacctgcaaaataaccgtcgtcatgtcagtgacatggccgctcaacttcttcctcttactgcattgtatctgaactgcgtcgacctaccaactacatcactgcaccgactgctatactgcatcaaccaaccgaacggctatatgaaacgacacaatgtcagccgtcagatatgaatattaacttcataaaagtaattgtaacttgtgtaggctggttatagcttgtgatttcacatttcatttgttagcggccaagatttatttctgttagtttatgaccaccactcaggaaagttgattgattctccattccaatctttgttagacctgcaagttgtttgctaacagtgatccttcagataaatggggacatggg

SEQ ID NO: 220859 - DNA, 1192 bp, Zea Mays
cagataatgatggttgttgtatgatgatggtggcgcatggtttggattggctccatcttggcgccaacagtggttcacataggtttgctcttgagaattaagttgttaatgaagctactttccgttgccctgatgagctaggatggaaaccacagaggacacctatcatatcatcagatggaagcatcttacacgcaagacagcaagctttctggtatggagctgaatggtactctggattatcaattgttaagtctacaggctctgaaaacaatggacttaagcaacaaccacttgcatgattcaatcccttaccagttgccatcaaaccttacctatctgaatctggcaaaaaataacttctctggtaatcttccatactctatatccaacttggtttcacttgagtacctcaatctcagccacaactcgttatttcagaaaattggtgaattttctttcagaattgtatattgtgtaaggcctactgtatatttcagaaaattggaagcctcaattcactttcagaactagacgtatctttcaacaacctcacgggaatcttcctttctcaatgggcgctctgtcgaagctttctaccctaggcaaccctttccagtagggtcgcgcccctctggtaagagggtcgctgttaagttgcctgattaatccattctttcactgtgtctgcatgttgcagtagatgccagcagatcatgaagcgcccaaatggtgctgagctacagtactatcagaagctgaatagattgctgctggaattagagcaaaggagtggaggagtttctgaagagagcagacctgcaaaataaccgtcgtcatgtcagtgacatggccgctcaacttcttcctcttactgcattgtatctgaactgcgtcgacctaccaactacatcactgcaccgactgctatactgcatcaaccaaccgaacggctatatgaaacgacacaatgtcagccgtcagatatgaatattaacttcataaaagtaattgtaacttgtgtaggctggttatagcttgtgatttcacatttcatttgttagcggccaagatttatttctgttagtttatgaccaccactcaggaaagttgattgattctccattccaatctttgttagacctgcaagttgtttgctaacagtgatccttcagataaatggggacatggg

SEQ ID NO: 220860 - DNA, 983 bp, Zea Mays
acgaccgatagcaaacagaaacttctcaagttcttcagcggttgtggcaggccagacaacatttttgctttcctcagattggtagcagctatctggatatattcgcacagtgaagagtttgaaccacttatacccgagctcgatgaatatgacactctcagagaatggtgctctcaggaagtaatcaggcataaggttttcacagatcatgtccagatgacagcattggtcaccgctcttggggtgccgctgcgagtggagtacctcttacaagtaggagatggtcaagacctctacgatcgtcaggaggattcgcaagactatacgccaacaagtacatgttggtctagtcatcgtcgtcaactaccccatgttcatgtagtcccccgtgtgaccgtgctctacacaaacgctcactatgacatcatctatccccaccgtcgcgatggtcctcctgttccttctattgatgagagatgttgtcagcagactgcactggtacagcgcccaactactgagagttcaggtcaacaaattgcccagagagatagctgcagtggtactggtgagagttcaagccaacatattgctcaggtggagatctccactgatgagaattcagatcaacatgcagagctaaagttgacttctactgatgcccatgagtatgatgatcattgctgagtgaagctataggtagagaattagggcattaggcacacactgatgactgagatagctgatattctggactttttgttacattggtacaaactgctggtgccaactggagatcagtagctactcctcccttatatgaaaactctgcaaaggatgagaatcaggcatacagtgatgaggtagcaattaattgttacaagttcataatttttttttgctgaaaatttagtattcgatcaaatccgcctcaaccaggggtggagggagagagtaataatatatcctgtgcaatcagttttttt

SEQ ID NO: 220861 - DNA, 2429 bp, Zea Mays
cttttctcctcactccctcgtgttctctcagaatttacgaatcaatccctgccggtcgcctgccctgctgcccattaataagcttttcccgccaggatggcctccggttcaggaagggcccgaggcggcggcatccgaatccaagaaccgggtagtaggcaccgcgatgagtccaacgccggcgccgccgccgcagctgcagagccgccgccaccctctccgtccaccgacggtctccaagaacggccccatgggccattgggagccgagagcgggagcccctctgcggccgccgccgcactgaaggggaagggggtcttggctccatccccactgccttccccgacccgctccgaggaaaccaactccctggtatcatccgacatcgtctccgacgaggaagccgaagagttgaggtccgccaacacgctcgcggacggtgacaggaggtttggagtgtcttggaagagcccgttggtggaggcgatgatggaggtgccgaaggtgacgaggcatatcgattcgaagacggcgttcgacaacttgtcgatggagcagcaatgggccctggcggaggagatagaaatgcaacagcggcagcaggcgcagcagaggaaatgtctctggatcacattcaaaggtggcatgtcaaacatgtttttggactggataggaaggcaaatgcacaacttcaattcagattctacagtaatcataccccatgtgaatcaccagacaatccctatgaccgggatcattgagcattacaacctcatggaaacggatgctggacgaggagtaatatttcattcaaatgtactgaaccttcgtcgtgcctattctgaatttaggccagtgcatggagatggagactgtttctacaggagcttcatgttttcctacctcgagcaagttcttgataggcaggatacacacgaggaacaccgtcttcttgctgctgttgaaggagtggctaggcatcatgcgcaccttgagtggaactccgaattttccctgagacacaaagatatgcacattgtttcacattagtggtgtattggcatgccatcacaattttacctcttgacattgatacagatttgttttttttttgaaaatataacatatgaatacatgttgaaataagatcaatttcatataacagcactgatgagtaatatttacagttatttagtaataaataactcatgcttctacttccccgagataatgcacccaagctgttttgtgtgttcatctgattcaatcacaaatgtttcctttcacacttctctattaaaacatttttttttcaattacttaccatgtaatcggtgttctttggctgaaggttctcagacaagtgttatcatggcatttaagacgttgataaagaaagtaatgagatggaaaagacacaacagatggaagaatgtactgacgaccgatagctacagcaaacagaaacttctcaagttcttcagcggttgtggcaggccagacaacatttttgctttcctcagattggtagcagctatctggatatattcgcacagtgaagagtttgaaccacttatacccgagctcgatgaatatgacactctcagagaatggtgctctcaggaagtaatcaggcataaggttttcacagatcatgtccagatgacagcattggtcaccgctcttggggtgccgctgcgagtggagtacctcttacaagtaggagatggtcaagacctctacgatcgtcaggaggattcgcaagactatacgccaacaagtacatgttggtctagtcatcgtcgtcaactaccccatgttcatgtagtcccccgtgtgaccgtgctctacacaaacgctcactatgacatcatctatccccaccgtcgcgatggtcctcctgttccttctattgatgagagatgttgtcagcagactgcactggtacagcgcccaactactgagagttcaggtcaacaaattgcccagagagatagctgcagtggtactggtgagagttcaagccaacatattgctcaggtggagatctccactgatgagaattcagatcaacatgcagagctaaagttgacttctactgatgcccatgagtatgatgatcattgctgagtgaagctataggtagagaattagggcattaggcacacactgatgactgagatagctgatattctggactttttgttacattggtacaaactgctggtgccaactggagatcagtagctactcctcccttatatgaaaactctgcaaaggatgagaatcaggcatacagtgatgaggtagcaattaattgttacaagttcataatttttttttgctgaaaatttagtattcgatcaaatccgcctcaaccaggggtggagggagagagtaataatatatcctgtgcaatcagttttttt

SEQ ID NO: 220862 - DNA, 2156 bp, Zea Mays
ccataagtccccccccctccaacatttgataaataacctcccatcgtcccggatctaacaacgtcaccctcgtcgcttttctcctcactccctcgtgttctctcagaatttacgaatcaatccctgccggtcgcctgccctgctgcccattaataagcttttcccgccaggatggcctccggttcaggaagggcccgaggcggcggcatccgaatccaagaaccgggtagtaggcaccgcgatgagtccaacgccggcgccgccgccgcagctgcagagccgccgccaccctctccgtccaccgacggtctccaagaacggccccatgggccattgggagccgagagcgggagcccctctgcggccgccgccgcactgaaggggaagggggtcttggctccatccccactgccttccccgacccgctccgaggaaaccaactccctggtatcatccgacatcgtctccgacgaggaagccgaagagttgaggtccgccaacacgctcgcggacggtgacaggaggtttggagtgtcttggaagagcccgttggtggaggcgatgatggaggtgccgaaggtgacgaggcatatcgattcgaagacggcgttcgacaacttgtcgatggagcagcaatgggccctggcggaggagatagaaatgcaacagcggcagcaggcgcagcagaggaaatgtctctggatcacattcaaaggtggcatgtcaaacatgtttttggactggataggaaggcaaatgcacaacttcaattcagattctacagtaatcataccccatgtgaatcaccagacaatccctatgaccgggatcattgagcattacaacctcatggaaacggatgctggacgaggagtaatatttcattcaaatgtactgaaccttcgtcgtgcctattctgaatttaggccagtgcatggagatggagactgtttctacaggagcttcatgttttcctacctcgagcaagttcttgataggcaggatacacacgaggaacaccgtcttcttgctgctgttgaaggagtggctaggcatcatgcgcaccttgagtggaactccgaattttccctgagacacaaagcatttaagacgttgataaagaaagtaatgagatggaaaagacacaacagatggaagaatgtactgacgaccgatagctacagcaaacagaaacttctcaagttcttcagcggttgtggcaggccagacaacatttttgctttcctcagattggtagcagctatctggatatattcgcacagtgaagagtttgaaccacttatacccgagctcgatgaatatgacactctcagagaatggtgctctcaggaagtaatcaggcataaggttttcacagatcatgtccagatgacagcattggtcaccgctcttggggtgccgctgcgagtggagtacctcttacaagtaggagatggtcaagacctctacgatcgtcaggaggattcgcaagactatacgccaacaagtacatgttggtctagtcatcgtcgtcaactaccccatgttcatgtagtcccccgtgtgaccgtgctctacacaaacgctcactatgacatcatctatccccaccgtcgcgatggtcctcctgttccttctattgatgagagatgttgtcagcagactgcactggtacagcgcccaactactgagagttcaggtcaacaaattgcccagagagatagctgcagtggtactggtgagagttcaagccaacatattgctcaggtggagatctccactgatgagaattcagatcaacatgcagagctaaagttgacttctactgatgcccatgagtatgatgatcattgctgagtgaagctataggtagagaattagggcattaggcacacactgatgactgagatagctgatattctggactttttgttacattggtacaaactgctggtgccaactggagatcagtagctactcctcccttatatgaaaactctgcaaaggatgagaatcaggcatacagtgatgaggtagcaattaattgttacaagttcataatttttttttgctgaaaatttagtattcgatcaaatccgcctcaaccaggggtggagggagagagtaataatatatcctgtgcaatcagttttttt

SEQ ID NO: 220863 - DNA, 936 bp, Zea Mays
ccatagcggcaaggggcggatcggttccggagacagtgcccatgtattcgaagtcttggatctggacacggttatggggctggtggtgagcgccgccatgaggagcggctggacgatggtgttgggaatggagggaccaccgatggcaagctgagtctgcgggtagacccgagcgtatgcgggcagcgtacgaccaaggccatcaatcctcatgcctacaccgatggaactatgtttgttcagttacctccaaggatccagttcccagttccagttattgtgcaactggagcggaataccacttcacagccgtatctacttcattaccaatcatacaatgctccttggctacccacacgatagaccaatgctccgtcagttccttgcacatggtctgttttgagtacattacctaacaattcatagcagccacaaccgccagctagttgttttagtatgctatgcatatgctggtcaacctcctcacatgaatagcatgctcactcgattgcttactttggttggccatgctttggcaaatgtaacattcataaatgcatatacgtgcactttacatattctagattggccatatattgcacatacatgcgcattgaaatatgtcattggtaatgatagaatgtggaatgctaattacttaggcagagacaaggcctataaatgccattgatatcaatctttttcccttctgtttaatagatttgtaatgcagttgttcaatgcaactcttgtcctcccaatttttttgtgcagtaatgtttggctggccaaaaggtatacttctttttacaaaaacatagctctttcttatgtttaatgttttatatcacttatttcaataactggttattatattctccataaataataaattgaattcaacctctcagtcagtttggtgatatatatctggag

SEQ ID NO: 220864 - DNA, 3169 bp, Zea Mays
agagaagcgagcggaccctaaaagagaggaagaaacctgctggcttccttctcgtccccaacaggcgtccccaagactccaacttcctcgatctagccatgtcgtccgcgccgcctgcccaccagtccaagccttccccccaccgccggcagcaccacaacctcggaccgaggtcgccgccgccgccgccgccgcagtcccagcgctacgtacccaaatccgccccccgctgcggcgccaaaaccctcccccccgtcccagccatcgctcactaccgcgctccgatcatcggccgcctcgccctcctcgtccggctctggcgggagctccagcggtagcgtaggtgtccggtcggttgatgcattcgtcgcgtatctgccgcatgacgaggcggtcgcggcgggtctcggcggcctcgatgcacacgagtcgcaggtcgtcgtcgaccacctcaacgacgcacttgccgcgctccttcgggccaagcctcgcgagttctggctccgggtggcacagaacacttctttgcatgaattccttgatagttatctacaattcaggcacaggtggtatgatttgccacaccgaggcccaaagggaactgtagcaggtttggttgttggggagcttgagctttgccgtcgtgtatttatggtcctctatcgcatatcctcgaataaggatcctggagcaggtcgcggcgagtcccttagcatgaaggagcatgcagcccttctgctggagaaaaaattgcttgatctaccaaaattgttggacatatgtgctatatatgagcatgacaacggcaagttaacaagttcactggttacgaatgttattaatgtgcagccgagtgtactggatgacattaatattgtcattccccagttcctcaacattttccacacgatgcatgataggtgcatgacatctttacaggtgctcacctcaaccggatcaattgataatggatatgttcagcttcagaaagatttcatggaggtgttagattttataaatgatgcgattgttactctggattcttttgttggtgcttatcaacctgccgctttattgttctgtactaattttgaaatgagctatggagttgaggaattgctgaatgctcttgcaaggctgtatagttcattgctaccatcattgctccatgggtttaaagttatgcccaagtctcagagcaatgcagaggcatcacttgacagcacacttagtgacattcctcttgctataaggatgttgtcaaagagaacagcgagatttggttggagattgttgcactactgttatttgaatgatcaagttagggagcatgatgctcaaacttctactaagatgtttccagctaaagtcgaagatcctatgatcaggggagacatcttggttcaaacacttaaagatataaatagagaatccacttactcttctcaagtgaatcatggaaatacttttctccaagaacttgaaagtgaatttcaattaatgagccagattggtgatattcggaacaaagcagaaggatgaggaaacagcgatggttgagtccaaaattagtcagataagggatcttttccctgattatgggaagggtttcctttctgcttgtctggaagcctacaacctgaaccctgaggaagttatccaaaggatattagaaggaacacttcatcaagatctgctagctttggatacttcattagaagagatgccacacgaaaaacctgcaccaactgctgtgaaagataaagggaagggtatattggtggaaactgtgcctcaaattacaaagaaaccccataaagttgctgagacacattactttgttcaagatggcctatcttcagcaacttcatcagcatcacaaggtccatcttctgcaatttcaccagcatcccttgggccatcttctgcaatttcctcagcattccagggaccatcttctgctatttcatcagcatctctgggcccatcctcatccatatcatctgtcccaaaaggtagatttacaaggaaggccaatgatgatttgccggacactgcaatcctggactcgaaaaatgctaaaaatgcagctagatctgttatccttgactcgcaatatgagtatgaagatgagtacgatgattcatttgatgatcttggcttcagtgtggtagagtcaagttatgaggaaactgatggtgtcaatgacgctgaggcttcatcacatggcccaagatggagttcacagaagaaaccacagttttatgtcaaggatgggaagaattatagctacaaggttgctggttcggttgctgtatccagtgctcgagaagcagctgtcatgaggcaaactcaaaaagagacaatctatggtctgggtcgtggtggaaatgttccttttggtgtcccgaacaggcaacatatagatgtggaggcagaggaggttggtgatgctgacaactcaggcagaggttcaaattcccgtggccggggaagaaaaggcggaagggaaggcaaccgtccggaggagaatgagagctccaatggacgaggctctggctttggtggtaaaagaggaggctggagtcagggcaatccggctgaggaaaactggaaccctaatggtcaacaaggttttggccgtggtggcagaagagggggctggaatcagggtggcccagcgaaggaagacggtaactctagtggcaggcaagaaagttttggccgtggagcaagacggggcagcatgaaccatgaccaatcagccgaggataatgaaggccataataatcccgcacaagactttactcgaggaccagctcctcgtggtggccatggaaggggaggtggccggaaccatcacaggagagatcgggcaatgaagaagcatatgcaaggattgacagggctttagctgctggtagccttatgcttttgatgtgccgtactgtaaatggcatttttggaggcactcctacttgaccatccaaatttttgtgcttgttctgtttttaaatcaaataacgccatgaagtaacccacatatgttctcgtaacatttgtgattgccctaaaaagggtaatagtgtatgtagttctaaacatgcttgtaactcgttaaatacataattaattctctagcgactgaaaagaaaaatcatgaaaccaa

SEQ ID NO: 220865 - DNA, 3288 bp, Zea Mays
agagaagcgagcggaccctaaaagagaggaagaaacctgctggcttccttctcgtccccaacaggcgtccccaagactccaacttcctcgatctagccatgtcgtccgcgccgcctgcccaccagtccaagccttccccccaccgccggcagcaccacaacctcggaccgaggtcgccgccgccgccgccgccgcagtcccagcgctacgtacccaaatccgccccccgctgcggcgccaaaaccctcccccccgtcccagccatcgctcactaccgcgctccgatcatcggccgcctcgccctcctcgtccggctctggcgggagctccagcggtagcgtaggtgtccggtcggttgatgcattcgtcgcgtatctgccgcatgacgaggcggtcgcggcgggtctcggcggcctcgatgcacacgagtcgcaggtcgtcgtcgaccacctcaacgacgcacttgccgcgctccttcgggccaagcctcgcgagttctggctccgggtggcacagaacacttctttgcatgaattccttgatagttatctacaattcaggcacaggtggtatgatttgccacaccgaggcccaaagggaactgtagcaggtttggttgttggggagcttgagctttgccgtcgtgtatttatggtcctctatcgcatatcctcgaataaggatcctggagcaggtcgcggcgagtcccttagcatgaaggagcatgcagcccttctgctggagaaaaaattgcttgatctaccaaaattgttggacatatgtgctatatatgagcatgacaacggcaagttaacaagttcactggttacgaatgttattaatgtgcagccgagtgtactggatgacattaatattgtcattccccagttcctcaacattttccacacgatgcatgataggtgcatgacatctttacaggtgctcacctcaaccggatcaattgataatggatatgttcagcttcagaaagatttcatggaggtgttagattttataaatgatgcgattgttactctggattcttttgttggtgcttatcaacctgccgctttattgttctgtactaattttgaaatgagctatggagttgaggaattgctgaatgctcttgcaaggctgtatagttcattgctaccatcattgctccatgggtttaaagttatgcccaagtctcagagcaatgcagaggcatcacttgacagcacacttagtgacattcctcttgctataaggatgttgtcaaagagaacagcgagatttggttggagattgttgcactactgttatttgaatgatcaagttagggagcatgatgctcaaacttctactaagatgtttccagctaaagtcgaagatcctatgatcaggggagacatcttggttcaaacacttaaagatataaatagagaatccacttactcttctcaagtgaatcatggaaatacttttctccaagaacttgaaagtgaatttcaattaatgagccagattggtgatattcggaacaaaggatggatatacatggatgatgagcagttccagttcttatcacgattgtgtggatctactcacacttcttggaatggcatatctgatttgccagtctcttctcatggtggtgaattacagcagaaggatgaggaaacagcgatggttgagtccaaaattagtcagataagggatcttttccctgattatgggaagggtttcctttctgcttgtctggaagcctacaacctgaaccctgaggaagttatccaaaggatattagaaggaacacttcatcaagatctgctagctttggatacttcattagaagagatgccacacgaaaaacctgcaccaactgctgtgaaagataaagggaagggtatattggtggaaactgtgcctcaaattacaaagaaaccccataaagttgctgagacacattactttgttcaagatggcctatcttcagcaacttcatcagcatcacaaggtccatcttctgcaatttcaccagcatcccttgggccatcttctgcaatttcctcagcattccagggaccatcttctgctatttcatcagcatctctgggcccatcctcatccatatcatctgtcccaaaaggtagatttacaaggaaggccaatgatgatttgccggacactgcaatcctggactcgaaaaatgctaaaaatgcagctagatctgttatccttgactcgcaatatgagtatgaagatgagtacgatgattcatttgatgatcttggcttcagtgtggtagagtcaagttatgaggaaactgatggtgtcaatgacgctgaggcttcatcacatggcccaagatggagttcacagaagaaaccacagttttatgtcaaggatgggaagaattatagctacaaggttgctggttcggttgctgtatccagtgctcgagaagcagctgtcatgaggcaaactcaaaaagagacaatctatggtctgggtcgtggtggaaatgttccttttggtgtcccgaacaggcaacatatagatgtggaggcagaggaggttggtgatgctgacaactcaggcagaggttcaaattcccgtggccggggaagaaaaggcggaagggaaggcaaccgtccggaggagaatgagagctccaatggacgaggctctggctttggtggtaaaagaggaggctggagtcagggcaatccggctgaggaaaactggaaccctaatggtcaacaaggttttggccgtggtggcagaagagggggctggaatcagggtggcccagcgaaggaagacggtaactctagtggcaggcaagaaagttttggccgtggagcaagacggggcagcatgaaccatgaccaatcagccgaggataatgaaggccataataatcccgcacaagactttactcgaggaccagctcctcgtggtggccatggaaggggaggtggccggaaccatcacaggagagatcgggcaatgaagaagcatatgcaaggattgacagggctttagctgctggtagccttatgcttttgatgtgccgtactgtaaatggcatttttggaggcactcctacttgaccatccaaatttttgtgcttgttctgtttttaaatcaaataacgccatgaagtaacccacatatgttctcgtaacatttgtgattgccctaaaaagggtaatagtgtatgtagttctaaacatgcttgtaactcgttaaatacataattaattctctagcgactgaaaagaaaaatcatgaaaccaa

SEQ ID NO: 220866 - DNA, 2981 bp, Zea Mays
caaatgttaagatgtaaccgcataaggatatgtcatgtgcccaagattctcgaacagaagttacctcaataatcgatagttcaataaatagattagtttgtatgattaatttactatgttgttcttacacaactggtacataaattcagctacatctaaacttagtcaatgacatatgctaacttttgttgtttttcacagtggcacagaacacttctttgcatgaattccttgatagttatctacaattcaggcacaggtggtatgatttgccacaccgaggcccaaagggaactgtagcaggtttggttgttggggagcttgagctttgccgtcgtgtatttatggtcctctatcgcatatcctcgaataaggatcctggagcaggtcgcggcgagtcccttagcatgaaggagcatgcagcccttctgctggagaaaaaattgcttgatctaccaaaattgttggacatatgtgctatatatgagcatgacaacggcaagttaacaagttcactggttacgaatgttattaatgtgcagccgagtgtactggatgacattaatattgtcattccccagttcctcaacattttccacacgatgcatgataggtgcatgacatctttacaggtgctcacctcaaccggatcaattgataatggatatgttcagcttcagaaagatttcatggaggtgttagattttataaatgatgcgattgttactctggattcttttgttggtgcttatcaacctgccgctttattgttctgtactaattttgaaatgagctatggagttgaggaattgctgaatgctcttgcaaggctgtatagttcattgctaccatcattgctccatgggtttaaagttatgcccaagtctcagagcaatgcagaggcatcacttgacagcacacttagtgacattcctcttgctataaggatgttgtcaaagagaacagcgagatttggttggagattgttgcactactgttatttgaatgatcaagttagggagcatgatgctcaaacttctactaagatgtttccagctaaagtcgaagatcctatgatcaggggagacatcttggttcaaacacttaaagatataaatagagaatccacttactcttctcaagtgaatcatggaaatacttttctccaagaacttgaaagtgaatttcaattaatgagccagattggtgatattcggaacaaaggatggatatacatggatgatgagcagttccagttcttatcacgattgtgtggatctactcacacttcttggaatggcatatctgatttgccagtctcttctcatggtggtgaattacagcagaaggatgaggaaacagcgatggttgagtccaaaattagtcagataagggatcttttccctgattatgggaagggtttcctttctgcttgtctggaagcctacaacctgaaccctgaggaagttatccaaaggatattagaaggaacacttcatcaagatctgctagctttggatacttcattagaagagatgccacacgaaaaacctgcaccaactgctgtgaaagataaagggaagggtatattggtggaaactgtgcctcaaattacaaagaaaccccataaagttgctgagacacattactttgttcaagatggcctatcttcagcaacttcatcagcatcacaaggtccatcttctgcaatttcaccagcatcccttgggccatcttctgcaatttcctcagcattccagggaccatcttctgctatttcatcagcatctctgggcccatcctcatccatatcatctgtcccaaaaggtagatttacaaggaaggccaatgatgatttgccggacactgcaatcctggactcgaaaaatgctaaaaatgcagctagatctgttatccttgactcgcaatatgagtatgaagatgagtacgatgattcatttgatgatcttggcttcagtgtggtagagtcaagttatgaggaaactgatggtgtcaatgacgctgaggcttcatcacatggcccaagatggagttcacagaagaaaccacagttttatgtcaaggatgggaagaattatagctacaaggttgctggttcggttgctgtatccagtgctcgagaagcagctgtcatgaggcaaactcaaaaagagacaatctatggtctgggtcgtggtggaaatgttccttttggtgtcccgaacaggcaacatatagatgtggaggcagaggaggttggtgatgctgacaactcaggcagaggttcaaattcccgtggccggggaagaaaaggcggaagggaaggcaaccgtccggaggagaatgagagctccaatggacgaggctctggctttggtggtaaaagaggaggctggagtcagggcaatccggctgaggaaaactggaaccctaatggtcaacaaggttttggccgtggtggcagaagagggggctggaatcagggtggcccagcgaaggaagacggtaactctagtggcaggcaagaaagttttggccgtggagcaagacggggcagcatgaaccatgaccaatcagccgaggataatgaaggccataataatcccgcacaagactttactcgaggaccagctcctcgtggtggccatggaaggggaggtggccggaaccatcacaggagagatcgggcaatgaagaagcatatgcaaggattgacagggctttagctgctggtagccttatgcttttgatgtgccgtactgtaaatggcatttttggaggcactcctacttgaccatccaaatttttgtgcttgttctgtttttaaatcaaataacgccatgaagtaacccacatatgttctcgtaacatttgtgattgccctaaaaagggtaatagtgtatgtagttctaaacatgcttgtaactcgttaaatacataattaattctctagcgactgaaaagaaaaatcatgaaaccaa

SEQ ID NO: 220867 - DNA, 2820 bp, Zea Mays
caaatgttaagatgtaaccgcataaggatatgtcatgtgcccaagattctcgaacagaagttacctcaataatcgatagttcaataaatagattagtttgtatgattaatttactatgttgttcttacacaactggtacataaattcagctacatctaaacttagtcaatgacatatgctaacttttgttgtttttcacagtggcacagaacacttctttgcatgaattccttgatagttatctacaattcaggcacaggtgcccttctgctggagaaaaaattgcttgatctaccaaaattgttggacatatgtgctatatatgagcatgacaacggcaagttaacaagttcactggttacgaatgttattaatgtgcagccgagtgtactggatgacattaatattgtcattccccagttcctcaacattttccacacgatgcatgataggtgcatgacatctttacaggtgctcacctcaaccggatcaattgataatggatatgttcagcttcagaaagatttcatggaggtgttagattttataaatgatgcgattgttactctggattcttttgttggtgcttatcaacctgccgctttattgttctgtactaattttgaaatgagctatggagttgaggaattgctgaatgctcttgcaaggctgtatagttcattgctaccatcattgctccatgggtttaaagttatgcccaagtctcagagcaatgcagaggcatcacttgacagcacacttagtgacattcctcttgctataaggatgttgtcaaagagaacagcgagatttggttggagattgttgcactactgttatttgaatgatcaagttagggagcatgatgctcaaacttctactaagatgtttccagctaaagtcgaagatcctatgatcaggggagacatcttggttcaaacacttaaagatataaatagagaatccacttactcttctcaagtgaatcatggaaatacttttctccaagaacttgaaagtgaatttcaattaatgagccagattggtgatattcggaacaaaggatggatatacatggatgatgagcagttccagttcttatcacgattgtgtggatctactcacacttcttggaatggcatatctgatttgccagtctcttctcatggtggtgaattacagcagaaggatgaggaaacagcgatggttgagtccaaaattagtcagataagggatcttttccctgattatgggaagggtttcctttctgcttgtctggaagcctacaacctgaaccctgaggaagttatccaaaggatattagaaggaacacttcatcaagatctgctagctttggatacttcattagaagagatgccacacgaaaaacctgcaccaactgctgtgaaagataaagggaagggtatattggtggaaactgtgcctcaaattacaaagaaaccccataaagttgctgagacacattactttgttcaagatggcctatcttcagcaacttcatcagcatcacaaggtccatcttctgcaatttcaccagcatcccttgggccatcttctgcaatttcctcagcattccagggaccatcttctgctatttcatcagcatctctgggcccatcctcatccatatcatctgtcccaaaaggtagatttacaaggaaggccaatgatgatttgccggacactgcaatcctggactcgaaaaatgctaaaaatgcagctagatctgttatccttgactcgcaatatgagtatgaagatgagtacgatgattcatttgatgatcttggcttcagtgtggtagagtcaagttatgaggaaactgatggtgtcaatgacgctgaggcttcatcacatggcccaagatggagttcacagaagaaaccacagttttatgtcaaggatgggaagaattatagctacaaggttgctggttcggttgctgtatccagtgctcgagaagcagctgtcatgaggcaaactcaaaaagagacaatctatggtctgggtcgtggtggaaatgttccttttggtgtcccgaacaggcaacatatagatgtggaggcagaggaggttggtgatgctgacaactcaggcagaggttcaaattcccgtggccggggaagaaaaggcggaagggaaggcaaccgtccggaggagaatgagagctccaatggacgaggctctggctttggtggtaaaagaggaggctggagtcagggcaatccggctgaggaaaactggaaccctaatggtcaacaaggttttggccgtggtggcagaagagggggctggaatcagggtggcccagcgaaggaagacggtaactctagtggcaggcaagaaagttttggccgtggagcaagacggggcagcatgaaccatgaccaatcagccgaggataatgaaggccataataatcccgcacaagactttactcgaggaccagctcctcgtggtggccatggaaggggaggtggccggaaccatcacaggagagatcgggcaatgaagaagcatatgcaaggattgacagggctttagctgctggtagccttatgcttttgatgtgccgtactgtaaatggcatttttggaggcactcctacttgaccatccaaatttttgtgcttgttctgtttttaaatcaaataacgccatgaagtaacccacatatgttctcgtaacatttgtgattgccctaaaaagggtaatagtgtatgtagttctaaacatgcttgtaactcgttaaatacataattaattctctagcgactgaaaagaaaaatcatgaaaccaa

SEQ ID NO: 220868 - DNA, 1271 bp, Zea Mays
gacttttatccttcggactgtgctaaggcccccgcaaaccgccgccacggcgaggtcgtgccgccgccatgtacgcctcgcgctcccgccactttctcctcagcgttcgaaccgccaaccatggcatcctcctccgcagcccgacctcctacgtgtcccctaccgggtgcggcgtcagcgcgcagcggcactacaaccaccagcagcgggaggacgagtgggaggagtccaaggcggtgaaggtgacggtctggtgggacttccagaggtgccgcctccctcgccgcgccagcccgcgccacctctccccgcgcgtcacggaagcgctgcggtgcgccggcatccgagggcccgtcgagatcaccgccttcggcgacgtcagccacatcccgctcaccgagcaggaggcgctcgctgacaccggcgtcatcttgtcgcacgtcccttccaatcctctaccagatgatggaggtcctgctgtggttggggttttcaagagatctgaggattctgctcaaagtcacattcaagaaaaatgccacaaggaaggtgagagtgaggagccatcaccacgtccaaaaaagagaactcttcaagtggaagtcccatcatccccaccagatgagtcatctagagacaacaggaaagcacctgggtctactcaacgaccggagccaccttccatacatgtggaagctgatgttactcggactgtggaagttccatcaccaccgtctgattcaccatgtatggaccaaaggaatgatgtagctgttgatcctgttatgcaaacagaacgaccagtcaacttgatggaagctgataaggcgaatgctgctggtggtccttcctcgtcaggggggcaaggtaatatcagcaagaaaaggggtttcttggaacgcatatcatctttatggaatggccaaaaggattaggtttcatgtcatctcttctaaagcatcaatgaataagtagaatagataatgtagaatagtcgttcagaggtgtagtgactacagcacaggaacaagatgagtgttcatctgaatatatgcttagcaaagcgagaattggtatggaaagatcattgtgtttcttttcttttttgttttttgggtgaggaagaggagtttattattcatgtatgctaatcaaggtttaacatatgctgtaaaaagaggattgtattcatttactactcagtgtacgtaaaaccttgttttcataaggatagatgctaatgcagcgagatgttctcatctgatcagaaa

SEQ ID NO: 220869 - DNA, 6049 bp, Zea Mays
atgatgacttgactccttgagcctccttcccagctcacttttctcttctctcccttgccaatggtgtgtcagtgtctttccttcctactcagtattagctagctgcaacatgcatggtttttttgcccccttcatgattgatatattcgtcgtcagaaaagaagaaaaaaatgtgtgttttattaaacacagtcacacagatgtgtgtattctttgcaggttaataacacagctttgtttgttcttattattattagttacaacagcagtaggtggcaatggcaaacaagaacctgggttccaccgcggtctggcagatggtaacaaagggaggcactggacccaaggcaaggaatgaaggggaagggcggacaagaccgcatgcggagatgagaggaaagggtgaggcaacaagagcaagagacgagacagaaccctcgctgtccatcctcccacgacagagatggcatgtctgcccctccaagctccaactccatccagcgagctggacctggaggagactggacccagagagggacatcatcagaccagaccagaacaggcgtgggaccgtgggtgccgttgccttgccttcatcacatggttacatacaaagaaagaagatgtggatgctcgatgcccagccagctaataaactttcttaaagtctataatatctacatcttatcaataggctttctgtaaaaatatattttattttaatctaatactccatccgtatcaaaataaatttcgttttaagtcaacggtgaattcatcaaagacttgagggatgtattttacatatgtgtctagatttatcctcgttcgcttgaatatatagtcatttgatgaaaaaggagaggggggatcgagacaggcgggatatatataacgaacataggaggatatggagggcgctgcggggccagctagaaaaaggtcggggatttagaccctggatggctttgcttgatctgcttttcgatgatgccattggtcgtgtaattaatagacagtatggcagacggttcgcggcatgcagtaatgcaaagcttcttctctcatgatgcttcggtctttatcagaagctagtagctggtatagcagatccgtacgattgatggattggtacttgctcatcctcgataccttgggacagttgtagtgagaaataacacaaaacggcccaaattcatcgatagatcgatttagggtgttcgaatttcgatacccttccttgttccttcacacagacacagtgacacagcgcacgccacatgctttgtgtcatgccaaggccaaggctctaacgggacggtacaactgccacggacaatgaacagggaggaggggttgcatgtggccagcagcgagagagagagagctcaaagcaggcaggcaggcaggctcgtcgggctcatgagttgctttcattcagttcctgacgaactggaggccgttggcccgggagtaccgctccatgaagcgcatgaagcggtcccactcctgaggcgtgcgcatcacgtacttggcctcgatccgcgccggcttgccgttcacgaacttggcgctcacgtccacggactgcagcacgccctcgtcgtccaccatgtaaaagcccgtgatgtcgcccagctccgccgacgagtcgaacaccgacggacgctcgaacgcgaagacggccacgccgttggtgccgtcgcgggacttggtcagccgcacgtccgggaccgtctgctcgtccgtgccctggatgaactggatcgcaggccggcccgccatcgccaccacctgcgcccgccgccatcgcccagggcactgaaccgacgatacgccgtggaacaacgactgcaggtgcaggctcaagttctgctgttgatgctgctggctagggacacctgcgacgtggtaccgacggggatgctgtgctgcccgtgccgacaccggcgaggcgacagcaagagccttcatcactgcggccatccctagctaggggtggtctctgtgactctcgagtgagaggcaggcagctagctgtccggggaagctgcagccagaaagggagcgctggtgtggtgtctgggaggaggtggaggacgggtgaaatgcagaggggagcagcgggtttgagtggtgcagagtgggacgagatactacgatagtgattgggtggcggtgtgttcaaaagacagccatccatcatccagattccagagggattctattgcaggcaggccctatcttcttctcctcctcctcctcctcctcccgatgacaattgacaactgcttgcttctgctctccggtttcgcatatttgcacgtatgctcctgtttcttggtgggcccaccgcccttccttttcttctcctcacacatctcagcctgtcttcttcctttccttggatcatgagaaggcatgcatgcagttgtggctgtgtggtgccctcgtggcccatggaggcaccaggaatgacaaccggcgcttgagcggccagcagctttggcgggggtaactcgcaagcagtatcggctgccagcagttcctatattatctgcagccgccgcccaaaggccgtctccgttcctctctgcccttcatcttcttcgcccaaacaccatccagctgcccagcacaccatgttggaggaaggcaccctttataaaattaccatgttctggcagtaattttcaattagtgaagtgaaacatacacgacctggagtttttcctccgcagttgtatgcttgcacagttagttaaaaaaaaactggtcagaaacagcagtggaatttaagtactagtattgcataatttgcatttgaagaaaaaggagaagtagaaaagttatgccatgtaggatttggatcatggtctagctaaaccttatgaacacagggtacaaagagtagacagcgtacttacgaataagataccactataccagcgtgcaacttgcagctcataattgagacggcttgtgagaagaacttgggaagttgacaaacattcatggcgattcgtcatattgtatggcttccatggtttatgacccaccgcttaaccaacagtgctacgaccatggggcttcaccagccctttatcttgcaaaacgctcctaacttgggccacaccactccacatgtctttgtatgcataaaggtttgctgcagttacataataaccgctatttccaggctccaaatgtagcaaatgttttgcgatggattcgcccatcttgagttcactcctgctactgcaagcatttaacagtgcgccccaaattccgtgtgtttgttgagacggcaagctctccacaaacttgtgcgcttcctgcagccgaccagcccgcccaagcatgtctacaatgcagacatggtgctctggggctggtgtgatcccaaacttttctgacataaggcaataatacttccacccttcatcaacaagtccagagtgactgcaagctgacagtagagcaataaatgtgcttttcgtggctttcattccagaatcatgcatcttccagaaaagatctatagatttcatcccatggccatggaatccaaaagctgatatcaaggagttccacccggcaatcgatttttcggcagaagcttcaaatactctgacagcaatgtccagtctcccacacttgcaatacatatcaacaagtgatgctgaaataaaaacattattgtgcagaacagacctgaacacatgcccgtgtatgctctttccttgtctataaccaccaagctgtgtgcaagcacagatgataccgacaacagatatttcattaggttcgaaatcctccatcttctgatagaactgcaatgctctccagcctttgttattctgtgcaaagccagagatcatacagttccaggagcacaaatttgtgtctcccatgctataaaagactaactcagcacttctagtatctccaaagcgaaaatacatggtcaataatgaatttttcaccctcaaattggaagcaaacaagtgcttcaggatcatgcagtggatggatttcccaagtgctagtagattaagatctccacatgctgataagacactaactattgtaatactgtcagggtttatggccaaagaacaatacatgaaccgaaagatttccaatgcatctttatggagttcattttgcagacacccaactatgaccgtattccaggaaatgatatctgataccggtattattctttcaataagcgaaaaggcggccagtggatcaccacagctcatatacatgtgtatcaaagcattaacagccgaaaccccactagatgtaaatccacacttcaggctgaaagagtgaagtgctttcccaaagctaagttcttccggaatggagcatgatggtatgacagctagcatagtggccaagctgcacgatgaaccttcagaaagtaatcctttgaacattaactgagcctcttctctcagtgggccatatcttgagtaaccagaaatcattgtgttccacgatatcaagtcccttcttggcattgtcataaacaacaggcctgcattagatggttcgtcacatttcaaatacagatcgagtaagctatttcccatggaaggctcctcacgaagaagtccttttctgattacgtatccatggagtgtttccccttcagaaagtaggccttgatcagcacagcctgaaactatggtcaccaaagtggcgacatctggctggttctccaatctcatttgcctcaaaacagcaagggcctcggttactctttcattctggactagacccttgatcatagcattccatgataccaaattcctgttcaaattgctggcgaagaccttcttcgcagcctctggcattccaaactcagagtagaacgtcacgagagaattcgctactgagcaagacgcggtgtcctcataaccgagtttgactgcacagctatgcacagactccccaaaggagaagagatcatccagacgagagcaggctgagaggacagaagagaggctcacctcatctggctggaagatggagcaactcatttccctgaagtagcacgctgacacctcagcgagcccgttaaaaatgctcccacttatgacagagttccatgaggtggtgtccctgcacggcatgctatgaaacacaacctctgcggacctaaactcaccacactttgcatacatgtcaacgagagcgttccacgcgccgagacaatgagcgccgagacaactcttggccgccatgccatggagctccattccacgccgaaggttacccgcgcgggacgcccccgacagcatgacgaccacggtggtggagtcaaactccccgagctcgcgcgccatccgccggaacagagccgcggcgtcgtcgtaccggcagctcgtcgtcagggcgccgacggccgcgttccacaggatcacgtcgggcgcaacggcctcgcggaagagcgccagggcggcgcctgctccggctcccgctcccgcgccgcggccggccctggcgtacgccgcgagcagggacgtgcgcactggcgggtccagcacggcgcctgacttgagggccgcgcagtggaggcacgcgatgcaggccgtgtcaccggaggaggaagacggtgcggacgtgagggcacgtacgatggcggccgccctcccgcgcggcgtttcgtcgagcaggcggtgggcgtcgtccggcgcatggtggagcaaggccgcgcgggcggcgaggacggacgggggtctgaggagcgacgaggcgcggaggagattggcggcgagaaggccgggggtgtggcgtcgcatccaccgccgcggcgcgtcgagcttaggcggcggctgcggcgccgctcctgcattggaaggccgaggccggttatttgtgatcgttgagaattgacagctcagaagaggaaaggccggcgaagaaaagctacggaaactttggcccagcccaccaggatggaaagggattaagggagtccaactgttggctgtgccagttatggactataataataagctggattttgggccta

SEQ ID NO: 220870 - DNA, 2296 bp, Zea Mays
gcaccatttccaccgtatcactgcacggccgcgcgaaaatgtgcagcgccacaagtgcattccggccccgtgagtaatcgtaacagaggatcgctagctagtgtgctaccctgtacggcgcaggcgcagccatgagcaacagcggcaggtggcggaggaggacgaggtccgtagccccttcgccggccacctcttctccgtcgtctcctggcctccgagaagcgcagccgttccggcttccccagtggaagttctcccaggtcctcggcgaactgccgcccgcggccgaagcccgccgcgacggcgctccccgtccgcaggacgacgacgatgcggacgaaatctcggctatcgagttcgacggccgcggcgagtacttggccggcggcgacaacgccgggcgcgtcatcctcttccggaggaccgacggcgacggcgacgacgcgcggcctcgcgcggagcttgagcgcacggaccgtgccggagcgccgccgccgaggtacagctacgcgacggagttccagagccacgaacgggagttcgacgtgctggacagcttggacatcagcgagaggattaagaaggtgaggtggtgcgcgcggcccaacagctccctgctcatgctcgccgcgaacgaccgcacggtcaagctctggaagggcaggtctccgaacacaaggcggaggcgccgaagaaagggaacggtcggccgagttggggcaccgcggcgctgtcggcagccacgaaactgccgaggggctgttcgtctgcagagcctgacgaacgtcctgaaaaggcagcaggcgatgtcggagacggctactctgcgaaatgccggagagtcttcggccgcgctcacgagttcaacatccactccgtctcgaccaactgtgacggggagacgctggtgtccgcggacgacgtgcggatcaacctgtggcatgcggaggtgacgcgccagtgcttcaacatcgtggacatgaagcccgcggacatggaggacctcgtaggtgatttcgttgtttttcttcttgtccttccttacccaccgacgtacgtacgtacgtacgtaggagtggtatactagcatatgctgtcctccagtttgtgaaagccgcagcgatcactggcacttacattacattacatccgagattccgagtgttgtgttggttgggtgatgatgatgaagcagaggtgatcaccacggccgagttccacccgtcgtcctgcagcatgctggcctacggcagctccagcggcctcgtcaggctggtcgatctgcggcgatcggcgctgtgcgaccacagcgtgagaatgttccaggaccgcgagaaccgccctcagcccagcacatttttcagtgagataatctcctgcatcaccgaccttaagttcacaggcgacggggaacaccttctgactcgcgactacatgaacctcaagctctgggacctgcgcgtggaaacctcacccgtcgcaacgtacaaagtccacgagttccttcgcccaaagctgtcggagctgtacaccgacgactacatcttcgacaggttcggctgctgcgccagcaacgacggggcctacttcgctaccggatcttacagcaaaaccttcagagttttctcccgtgccgctgcgcagacatgcggcgctacgttggaggccagcaccaacccttacaggtcaggatggtcatccgaggtcagacggcaaggaacaagtctcgtgcaacatggcgtccaaggtgaagcatctagcatggcacccggcagaaaacttcatcgtttgcgcagccaatagcagcttgtacatgtaccatacataagcacgctcatgttatgtgtgcagagtgcaaatcacagaacagcgttcgtagctaattagattgaagccagaaaagaagatacttttcccatgttagggcttgttcggttattcccaatacacatggattatatgggattggaaaaaattgagaagaagtttgacttgtttgggattcaaaccaatccaatcccgctcaatccacatggattgagagctaaccgaacaagcccttacggttgcatgttgtgaacagggatattgaactgactgtacattgtcaaggatcttggatcttcagcagatcatagaaaggaaaagatactctcgtaacgaacgaaaggatcgcctccctgactgtcctttctgctcctcgatacatccttgcaatattcctgaatttcgaagggttgacctgcaactcagacttgctttgtgcattgattaaacatcatggaagcactgaaag

SEQ ID NO: 220871 - DNA, 2317 bp, Zea Mays
ccacggatgctcgagaaaccggactagcaccatttccaccgtatcactgcacggccgcgcgaaaatgtgcagcgccacaagtgcattccggccccgtgagtaatcgtaacagaggatcgctagctagtgtgctaccctgtacggcgcaggcgcagccatgagcaacagcggcaggtggcggaggaggacgaggtccgtagccccttcgccggccacctcttctccgtcgtctcctggcctccgagaagcgcagccgttccggcttccccagtggaagttctcccaggtcctcggcgaactgccgcccgcggccgaagcccgccgcgacggcgctccccgtccgcaggacgacgacgatgcggacgaaatctcggctatcgagttcgacggccgcggcgagtacttggccggcggcgacaacgccgggcgcgtcatcctcttccggaggaccgacggcgacggcgacgacgcgcggcctcgcgcggagcttgagcgcacggaccgtgccggagcgccgccgccgaggtacagctacgcgacggagttccagagccacgaacgggagttcgacgtgctggacagcttggacatcagcgagaggattaagaaggtgaggtggtgcgcgcggcccaacagctccctgctcatgctcgccgcgaacgaccgcacggtcaagctctggaaggtctccgaacacaaggcggaggcgccgaagaaagggaacggtcggccgagttggggcaccgcggcgctgtcggcagccacgaaactgccgaggggctgttcgtctgcagagcctgacgaacgtcctgaaaaggcagcaggcgatgtcggagacggctactctgcgaaatgccggagagtcttcggccgcgctcacgagttcaacatccactccgtctcgaccaactgtgacggggagacgctggtgtccgcggacgacgtgcggatcaacctgtggcatgcggaggtgacgcgccagtgcttcaacatcgtggacatgaagcccgcggacatggaggacctcgtaggtgatttcgttgtttttcttcttgtccttccttacccaccgacgtacgtacgtacgtacgtaggagtggtatactagcatatgctgtcctccagtttgtgaaagccgcagcgatcactggcacttacattacattacatccgagattccgagtgttgtgttggttgggtgatgatgatgaagcagaggtgatcaccacggccgagttccacccgtcgtcctgcagcatgctggcctacggcagctccagcggcctcgtcaggctggtcgatctgcggcgatcggcgctgtgcgaccacagcgtgagaatgttccaggaccgcgagaaccgccctcagcccagcacatttttcagtgagataatctcctgcatcaccgaccttaagttcacaggcgacggggaacaccttctgactcgcgactacatgaacctcaagctctgggacctgcgcgtggaaacctcacccgtcgcaacgtacaaagtccacgagttccttcgcccaaagctgtcggagctgtacaccgacgactacatcttcgacaggttcggctgctgcgccagcaacgacggggcctacttcgctaccggatcttacagcaaaaccttcagagttttctcccgtgccgctgcgcagacatgcggcgctacgttggaggccagcaccaacccttacaggtcaggatggtcatccgaggtcagacggcaaggaacaagtctcgtgcaacatggcgtccaaggtgaagcatctagcatggcacccggcagaaaacttcatcgtttgcgcagccaatagcagcttgtacatgtaccatacataagcacgctcatgttatgtgtgcagagtgcaaatcacagaacagcgttcgtagctaattagattgaagccagaaaagaagatacttttcccatgttagggcttgttcggttattcccaatacacatggattatatgggattggaaaaaattgagaagaagtttgacttgtttgggattcaaaccaatccaatcccgctcaatccacatggattgagagctaaccgaacaagcccttacggttgcatgttgtgaacagggatattgaactgactgtacattgtcaaggatcttggatcttcagcagatcatagaaaggaaaagatactctcgtaacgaacgaaaggatcgcctccctgactgtcctttctgctcctcgatacatccttgcaatattcctgaatttcgaagggttgacctgcaactcagacttgctttgtgcattgattaaacatcatggaagcactgaaag

SEQ ID NO: 220872 - DNA, 2489 bp, Zea Mays
cgataacaacaggcgagtggccacggatgctcgagaaaccggactagcaccatttccaccgtatcactgcacggccgcgcgaaaatgtgcagcgccacaagtgcattccggccccgtgagtaatcgtaacagaggatcgctagctagtgtgctaccctgtacggcgcaggcgcagccatgagcaacagcggcaggtggcggaggaggacgaggtccgtagccccttcgccggccacctcttctccgtcgtctcctggcctccgagaagcgcagccgttccggcttccccagtggaagttctcccaggtcctcggcgaactgccgcccgcggccgaagcccgccgcgacggcgctccccgtccgcaggacgacgacgatgcggacgaaatctcggctatcgagttcgacggccgcggcgagtacttggccggcggcgacaacgccgggcgcgtcatcctcttccggaggaccgacggcgacggcgacgacgcgcggcctcgcgcggagcttgagcgcacggaccgtgccggagcgccgccgccgaggtacagctacgcgacggagttccagagccacgaacgggagttcgacgtgctggacagcttggacatcagcgagaggattaagaaggtgaggtggtgcgcgcggcccaacagctccctgctcatgctcgccgcgaacgaccgcacggtcaagctctggaaggtatcgaaccaacgcaaatgcgtcgatgcttgctgtcgcctgtctccatgggaacatgtggtgtaacgggttctgtagctccagggcaggtctccgaacacaaggcggaggcgccgaagaaagggaacggtcggccgagttggggcaccgcggcgctgtcggcagccacgaaactgccgaggggctgttcgtctgcagagcctgacgaacgtcctgaaaaggcagcaggcgatgtcggagacggctactctgcgaaatgccggagagtcttcggccgcgctcacgagttcaacatccactccgtctcgaccaactgtgacggggagacgctggtgtccgcggacgacgtgcggatcaacctgtggcatgcggaggtgacgcgccagtgcttcaacatcgtggacatgaagcccgcggacatggaggacctcgtaggtgatttcgttgtttttcttcttgtccttccttacccaccgacgtacgtacgtacgtacgtaggagtggtatactagcatatgctgtcctccagtttgtgaaagccgcagcgatcactggcacttacattacattacatccgagattccgagtgttgtgttggttgggtgatgatgatgaagcagaggtgatcaccacggccgagttccacccgtcgtcctgcagcatgctggcctacggcagctccagcggcctcgtcaggctggtcgatctgcggcgatcggcgctgtgcgaccacagcgttccaggaccgcgagaaccgccctcagcccagcacatttttcagtgagataatctcctgcatcaccgaccttaagttcacaggcgacggggaacaccttctgactcgcgactacatgaacctcaagctctgggacctgcgcgtggaaacctcacccgtcgcaacgtacaaagtccacgagttccttcgcccaaagctgtcggagctgtacaccgacgactacatcttcgacaggttcggctgctgcgccagcaacgacggggcctacttcgctaccggatcttacagcaaaaccttcagagttttctcccgtgccgctgcgcagacatgcggcgctacgttggaggccagcaccaacccttacaggatacaattacatgctcctacgaagatcccagcgctgcttagcaatttctctctcggagttcatagaaaaggtcaggatggtcatccgaggtcagacggcaaggaacaagtctcgtgcaacatggcgtccaaggtgaagcatctagcatggcacccggcagaaaacttcatcgtttgcgcagccaatagcagcttgtacatgtaccatacataagcacgctcatgttatgtgtgcagagtgcaaatcacagaacagcgttcgtagctaattagattgaagccagaaaagaagatacttttcccatgttagggcttgttcggttattcccaatacacatggattatatgggattggaaaaaattgagaagaagtttgacttgtttgggattcaaaccaatccaatcccgctcaatccacatggattgagagctaaccgaacaagcccttacggttgcatgttgtgaacagggatattgaactgactgtacattgtcaaggatcttggatcttcagcagatcatagaaaggaaaagatactctcgtaacgaacgaaaggatcgcctccctgactgtcctttctgctcctcgatacatccttgcaatattcctgaatttcgaagggttgacctgcaactcagacttgctttgtgcattgattaaacatcatggaagcactgaaag

SEQ ID NO: 220873 - DNA, 533 bp, Zea Mays
cctagacgcatcgcggcggatcgtctttctccgtgctccgcctcgccggcctcgtgcggtcgtgccccgcagccccgactccccatccgccgcctccacctcatgggccaccgggtccaccctcgctgtccagcttggcgacatctttgaccgtggtgtcgacgagctccgcctcctcgccccttctgctgaggcccacgtcggcgtatttctgccatagtcgacaaccaataggagcgtaaaactggagctagggattgcatttgttgcaggtacatgtcatacatgaatggacatgggcaggcactcccactgagggtgcttcttggctttgtctgcagaggcttgctgatacttggcataggatattgttaattccagtgacaggtggagtagttgtggatttgaccggcggaagcaaaagaagataacagactttcgtcaacatcatctggaatttattgaagagtgggatttggctgaggagaatgtgcatgaaaacgatgagttgcacaacaacagtgactacaggc

SEQ ID NO: 220874 - DNA, 538 bp, Zea Mays
tgcgcctgccgtccattactcctagacgcatcgcggcggatcgtctttctccgtgctccgcctcgccggcctcgtgcggtcgtgccccgcagccccgactccccatccgccgcctccacctcatgggccaccgggtccaccctcgctgtccagcttggcgacatctttgaccgtggtgtcgacgagctccgcctcctcgccccttctgctgaggcccacgtcggcgtatttctgccatagtcgacaaccaataggagcgtaaaactggagctagggattgcatttgttgcaggtacatgtcatacatgaatggacatgggcaggcactcccactgagggtgcttcttggctttgtctgcagaggcttgctgatacttggcataggatattgttaattccagtgacagatttgaccggcggaagcaaaagaagataacagactttcgtcaacatcatctggaatttattgaagagtgggatttggctgaggagaatgtgcatgaaaacgatgagttgcacaacaacagtgactacaggc

SEQ ID NO: 220875 - DNA, 2230 bp, Zea Mays
ccgtccattactcctagacgcatcgcggcggatcgtctttctccgtgctccgcctcgccggcctcgtgcggtcgtgccccgcagccccgactccccatccgccgcctccacctcatgggccaccgggtccaccctcgctgtccagcttggcgacatctttgaccgtggtgtcgacgagctccgcctcctcgccccttctgctgaggcccacgtcggcgtatttctgccatagtcgacaaccaataggagcgtaaaactggagctagggattgcatttgttgcaggtacatgtcatacatgaatggacatgggcaggcactcccactgagggtgcttcttggctttgtctgcagaggcttgctgatacttggcataggatattgttaattccagtgacaggtggagtagttgtgggtatgatgcatggattatttgagaactttgagtagataaagcaatcattatcatctcaaagggagggtttgatttcatggccgtgataccccctccctccttgtcaaagccatccaagccgcaattactttagggacagggtgttcacttgggctagaaagattctgtttttattgcacgacacatggcaacatgtccaagtagtccttaacttgattcatttagctggtagtgagcgtcttgctaaaagtggctccacaggtgaacttaggtgagtgtttggttaccatgtatttccagatcaatgacatactaaaattgttctttgcacatgtaaatacaaaaaaggtacatgtcttccctgtcgagccccaaaaataaatgacatgcaacccaataaatcctttttgtattttttataagaaatgacagaaaaaatcctcggcgttaaaataagtgaaagattctaacaaccactaattatcttccaaaaaatcaattattatttatgcaccaagttgtaacaatactaaaaccatattcctttcatctcattttatcagtttaacacaatagttttaataagttcaataccacactgaaaagagtgaaccaatgatttgtcatagactacaggcattagctctcttttgatactaaatccatattcctttcatcctttgatctcatttgatctgtttaatacattgattttagtatattcaacatcacactacaagcatggttattttttataaagatgcctaccattttttatcggtcaggcaacttctcaaaattgttccataacacaatatttaccaatctatacatccatacatcattcaggaatgctagatcttgatagcgagacaacgttcttcggtgtttttgatggtcatggaggtaatcacaatatgtgctttttatgttccgttgaattagactgcctacgaggaataccattatgccaagtatttatagaacctaactttaacattacacaacctcataccattgctttacttaagaagagtagctgtcaaattctgtacagaatacctgcataatcaagttctcaaaagtgaagcctattcagttggtgacctaggtcctactgtcctaataaagcttaaatatttgttatatgtatacaacaaacacaaagtttattgtgtaaatgctttgttgatagtggctttctaattgaacatatatccctataactgcatatatgtattgagtatgataatgttatctgcatttaaatggatctgtgggtaagactcatatgaatgaacagtcgtccagaggccattttgtatttaaattaaatatatccgaatctaatgaggtagaatggaacattcacaattatcataccaagatctactaaaatatagtgttccttatgctctctttcagactggcgacaatccctttttagacaaatattttgcatgctaaataactaatcctgagaaagtatagctcccatttttttggttgaagaaaacaggccaacccagccaaagagtcattaacttgattgattttgctgcaacgagcgttttgctaaaagtggttacataggtgatcgcttgaaggaaactcaggtcatcaaaacgccgacagtggtttagagacatcgctctcccttgatctgctgcacggcagacgaagggacgacagggcagagaagcgacgacacagagaattgaaaagaagaggatgagtctgttgctattcgcctctgtcctccgaccgaaggacacctgccctttatagacgggccgcaacaaccccttgattcgat

SEQ ID NO: 220876 - DNA, 2064 bp, Zea Mays
cctagacgcatcgcggcggatcgtctttctccgtgctccgcctcgccggcctcgtgcggtcgtgccccgcagccccgactccccatccgccgcctccacctcatgggccaccgggtccaccctcgctgtccagcttggcgacatctttgaccgtggtgtcgacgagctccgcctcctcgccccttctgctgaggcccacgtcggcgtatttctgccatagtcgacaaccaataggagcgtaaaactggagctagggattgcatttgttgcaggtacatgtcatacatgaatggacatgggcaggcactcccactgagggtgcttcttggctttgtctgcagaggcttgctgatacttggcataggatattgttaattccagtgacaggtggagtagttgtgggtatgatgcatggattatttgagaactttgagtagataaagcaatcattatcatctcaaagggagggtttgatttcatggccgtgataccccctccctccttgtcaaagccatccaagccgcaattactttagggacagggtgttcacttgggctagaaagattctgtttttattgcacgacacatggcaacatgtccaagtagtccttaacttgattcatttagctggtagtgagcgtcttgctaaaagtggctccacaggtgaacttaggtgagtgtttggttaccatgtatttccagatcaatgacatactaaaattgttctttgcacatgtaaatacaaaaaaggtacatgtcttccctgtcgagccccaaaaataaatgacatgcaacccaataaatcctttttgtattttttataagaaatgacagaaaaaatcctcggcgttaaaataagtgaaagattctaacaaccactaattatcttccaaaaaatcaattattatttatgcaccaagttgtaacaatactaaaaccatattcctttcatctcattttatcagtttaacacaatagttttaataagttcaataccacactgaaaagagtgaaccaatgatttgtcatagactacaggcattagctctcttttgatactaaatccatattcctttcatcctttgatctcatttgatctgtttaatacattgattttagtatattcaacatcacactacaagcatggttattttttataaagatgcctaccattttttatcggtcaggcaacttctcaaaattgttccataacacaatatttaccaatctatacatccatacatcattcaggaatgctagatcttgatagcgagacaacgttcttcggtgtttttgatggtcatggaggtaatcacaatatgtgctttttatgttccgttgaattagactgcctacgaggaataccattatgccaagtatttatagaacctaactttaacattacacaacctcataccattgctttacttaagaagagtagctgtcaaattctgtacagaatacctgcataatcaagttctcaaaagtgaagcctattcagttggtgacctaggtcctactgtcctaataaagcttaaatatttgttatatgtatacaacaaacacaaagtttattgtgtaaatgctttgttgatagtggctttctaattgaacatatatccctataactgcatatatgtattgagtatgataatgttatctgcatttaaatggatctgtgggtaagactcatatgaatgaacagtcgtccagaggccattttgtatttaaattaaatatatccgaatctaatgaggtagaatggaacattcacaattatcataccaagatctactaaaatatagtgttccttatgctctctttcagactggcgacaatccctttttagacaaatattttgcatgctaaataactaatcctgagaaagtatagctcccatttttttggttgaagaaaacaggccaacccagccaaagagtcattaacttgattgattttgctgcaacgagcgttttgctaaaagtggttacataggtgatcgcttgaaggaaactcaggttcaaggacccatgagtatccgaaatcttcccaaaactaaatgtt

SEQ ID NO: 220877 - DNA, 3980 bp, Zea Mays
gaacccatcgtctcacggacgccgaacccagaagccgccgacccctttcccgccgcacggatccaaaaccctagcccctcctcggcgtttttcccctcccggcgacggcgaggcggcggagatgatgcggcagcagcagcagcagcttccacctccgccgcagcacccgccgccccaagcctcctccgccgccggtggcggcggcggtggcgagttctaccgcggcccgccgatgcggcagctgtccgcggcgtcctccaccaatctcccgcccgactacgccgcacacccggcccccccgtcacagcagcagcatcagcctccttacgacgcttatggtgacagttttggtgctaaaaggatgcggaagcctgtccagcgacgaacagtggactacacaagcagtgttgtccgttatgttcaggctcgcatgtggcagcgggacgctagggatagattcacattgcagccaactccagcagctgtcctggatatgttaccttctgtcgcatatccagacaatccctcaacaagttttgctgccaaatttgtacattcgtcaatcaataagaaccggtgctctattaatcgtgtcttgtggacccctacaggccgtcgacttatcactggatcacaaagtggtgaatttacgctatggaatgggcaatcttttaactttgaaatgatacttcaggctcatgatctacctgtgagatcaatggtttggagtcacaatgaaaactggatggtgacgggagatgatggtggtgcaatcaagtattggcaaagtaacatgaacaacgtcaaagtgaataaaacagctcatagagaatcagttcgtggtttaagtttttccaggacagacttaaaattctgctcctgctccgatgaccgaacagtgaaggtttgggacttcgcaagatgccaagaggaaaaatcattaactggccacggttgggatgttaaaactgtcgattggcatcctacaaagtctttactggtttcaggtggcaaagactatcttgtgaaactttgggatgcaaaaagtggcagagagctgagctcattccatggtcataaaaatattgtgcattgcgtgaagtggaatcagaatgggaactgggtactgactgcctcgaaggatcagattattaagctgtatgatattagatccatgaaagagctgcaatccttccgtgggcacaccaaggacgtcactgcattggcgtggcacccatttcatgaagaatattttgttagtgggagctttgatggagctatatttcattggttagtcggccatgaagctccacagattgaaataagtaatgcacatgacagtagtgtctgggatctttcgtggcatcctgtaggctatctactttgcagtggaggcaatgatcacgctacaaagttctggtgtagaaacaggcctggtgatcttacccgtgatagatacaacagtggccaaatgcaaggttttggtgaccaacatgctgcttttggtgctcgtggtatgggtggattccagatgcctgaacctccaataacgcctggaccatttgctcctggattgtcacgcaatgaaggtaccatccctggcattggggttgcaatgaccttggcaggccagtcttttgatggatctgatggagagcagaggccatctattccgggtcttccacctgggcaacccccgctgccaccaggtcctcatccatcacttcttgggcagcaacaacagtatcaacagatacctcagcagcaacatccccagttttcgcagccaccacctccgaacatgccccaactgcaggcaccagctcacatgctttcacattcacaaggatctcggcctactcttccccagcttccaccaatgggtggaccatcagtgccatcacaagtgaacccaccgcttccgcctatgcctcacccaacggcaatgcatggttcacagagtcagatgatgccccaaatgccacagcacatgatgggcctaaatcagatgcatgctggttctgtgcctcctggtactgtacccccaatgggtgggttcccaagtgggatgggaaacatccaaggagcatcaggttcgtctggcgtacaaaattttcctatgggtggcatgtataatcggcctcagggacaaatggctccacaagggcaaatgacatccattcctggtctaagctcttaccagggaatgggtaatgttggccttacaccgccaccgccacagcacccgccgcctcgaggaggctcggcaacacagtgaccatccctggagcaaaacaaggattgtcaaacatttgaaaggctgcatcggacgcatccatggtggcctacaccacatccatcgtcttcagtcgtgctctcagccacatccaaccgcatgggcattaccacagcttggcccacctatcaaggcttacagagtttccttaaatgggttctccccttgtgatctgggctgcgctgctaaggccggcccgtttcgtcttgtgatgctgcggggctggcgacaaccaccagcagcatcgaagacaggaggagaaaggagaggtggtggggcgatggcagcgactgcggcggagggggtggccgcgacggcgctgcgagccgtgctggggcgggcgggtatggcggcggagcggtcggggtgcgccgcggaggcggtacgggttgtggcggtggggaagaccaagcctgtttcgatgctgcggcagctatacgacgcgggccaccgctgcttcggcgagaactacgtgcaggagttcgtcaccaaggccccccagcttccgcaagatacccggtggcattttatcgggcacctgcagagcaacaaagtgaaaccactgttagctgctgttccaaatcttgatatggttgagggcgtagacaatgaaaagattgctaaccacctagatcgagctgtcaacagtttgggaaggcagcctttgaaagttttggttcaagtgaacactagtggagaagaatgtgagtgcataataagtattgagaaatcagaactcttatctcttgattaattttcccgaacaaagcacttgtgctatttgtttccacatttgccttgatctgatagattataattgatattctttcattttgcaaccaattgctatatcagaagtcagtttattacttcagaagcataccttaaattacaagtgacaagtttggaaaataaaaagtaaaagcgaacttatgaccaagttcaaattattatcattctgcaatgtccacattcatctttcatataattagcttaccacgcagctgcaggttcatggactaaacattttcttttgttcagctaaatctggaatcgatccctccaaatgtgtcgaccttgctaagcatgtgaaactagcatgcccacacctaatattttcaggtctgatgacaataggtatgaaagactactcgtcaacaccagaaaattttaaggcattggttaattgtaagcttgaagtttgcaaggcccttgacataccaacagaacagtttgaactctccatgggaatgtctggtgactttgagcaagcgattgagatgggcagcacgaatgtgaggattggatcaaccatttttggaccaagggagtatccaaacaaaaggcagaactagtgagattcaacgcataagtgtcatctcaatacccagtcctcttgattaaccttttgcctatgtaagcatgatgctatgtataaatgcacatgtgaataggtaacatgtacaacctcatacaacactgtttgcagggggaggggggggaactctccatacaacagtacggcactgtataagaaattttgtgacatggccttgaatagaaatttcataaaaaaagttcttcctatcatccctcacctattctttccatgatgtttgacgctcacctgcagatttaaattagcattgtacttatatgcaatgagaagacatgtaattcttta

SEQ ID NO: 220878 - DNA, 3555 bp, Zea Mays
gaacccatcgtctcacggacgccgaacccagaagccgccgacccctttcccgccgcacggatccaaaaccctagcccctcctcggcgtttttcccctcccggcgacggcgaggcggcggagatgatgcggcagcagcagcagcagcttccacctccgccgcagcacccgccgccccaagcctcctccgccgccggtggcggcggcggtggcgagttctaccgcggcccgccgatgcggcagctgtccgcggcgtcctccaccaatctcccgcccgactacgccgcacacccggcccccccgtcacagcagcagcatcagcctccttacgacgcttatggtgacagttttggtgctaaaaggatgcggaagcctgtccagcgacgaacagtggactacacaagcagtgttgtccgttatgttcaggctcgcatgtggcagcgggacgctagggatagattcacattgcagccaactccagcagctgtcctggatatgttaccttctgtcgcatatccagacaatccctcaacaagttttgctgccaaatttgtacattcgtcaatcaataagaaccggtgctctattaatcgtgtcttgtggacccctacaggccgtcgacttatcactggatcacaaagtggtgaatttacgctatggaatgggcaatcttttaactttgaaatgatacttcaggctcatgatctacctgtgagatcaatggtttggagtcacaatgaaaactggatggtgacgggagatgatggtggtgcaatcaagtattggcaaagtaacatgaacaacgtcaaagtgaataaaacagctcatagagaatcagttcgtggtttaagtttttccaggacagacttaaaattctgctcctgctccgatgaccgaacagtgaaggtttgggacttcgcaagatgccaagaggaaaaatcattaactggccacggttgggatgttaaaactgtcgattggcatcctacaaagtctttactggtttcaggtggcaaagactatcttgtgaaactttgggatgcaaaaagtggcagagagctgagctcattccatggtcataaaaatattgtgcattgcgtgaagtggaatcagaatgggaactgggtactgactgcctcgaaggatcagattattaagctgtatgatattagatccatgaaagagctgcaatccttccgtgggcacaccaaggacgtcactgcattggcgtggcacccatttcatgaagaatattttgttagtgggagctttgatggagctatatttcattggttagtcggccatgaagctccacagattgaaataagtaatgcacatgacagtagtgtctgggatctttcgtggcatcctgtaggctatctactttgcagtggaggcaatgatcacgctacaaagttctggtgtagaaacaggcctggtgatcttacccgtgatagatacaacagtggccaaatgcaaggttttggtgaccaacatgctgcttttggtgctcgtggtatgggtggattccagatgcctgaacctccaataacgcctggaccatttgctcctggattgtcacgcaatgaaggtaccatccctggcattggggttgcaatgaccttggcaggccagtcttttgatggatctgatggagagcagaggccatctattccgggtcttccacctgggcaacccccgctgccaccaggtcctcatccatcacttcttgggcagcaacaacagtatcaacagatacctcagcagcaacatccccagttttcgcagccaccacctccgaacatgccccaactgcaggcaccagctcacatgctttcacattcacaaggatctcggcctactcttccccagcttccaccaatgggtggaccatcagtgccatcacaagtgaacccaccgcttccgcctatgcctcacccaacggcaatgcatggttcacagagtcagatgatgccccaaatgccacagcacatgatgggcctaaatcagatgcatgctggttctgtgcctcctggtactgtacccccaatgggtgggttcccaagtgggatgggaaacatccaaggagcatcaggttcgtctggcgtacaaaattttcctatgggtggcatgtataatcggcctcagggacaaatggctccacaagggcaaatgacatccattcctggtctaagctcttaccagggaatgggtaatgttggccttacaccgccaccgccacagcacccgccgcctcgaggaggctcggcaacacagtgaccatccctggagcaaaacaaggattgtcaaacatttgaaaggctgcatcggacgcatccatggtggcctacaccacatccatcgtcttcagtcgtgctctcagccacatccaaccgcatgggcattaccacagcttggcccacctatcaaggcttacagagtttccttaaatgggttctccccttgtgatctgggctgcgctgctaaggccggcccgtttcgtcttgtgatgctgcggggctggcgacaaccaccagcagcatcgaagacaggaggagaaaggagaggtggtggggcgatggcagcgactgcggcggagggggtggccgcgacggcgctgcgagccgtgctggggcgggcgggtatggcggcggagcggtcggggtgcgccgcggaggcggtacgggttgtggcggtggggaagaccaagcctgtttcgatgctgcggcagctatacgacgcgggccaccgctgcttcggcgagaactacgtgcaggagttcgtcaccaaggccccccagcttccgcaagatacccggtggcattttatcgggcacctgcagagcaacaaagtgaaaccactgttagctgctgttccaaatcttgatatggttgagggcgtagacaatgaaaagctaaatctggaatcgatccctccaaatgtgtcgaccttgctaagcatgtgaaactagcatgcccacacctaatattttcaggtctgatgacaataggtatgaaagactactcgtcaacaccagaaaattttaaggcattggttaattgtaagcttgaagtttgcaaggcccttgacataccaacagaacagtttgaactctccatgggaatgtctggtgactttgagcaagcgattgagatgggcagcacgaatgtgaggattggatcaaccatttttggaccaagggagtatccaaacaaaaggcagaactagtgagattcaacgcataagtgtcatctcaatacccagtcctcttgattaaccttttgcctatgtaagcatgatgctatgtataaatgcacatgtgaataggtaacatgtacaacctcatacaacactgtttgcagggggaggggggggaactctccatacaacagtacggcactgtataagaaattttgtgacatggccttgaatagaaatttcataaaaaaagttcttcctatcatccctcacctattctttccatgatgtttgacgctcacctgcagatttaaattagcattgtacttatatgcaatgagaagacatgtaattcttta

SEQ ID NO: 220879 - DNA, 1688 bp, Zea Mays
attaaacagttatactctcgtctcgccgtcgctatcgaggcgagctccgtggaagtttgctggctgctgaggctcgttcgaggcggtggaggacaggcaggcaggcagctctccgttcggcttggcttggcttggacggctgccgcgtcgcgcacctgcgggcgggcagtggccagtggctgggcggtccggggccggggcagccaggggcgtcgtcgcgctcgtagccactgaggtcggcggcggtggcaccgtggcagtgcggtgccgagaaaccgtcccaccaaggaggctggggcaccgaacagcgaacaacggaagaagagcagctgaacagctatgctcaccgcgcagccgccacctgaggtagcgggtgaggatgacagcagtttccaccatgtcttcgtggagtttatgaccaaagccgctcagttcgaggagctcgctgaatctggggagcgattgcttgggagattccgtgaggagcttggttagttgttctgatatgctttccttcctcttttgttggcacagctgatatgccatggaggttcagtttatatattatcccggacaccgttgaattgttaacattgtgatggtattatgtactgttaattgtgatgactgaggcactgagcaatcttattgcagagtattttcgtaggccccagattcctaaggaatcagatgtcatgaatcagatacttaaatccaactgcactgtcagaatgaggtcctatgttgaagctggctgcaggcttcactaccaaaacatctcaaacataaatcagtgtgagctatatagctttggcagtgaacaaccttttttattcttacatgctaatggttgatatgactcgcttatctgaatttgtcccgtacttgtttcttgccctgtctataaaagtacagactattgtgatttttagctaattctatgtattcttttgttattacaggatttatagttgaagtatgagctctagacaacatacttgttcaattttaatgataaataattccatacccttaatcagttagctattgttttttttccttgtgccagtaagctcatccgaagctggacttaaagatcatataaagaaagctaagactttgctcgaagaacttgaatgtctagtcgagaatgtctatggcatcacattaacatccagtttaagtgctctggaagtttcagacagtcattgcctcgacaacatgccaagcaccgattgctatgccatggaggaggataaacgagcagatcatttggacatggacgtatcgctcgttacggtgatggccatggttcgcaacatgctgaagcttgactacacgatgcaggagaagattgtcactgcattgtccttgaaaacaccagcatcggagctcgagggatactgcctcatgtgggatctacgcccgtacatcgatgacgacgtgatgcgtcttgcgtggaacatgtgtccttgaagcattggggctttgagttgtttctgctgggatggatgtctggtctgttcattattttcttatgtatgacaacgtggttgtgtgtgttcatggtcgtcttctggagacgagaaacacatgggtgttgtttggttcacataaattggtaactaataatattagattatgtttgtttaagttcaaccgtaatggataccacactacaaatggat

SEQ ID NO: 220880 - DNA, 1127 bp, Zea Mays
attaaacagttatactctcgtctcgccgtcgctatcgaggcgagctccgtggaagtttgctggctgctgaggctcgttcgaggcggtggaggacaggcaggcaggcagctctccgttcggcttggcttggcttggacggctgccgcgtcgcgcacctgcgggcgggcagtggccagtggctgggcggtccggggccggggcagccaggggcgtcgtcgcgctcgtagccactgaggtcggcggcggtggcaccgtggcagtgcggtgccgagaaaccgtcccaccaaggaggctggggcaccgaacagcgaacaacggaagaagagcagctgaacaggcaggggagaggttccagctatgctcaccgcgcagccgccacctgaggtagcgggtgaggatgacagcagtttccaccatgtcttcgtggagtttatgaccaaagccgctcagttcgaggagctcgctgaatctggggagcgattgcttgggagattccgtgaggagcttgtaagctcatccgaagctggacttaaagatcatataaagaaagctaagactttgctcgaagaacttgaatgtctagtcgagaatgtctatggcatcacattaacatccagtttaagtgctctggaagtttcagacagtcattgcctcgacaacatgccaagcaccgattgctatgccatggaggaggataaacgagcagatcatttggacatggacgtatcgctcgttacggtgatggccatggttcgcaacatgctgaagcttgactacacgatgcaggagaagattgtcactgcattgtccttgaaaacaccagcatcggagctcgagggatactgcctcatgtgggatctacgcccgtacatcgatgacgacgtgatgcgtcttgcgtggaacatgtgtccttgaagcattggggctttgagttgtttctgctgggatggatgtctggtctgttcattattttcttatgtatgacaacgtggttgtgtgtgttcatggtcgtcttctggagacgagaaacacatgggtgttgtttggttcacataaattggtaactaataatattagattatgtttgtttaagttcaaccgtaatggataccacactacaaatggat

SEQ ID NO: 220881 - DNA, 1701 bp, Zea Mays
attaaacagttatactctcgtctcgccgtcgctatcgaggcgagctccgtggaagtttgctggctgctgaggctcgttcgaggcggtggaggacaggcaggcaggcagctctccgttcggcttggcttggcttggacggctgccgcgtcgcgcacctgcgggcgggcagtggccagtggctgggcggtccggggccggggcagccaggggcgtcgtcgcgctcgtagccactgaggtcggcggcggtggcaccgtggcagtgcggtgccgagaaaccgtcccaccaaggaggctggggcaccgaacagcgaacaacggaagaagagcagctgaacaggcaggggagaggttccagctatgctcaccgcgcagccgccacctgaggtagcgggtgaggatgacagcagtttccaccatgtcttcgtggagtttatgaccaaagccgctcagttcgaggagctcgctgaatctggggagcgattgcttgggagattccgtgaggagcttggttagttgttctgatatgctttccttcctcttttgttggcacagctgatatgccatggaggttcagtttatatattatcccggacaccgttgaattgttaacattgtgatggtattatgtactgttaattgtgatgactgaggcactgagcaatcttattgcagagtattttcgtaggccccagattcctaaggaatcagatgtcatgaatcagatacttaaatccaactgcactgtcagaatgaggtcctatgttgaagctggctgcaggcttcactaccaaaacatctcaaacataaatcagtgtgagctatatagctttggcagtgaacaaccttttttattcttacatgctaatggttgatatgactcgcttatctgaatttgtcccgtacttgtttcttgccctgtctataaaagtacagactattgtgatttttagctaattctatgtattcttttgttattacaggatttatagttgaagtatgagctctagacaacatacttgttcaattttaatgataaataattccatacccttaatcagttagctattgttttttttccttgtgccagtaagctcatccgaagctggacttaaagatcatataaagaaagactttgctcgaagaacttgaatgtctagtcgagaatgtctatggcatcacattaacatccagtttaagtgctctggaagtttcagacagtcattgcctcgacaacatgccaagcaccgattgctatgccatggaggaggataaacgagcagatcatttggacatggacgtatcgctcgttacggtgatggccatggttcgcaacatgctgaagcttgactacacgatgcaggagaagattgtcactgcattgtccttgaaaacaccagcatcggagctcgagggatactgcctcatgtgggatctacgcccgtacatcgatgacgacgtgatgcgtcttgcgtggaacatgtgtccttgaagcattggggctttgagttgtttctgctgggatggatgtctggtctgttcattattttcttatgtatgacaacgtggttgtgtgtgttcatggtcgtcttctggagacgagaaacacatgggtgttgtttggttcacataaattggtaactaataatattagattatgtttgtttaagttcaaccgtaatggataccacactacaaatggat

SEQ ID NO: 220882 - DNA, 2686 bp, Zea Mays
gtccacggccgggtctgcctgcccagccttgcaagttggaagcgccacgtctcccggtcccgaccgccggcccagtcaaaagcaaaccctccggacacggccgcacggggcgcaggtccctctgttgccccgcttggtcgttgctcccgcgcccccgcccgcaaatgcctctcctctcgcgcgccttttcttgtcctgaagccacccaagccgtgcctgcccctcgctcgatctacccccctccttcctcggctagctccaagaacccgtcccacttctccacttcttggcaggtcgatcggccgtgaacgatttcggatcctgtcgcgcgcgcgtgtccatggcgtcgacggcggccaggcggctgcttctgccgctgctgctggtggcgctcatcgcggcgcaccgggcggcggcgcggttcgtggtggagaagaacagcctgcgggtcacgtccccggccgtgctccggggcgtctacgagtgcgccatcggcaactttggcatgccgcagtacggcggcaccatgcacggcgttgtcgtctaccccaaggccgacgccaaagcctgcaggcccttcgccgactccggcctctccttcaagcccaggtccggcggcctgcccgtcttcctgctcgtcgatcgcggagattgctacttcacaaccaagggatggaacgcacagaacgccggagctgcagcagttcttgtggccgacgacagagtggagcctctgatcacgatggactccccagaatccagcggcacggagcacatagagaacatcacgatcccatcggcgctcgtgaccaagagattcggcgaggacctgaggaaagcgctgcagagcggggacatggtgaacgtcctcctggactggagggagtccctgccccaccccgacgagcgcgtggagtacgagctctggacgaacagcaacgacgagtgcggcgccaagtgcgacatgcagatgagcttcgtgaggagcttcaggggcatcgcgcaggctctcgagaagagggggtcgcagtgcatcaaccacgggaggtactgcgcgccggacccggagcaggatttcagcaccggttacgacggcagggatgtcgtgctccagaacctggtccagatctgcgtgttcagggtcgccaatgggactcgcaggccgtggatgtggtgggactacgtgcacgacttcgctgtgaggtgcccgatgaaggagaagaagtacacgcgtgagtgtgcgaatggtgttatcaattcacttggactggacatcgagaaaatcaacaagtgtgttggagatccagaagctgataaagaaaatccagtccttaaggcagagcaggacgctcagattgggcatggttctcgcggcgatgtaactatactgcctactcttgtcgtcaacaacagacagtacagaggtaaactggaaaaaacatctgtgttaaaagcagtatgctctgggtttgaggagacaactgaacctgatgtctgtttgcgcgaagatatcgagacaaatgaatgtttggagaacaatggtggttgctggttagacaaggctaccaatgtttctgcgtgcaaggataccttccgtggtcgtgtctgcgaatgccctattgtgaatggtgtgaagtttatcggtgatgggtacaaccactgtgaagcttctggccttggtaggtgccagatcaacaatgggggctgctggaatgagactaggaacgggaagagtgtgtctgcctgctcaaaccaagaagctaaaggctgcaagtgcccagcaggtttcaagggcgacggagccaacagctgcgaagatgtggatgagtgcaaggagaagcttttctgccagtgcaaggactgcgcttgcgagaacacgtggggaagctacgagtgcagctgcggcggcggcaactcgctgtacatcagagagcatgacacttgcatcagcaaacattccagctcgacgccgagctggggcttcctgtgggtggttttcttgggccttgccttggccggagcaggagcgtacgccgtgtacaaatacaggctacggagctacatggattcagagatccgcgcgatcatggcccagtacatgcccctggagagccaagacatgccgagccaacaacaccacctcgtccccgtcgaccgtgcagacgtctgaaacggctaggcttgtttgcatgacatggatcccatcgcatcgtcggcagagaagagaagtcggcggcaccggcatcttcctcccttggtgcgcagaatatggatgctgaaaattcacagtttcacggagcagattaggatctctctccgcagtttagagcccgtttgtcaggtttagagctcgcagtcgtgctgtgccgtgcgtaaaagtaatcgtcgagtgttctgtaaatattcctgttgagacccaacgctgaagcgcgcgtctgttgctgtgctgccctgaataaaagtacagaggatgagaggaatatgtttctttatttctgttagttgcttcactcaaatgcagcacacatatagggacctctaatttatagacaaaagctagtgtttctgttatatgggtcacatggccttcttaggctacatggtttcttaatactccccttggctctatgagtgcgagatgcaatgcccgaaaactctatgaaaatctagtggaaataaattggag

SEQ ID NO: 220883 - DNA, 3601 bp, Zea Mays
ctgtaactccccctctcacagtactagagggcccacccctacccctgcccccaaatcgccaaatcctccccaccaccgcacgctggtcctgcccgtctcccgcccccgccggccgccggcgactggccgccgccatgggctccgaccgcgccgagctcgcgcgcctctgcagcgcccgcaactggtccaaggccatccgcctcctcgactccatcctggcccgatccccctcctccatccacgacctctgcaaccgggccttctgctactcccagctcgagctccacaagcacgtcgtcaaggattgcgaccgcgcactgctgctcgaccccgccctgctgcaggcctacatcctcaaaggcaaggcactgtcttcattagataaaaaagaggatgctctagctgcttggaagcaaggatatgaaattgctgtccgtgacacaacagacttgaaacaattgcttgatctggaagaattggtttcttctgttaaaatttgcgggacaacccagtctgcggaccatgtcatggatgcatcaacttgtgataccaaagttgttatctcagaagatcgtgttgctgacacgtcgttcgctgcaactacaatggctgatacaaaaactgttgtctgtgaagaggccattggcagttccaaagtttcatcaaatggtgataccaagttgacgaattataataaaaaagcggaccataataaagtctctagcagttcagtgaaagacatcacagggactcaagctcccaagaaggcaccgaagctagataagaaaaacaaagcaaaagctgtgaaagaaataaatggccgagctgaaggtgtaactggcagagctagtactgatgaaagtgaaactatttcactggatcaagcactctttgctacaaaaatttcaaagtcatcaaaatctataagcttggatttccgactttcaagaggcattgcacaggtaaatgaaggaagatatgaccaggcgatatccatttttgatcagatattgcgggaaactcctacgtatcctgaagcactgattggaaggggcacagcttatgcatttcaaagagaattggattctgctatttctgatttcaccaaggctatacaatctagcccatcggctggggaggcatggaagcgacggggacaagctcgtgctgctttaggagagttcaaggaggccattgaagacttgactaaagcattggaatttgaaccaaattctcctgatattttacatgaaagaggaattgtgaacttcaaattcaaggactacaactctgcactcgaagatctttcgacatgtgtgaagcatgacaagaagaacagctccgctcacacttatttaggtcttactctttcagcacttggagagtacaagcgtgctgaagatgagcatgtcattggtttaaagtatgacgagagtttccttgactgttgggctcaccttgcccagctttatcttgatttggcatatccagagaagttgttgaattgccttgagaaagctattcaaattgattcaaggttcgcaaaagcttaccatctgcgtggaattctctaccatggaatgggtcgacataggagtgctattaaagaattatcggttgctttgacatatgaaagttcaagtatagagtgcctatacttacgtgcctcaagccatcatgcaattggagaatataaagctgcgataaaaggttatgatgatgtacttgatttggaacttgattccatggataaatttgtgttgcaatgtttgtccttctaccagaaggaaatggctctgtatattgcttcaaaggccaatttagagttctctcagttcaacattgatgatgatgttgacccactatttaaggaatactggtgcaaacgactacatcccaaaaatgtggctgaaaaggtttatcgccagccaccgttgcggatctcattgagaagtgggcgccttaacaagcaagacttcaaattcacaaagcatcaaacaactcttcttctagctgcagattcaattgggaagaagattcaatacaattgtcatggcttcttaccaaatcaacgtcagtaccgcatggccgggttggctgctattgagattgctcagaaagtgtccaaggcttggcgctttctaaggaatccgaagaacatcgcaaagttagttaggaaaagggataaacttaacatgagccagaacaggggaggttattgtagcactagcactttggctggatctccaacttccagcccaaatgaagacagggtctcctccgggatctctctttcctggcaggatgtctataacattgctgttaagtggagacaaatttctgaaccttgtgatccagttgtttgggtcaataagctaagtgaagagttcaattctggatttggttctcataccccaatgcttcttggtcaagcaaaagttattcgctactatccatattaccaaagagtcttggaaactgcgaagactataatgcttgacttgaagtatgtcaataatgcagaggaccgtgcaatttttcttacagatattgacaagttgaaaaagatagaaattgcatcgtcatgctcagatttgtaccatgtagttggtgagacctactgggttgctacaagatgtgatagtatggcgtttcgggggaggcgccttgaagggacaagaattaccactcaaaacataggcaagacaggatttgactttgcaattcgaacaccttgcacgccatcgagatgggaggagtatgatgaagaaatgactgcagcctgggaggctatttgtgaggcatattgtaatgacacaaaccccacacgagaccctggtgtgcttgatgctgtgaaggacgcgatattgcggatgacatattactggtacaattttatgcctctttcgagaggctcggctgttgttggctacgtagtgttgctcggtttattcctggcagcaaacatggatattactgccagcattccacccggtgtccaagttgattgggaggcgatcctgtctccagatcccggcacatttgttgacgccgtgaagccctggttgtacccatccacaaaaataagcaggtgcctgaaagattacacggacgtcagctgcgcgttcagcacgacaggttcggttgtagcggccctaacatctgttgacccataggttatttgtccaagtgttataggttgctccagttgttagtgtatttgtttcaaaatacctcagctttgcttagcttgtcagaatttctcagtttgcaaaaagtttgtatgtttctgtgttgtatacagatatgcagtaatgttgtaacttgaaaaaaaataagatttattttcattggaacaagttttttttttttttttgtaataaacagttaaacaccaataagttttgcagttacttcttggatgtttgtatgccatggtatatggtcttgaacacttagcctagaggatttccctcttatttatagagctattactcaaggccttgtggtatttgacatttatcagagtccataagcacgaatccactactttcaccatcatcattgactgacttcgagctctacacatacgcaagtcaag

SEQ ID NO: 220884 - DNA, 4041 bp, Zea Mays
agtactagagggcccacccctacccctgcccccaaatcgccaaatcctccccaccaccgcacgctggtcctgcccgtctcccgcccccgccggccgccggcgactggccgccgccatgggctccgaccgcgccgagctcgcgcgcctctgcagcgcccgcaactggtccaaggccatccgcctcctcgactccatcctggcccgatccccctcctccatccacgacctctgcaaccgggccttctgctactcccagctcgagctccacaagcacgtcgtcaaggattgcgaccgcgcactgctgctcgaccccgccctgctgcaggcctacatcctcaaaggcaaggcactgtcttcattagataaaaaagaggatgctctagctgcttggaagcaaggatatgaaattgctgtccgtgacacaacagacttgaaacaattgcttgatctggaagaattggtttcttctgttaaaatttgcgggacaacccagtctgcggaccatgtcatggatgcatcaacttgtgataccaaagttgttatctcagaagatcgtgttgctgacacgtcgttcgctgcaactacaatggctgatacaaaaactgttgtctgtgaagaggccattggcagttccaaagtttcatcaaatggtgataccaagttgacgaattataataaaaaagcggaccataataaagtctctagcagttcagtgaaagacatcacagggactcaagctcccaagaaggcaccgaagctagataagaaaaacaaagcaaaagctgtgaaagaaataaatggccgagctgaaggtgtaactggcagagctagtactgatgaaagtgaaactatttcactggatcaagcactctttgctacaaaaatttcaaagtcatcaaaatctataagcttggatttccgactttcaagaggcattgcacaggtaaatgaaggaagatatgaccaggcgatatccatttttgatcagatattgcgggaaactcctacgtatcctgaagcactgattggaaggggcacagcttatgcatttcaaagagaattggattctgctatttctgatttcaccaaggctatacaatctagcccatcggctggggaggcatggaagcgacggggacaagctcgtgctgctttaggagagttcaaggaggccattgaagacttgactaaagcattggaatttgaaccaaattctcctgatattttacatgaaagaggttacttactcttgcactcatgtttgaattcttactagcaaagtgcccacacgttgttatggtttccatttatgcttgaatatagagtataaaacacaaatacatgtgtgttctcttggctgggtgggtgtgaatatgggtttggactttggagccaacaaccatagtttgaatctccatttgtgtatcattttagcttttttaccgttgaaatgtggaagtgaaggttaacgcaagggaaggggtgacacaagatgacgatggaaactgatgctttatatagagagattgccattgatgccacttgccatttctcgtatatcttttgatgggaacaaaacgacaccaagtctttatgctcacttcatgtctatacagtaataaagctgtataactatgcttctaggtctggaatgccatcttcacatttttctgatagcatatcttgactcacaataggaattgtgaacttcaaattcaaggactacaactctgcactcgaagatctttcgacatgtgtgaagcatgacaagaagaacagctccgctcacacttatttaggtcttactctttcagcacttggagagtacaagcgtgctgaagatgagcatgtcattggtttaaagtatgacgagagtttccttgactgttgggctcaccttgcccagctttatcttgatttggcatatccagagaagttgttgaattgccttgagaaagctattcaaattgattcaaggttcgcaaaagcttaccatctgcgtggaattctctaccatggaatgggtcgacataggagtgctattaaagaattatcggttgctttgacatatgaaagttcaagtatagagtgcctatacttacgtgcctcaagccatcatgcaattggagaatataaagctgcgataaaaggttatgatgatgtacttgatttggaacttgattccatggataaatttgtgttgcaatgtttgtccttctaccagaaggaaatggctctgtatattgcttcaaaggccaatttagagttctctcagttcaacattgatgatgatgttgacccactatttaaggaatactggtgcaaacgactacatcccaaaaatgtggctgaaaaggtttatcgccagccaccgttgcggatctcattgagaagtgggcgccttaacaagcaagacttcaaattcacaaagcatcaaacaactcttcttctagctgcagattcaattgggaagaagattcaatacaattgtcatggcttcttaccaaatcaacgtcagtaccgcatggccgggttggctgctattgagattgctcagaaagtgtccaaggcttggcgctttctaaggaatccgaagaacatcgcaaagttagttaggaaaagggataaacttaacatgagccagaacaggggaggttattgtagcactagcactttggctggatctccaacttccagcccaaatgaagacagggtctcctccgggatctctctttcctggcaggatgtctataacattgctgttaagtggagacaaatttctgaaccttgtgatccagttgtttgggtcaataagctaagtgaagagttcaattctggatttggttctcataccccaatgcttcttggtcaagcaaaagttattcgctactatccatattaccaaagagtcttggaaactgcgaagactataatgcttgacttgaagtatgtcaataatgcagaggaccgtgcaatttttcttacagatattgacaagttgaaaaagatagaaattgcatcgtcatgctcagatttgtaccatgtagttggtgagacctactgggttgctacaagatgtgatagtatggcgtttcgggggaggcgccttgaagggacaagaattaccactcaaaacataggcaagacaggatttgactttgcaattcgaacaccttgcacgccatcgagatgggaggagtatgatgaagaaatgactgcagcctgggaggctatttgtgaggcatattgtaatgacacaaaccccacacgagaccctggtgtgcttgatgctgtgaaggacgcgatattgcggatgacatattactggtacaattttatgcctctttcgagaggctcggctgttgttggctacgtagtgttgctcggtttattcctggcagcaaacatggatattactgccagcattccacccggtgtccaagttgattgggaggcgatcctgtctccagatcccggcacatttgttgacgccgtgaagccctggttgtacccatccacaaaaataagcaggtgcctgaaagattacacggacgtcagctgcgcgttcagcacgacaggttcggttgtagcggccctaacatctgttgacccataggttatttgtccaagtgttataggttgctccagttgttagtgtatttgtttcaaaatacctcagctttgcttagcttgtcagaatttctcagtttgcaaaaagtttgtatgtttctgtgttgtatacagatatgcagtaatgttgtaacttgaaaaaaaataagatttattttcattggaacaagttttttttttttttttgtaataaacagttaaacaccaataagttttgcagttacttcttggatgtttgtatgccatggtatatggtcttgaacacttagcctagaggatttccctcttatttatagagctattactcaaggccttgtggtatttgacatttatcagagtccataagcacgaatccactactttcaccatcatcattgactgacttcgagctctacacatacgcaagtcaag

SEQ ID NO: 220885 - DNA, 1923 bp, Zea Mays
gcccgtccccatccaatttcttttcccggccaagttaccgccggacaaaaagacgggaaaaaaaacacggcggaccaccacgcctgttctcagtcacgctagtagtaggaaatcctagcgcgtcgctgcttccattaccgcctccgcaaccagcccgccgcgcccccgagcgtttcgttccgggagcggcaagactgggacacgccagccctttatttcgagctttctgcgtgcgggaggggggttgacaggcgatggcggccgagggcgaggcggcggcgctggagttcacaccgacgtggatcgtcgcggcggtctgctctctcatcgtgctcctctcgctcgtcgccgagcgatgcctccactacctcggcaagacgctcaagaggaagaaccagaagccgctcttcgaggcgctgctcaaggtcaaagaagagttgatgcttctggggttcatctccctgctgctgacggtgttccaggggatgatccggaggacgtgcatccctgaacgctggacattccacatgctgccatgcgagaagccagatgagaaggccggtgaggccgccaccatggagcattttgtagggacgcttggcaggatcggtaggcgtctgttgcaggaaggcactgctggggctgagcaatgccagaagaagggaaaagttccacttttgtcccttgaagccatacatcagctgcacattttcatatttgttctggcaatcacacatgttattttcagcgtcacaactatgcttttaggaggtgcacagatacaccaatggaaacagtgggagaatggaattaaaaaagatgctcctggaaatgggcctaaggtaaccaatgtacatcatcatgaatttatcaagaaacgttttaagggtattggcaaagattctataatattgagttggctgactcactgccctggaaatccaaaatttgatttccatagatacatggtaagggttttagaggcggattttaagaaagtggtaggcataagctggtacttgtgggtcttcgtggtgatatttctgttgctgaatgttaatggctggcacacatacttttggattgctttccttccccttattcttctgttagccattggcactaagctggagcatgtcatagctcagctagcccatgatgtagctgagaagcacacagcggtcgagggcgatgtgatcgtaaaaccatcagatgaacacttctggttcggcaagcctagggttatcctttacctgatccacttcatcctctttcagaatgcgtttgagattgcgtttttcttctggatactgagcacttatggattcgactcgtgcatcatgggacaagttcgttttattgtgccaaggcttgtcatcggggtggttattcagcttctctgcagctacagcaccttgcctctgtatgcaattgtaacccagatggggagctgctacaagaaggagatcttcaacgagcatgtgcagcagggcgtcctgggctgggctcagaaggtcaagatgaaaaagggactgaagggagctgcatctgctagcaaggacgaatcgattaccaatgccgattcggcaggaccttccgttaagattgaaatggcgaaggctggggaggatgttgagatcgttggaaacacaggttgattgggacaatagggtgcccgtgttgtaatgatgtaacaggttaatatgccatcatctttttttgtagatactagatagcttgctgtggcaataccgcaatagcggtgaactagagaaggtgagtttgggcccgggagcctcatctgttatcggtccagtaggaagcaaattcttatatacgggatatcgataagaaatgaactaagaacatgttcctggattcattaccactaaaaattagctagctaaaagctgttattttttt

SEQ ID NO: 220886 - DNA, 2135 bp, Zea Mays
caaggctactgttttgtcacattggtccatgtacctttttaagtgataactaaaactctaagaggctttagttttttctcttaaatttcctgatctgagtcagtgagttttgtggatgtcaaaattagtccgtttccttttctttgctagcattgtgctgtatgctaatgcttgcattttttatttgaagtattcattttgatctatggtttccatttcattgtctatgccttgatcagctaaaatttcactcatgtgggaacctccaacactgggtgtgtccccttttttggtccttcggtgaaaaaatagggaagctgaaccttgttcttctgccatcatctagcatgcggcttacctttgtttgtgatgatggttatccagagcaactagctctcttgagcaatggctttgaattttctgaagttatgattgaagaaatatcagctgataattctggacgctctttcctaatcagaatttcagaatctaaagtgttttactactggtgtgctgagaagtcgaaggaacatggaatggaacttcttgcaaagatgaaaaaccttttggacgggaggccaacactctctgatctcactggcatctctaattcacgacttgatgcttttgccactcatttacatgcttatcttcttgcatcaagtatcggtgatgttacatcattgggctcacttaatgacttcctgagtacttcaagatcacatgatcaatatttacagctccagtcagatttttccaaaacttccaggttccgtgcctcggctgctagtgcaattaagccaagctctgtctatcaagccagcctaagtccgagatctggcacttttaaagatggggtaccaagggcttcatgtgcaagggttgttgggagggacaagctgaagcgtcgtgtggaatggttaggcccgttaactgctccgcttgatacgaatcctttgacaatcaaccctgattctgccagtgagaagtgtgatgcagattgttcaaagaacaatgttagctcagttccgttggacctgcctctttcgtttcccctgttgccttctatttactcccttggcactcgtccggttcctgaggtttctttggagaaacagtttaagccttactattgctggtgcccaccatgcccatcatcgctgcaatacactgtcacccatttgcatctgccagctacacctgtagatccgttgcccctaccacctttgagttcactgctagcaagtgagcagccaccttcttcaacagtttctgtaaagctggatacaactgatctcccttcccttaatcttccgtccatactgcattcaccacttattcccctacatggtccacaagtgccaacattcacaccattgatgtccgatcccattgtgcatgtcccagtcattgatgtttgttcggcgggtcaggcctatctagtgagttgtgggccgtctataacttcagcagttcccctgctcccgagcttgaagcctctgctgccagaagcagagtcgttagtcgagagaagcgcaagggaaacactgatgaggctcatagcttcgacaccacctgcaagcaatcctctacctggaagtatatcctgggcgaataacaatgtgaagaagcatgttgatgtgtgtcccaatgaaaaagcatccggtacgtcttgtgttgctgctgtgtttggaagtgggattgcacacgctgaggatgaagttccaagcggaggtgattcacaagagccgtttgccgaatacgatggtaccagcaatgaatgtgatgtacatcattggcagaaattctagcttggctgcatcagcatggtaaatagggttttgaggattcgggggtttgatgtcctgtacgcagcagcagccttaaaagtttctgtgcccagccagcatctctatttggtttgcaaatgtaattactagtttgtactgtcttgtttttggcaaacttgctgcgagcctcgtgcttagtttggtttatttatttatgaactttaggcctgttcgaagcacccagtttgtaagaaaatggattatataaactgaagtgattccaaatatatcagtttatgtctcagtttataaaaattggattaccagtttctaaaaaaccaagaa

SEQ ID NO: 220887 - DNA, 1894 bp, Zea Mays
gtttctttcatggccttgcaatatcagttacctgcattgataatgaataacctcatattgcattatttgagggaagctgaaccttgttcttctgccatcatctagcatgcggcttacctttgtttgtgatgatggttatccagagcaactagctctcttgagcaatggctttgaattttctgaagttatgattgaagaaatatcagctgataattctggacgctctttcctaatcagaatttcagaatctaaagtgttttactactggtgtgctgagaagtcgaaggaacatggaatggaacttcttgcaaagatgaaaaaccttttggacgggaggccaacactctctgatctcactggcatctctaattcacgacttgatgcttttgccactcatttacatgcttatcttcttgcatcaagtatcggtgatgttacatcattgggctcacttaatgacttcctgagtacttcaagatcacatgatcaatatttacagctccagtcagatttttccaaaacttccaggttccgtgcctcggctgctagtgcaattaagccaagctctgtctatcaagccagcctaagtccgagatctggcacttttaaagatggggtaccaagggcttcatgtgcaagggttgttgggagggacaagctgaagcgtcgtgtggaatggttaggcccgttaactgctccgcttgatacgaatcctttgacaatcaaccctgattctgccagtgagaagtgtgatgcagattgttcaaagaacaatgttagctcagttccgttggacctgcctctttcgtttcccctgttgccttctatttactcccttggcactcgtccggttcctgaggtttctttggagaaacagtttaagccttactattgctggtgcccaccatgcccatcatcgctgcaatacactgtcacccatttgcatctgccagctacacctgtagatccgttgcccctaccacctttgagttcactgctagcaagtgagcagccaccttcttcaacagtttctgtaaagctggatacaactgatctcccttcccttaatcttccgtccatactgcattcaccacttattcccctacatggtccacaagtgccaacattcacaccattgatgtccgatcccattgtgcatgtcccagtcattgatgtttgttcggcgggtcaggcctatctagtgagttgtgggccgtctataacttcagcagttcccctgctcccgagcttgaagcctctgctgccagaagcagagtcgttagtcgagagaagcgcaagggaaacactgatgaggctcatagcttcgacaccacctgcaagcaatcctctacctggaagtatatcctgggcgaataacaatgtgaagaagcatgttgatgtgtgtcccaatgaaaaagcatccggtacgtcttgtgttgctgctgtgtttggaagtgggattgcacacgctgaggatgaagttccaagcggaggtgattcacaagagccgtttgccgaatacgatggtaccagcaatgaatgtgatgtacatcattggcagaaattctagcttggctgcatcagcatggtaaatagggttttgaggattcgggggtttgatgtcctgtacgcagcagcagccttaaaagtttctgtgcccagccagcatctctatttggtttgcaaatgtaattactagtttgtactgtcttgtttttggcaaacttgctgcgagcctcgtgcttagtttggtttatttatttatgaactttaggcctgttcgaagcacccagtttgtaagaaaatggattatataaactgaagtgattccaaatatatcagtttatgtctcagtttataaaaattggattaccagtttctaaaaaaccaagaa

SEQ ID NO: 220888 - DNA, 1239 bp, Zea Mays
ccgccctcacttccgtttatcagggggacgctaggcggccggtttcgtcgcttctccttctccctcccattcgcgcgagtttgccccgaaaggagatgaagcagacgcgccccattcgcttcccatcgtagtgaactcggttcgcctcgcctcgcccaccgccgaggcagcgaccagcgaggcgtgctcctcctccggcgctaagacggggccggccgctcgtggggcctcgcctcaggggccccgtgggaggcggcgggccccgaaacgccgtcgtggtgtatcaggcatcatagggctcgcggcggcgattgttggccgcgagttggtcgtgtggatgaggctccaggcgggccccagttttggcaaatggcaccagttcctgcaacaacgaggtcatctacgctggcatctactaccctccccgaagtctcaaggagaaagggcattctagcgaagagagggctacatagctcataagaattattattagccttgtggctatgtgccattcacttggggttatgcaccgtgatctgaagccagaaaacttcctccacttggataaagaagatgatttgtcaatagaagcaatcgattttggtctatccgtgttcttcaaaccaggtcaggttttcactaagctggttggaagtccatagaccctgtagtacagaacagtcatcggaacatgatcacgcgttagaattattggagtggagcagctcactcgacaaaaatgtgtcaccaaccgatgatttattgcattgtcaactgcacttaatgttcttagttgttggggtcttcttctccactgaaggtccttaagtcataaacaccttcgataaaatgccacaagaggtccgcctcacttccgccgaaggttctcaagacgaagatctcggaaagaagcagaaatgcagaacgacgaagctagcttcagctcaaatcaagcaaagaaggaaaagactagatagaccttgctggtttaaattgcttatagacaaatgttcaagggcatgtatgtaattttacctgggctgcgtcccgtacctagaaatagatgaacagtatcaccgtactgtttaagctggattataattactctctcgcattcacgcctttgagcaagtcgaatgtatcaatgtaatattaatattgttaaatattcatttatgttttatagaatgcaaatataaatgaattaataagatgcagttataatctttattctttcgc

SEQ ID NO: 220889 - DNA, 4569 bp, Zea Mays
acaccgtttggatctgaggccttttcgttgattgacctagcagcaaaagcaggggaattggaattattttcaagtgcagatcatcctcaatttccattaatcaagaaagatgttagtaaagcaaaaagtcgtgaagttgttgaattttttgaatctggatttggtatacacaatgctggaatgatgcgatctgacagaagtttgatggagcgcttgtttggtgacgggcttttgaaagtccttgtttgtacagcaactttggcttggggagtaaacttaccagctcatacagttgttataaagggcacacagctatatgatcctaaagctggtgggtggcgagacttggggatgcttgatgtgatgcagatctttggacgtgctggaaggccacagtttgataaaagtggcgaaggaattattatcacaacacatgacaaattggcttattacttgaggttattgacaagtcagcttccaatagagagccagttccttggatctctgaaagataatttaaatgctgaagttgctttgggcactgtaacaaatgtcagggaggcttgtacctggcttggctatacatacttatttataaggatgaagactaatcctctggtgtatgggataacttgggaagaggttatgggagatccttctatgggtgcaaagcaaagaacatttattattgatgctgcacgagcactggacaaagctaagatgatgcgctttgatgaaaagagtggtaacttctactgcaccgaacttggtcgaattgcaagtcatttttaccttcagtactccagtgtcgagacttacaatgagatgcttcgacgtcacatgagtgaaagtgagttgattactatggtggcccattcctctgaatttgagaatatcgtagtaagagaagaagaacaggatgaattagaagcccttgcaaggaaagcatgccctttagaaattaagggtgggccgactgacaaacatgggaaaatttcaattctcatacaggtttatatttcccgtgctccaatcgatagctcctctttacattctgatgctcaatacattagtcaaagtttggcacgcataatgagggcactatttgagatttgtctgcgtcggggatggtctgagatgtcatccttattgttgcaatattgcaaggccgtggaccgcaagatatggccccatcttcatccacttaggcagtttgataaggatctttctcctcaggtattgtggaaactcgaggaaagaaatgttgatctggatcatctttatgagatggaggaaaatgaaattggagctctgatccggttttctcatcagggaaagttggtcaagcaatacgttggatacttcccgtatgtcaacctatctgcaaccgtgagcccaatcactaggacagttcttaaagtggacctgcatataactcctgaatttgtgtggaaagatcgttatcatggcatgtcagaacgatggtggatcattgttgaggattctgaaaatgataccatttatcattcagagctattcacattaacgaagaagatggcaagaggaacacctacaaagatatcttttaatgtaccaatatttgaacctcatccgccacagtactatatacatgccatctcagactcatggctacatgctgaaacactcttcactgtttcttttcataatttgacattgccacagacacaaataacacacacagaactcttggacttgaagcctcttccactgagtgctcttggcaacaaaacgtatgaggatctgtacagattttcccatttcaacccgatacaaactcaggcttttcatgttctttatcacactgataacaatgtactcttgggagctccaactgggagtggcaaaacaatttcggcagaacttgcaatgctccatcttttcagtacacaaccagacatgaaggtagtttacattgctcctctaaaggcaatagtacgagaaagaatgaatgattggagaaaacgtcttgtaattcagcttgggaagaagatggttgagatgactggtgacttcactccagatttgatggccctattgtcagctgacatcatcatttctacccctgaaaaatgggatgggattagtcgaaattggcatagcagaagttacgttatgaaggtcgggctcatgatattggatgagatacatcttctgggagctgaccgtggacccatccttgaggtcattgtatcaagaatgcgatacatatcatcacaaacagaacgttcaattcggtttgttggtttatcaacggcattagcaaatgctcgtgatttagctgattggttgggcgttacagatgacggtctattcaatttcaagcctagtgtgagacctgtacctcttgaagtgcatatccagggatatcctgggaaattctattgtccaagaatgaatagcatgaacaaaccagcttatgcagccatatgcactcattcacccaataaaccagttctcatttttgtgtcatcacgtcgacagacaagacttacagctcttgatatcattcagcttgcagcatcagatgaaaaaccaaggcagttcctgagcattgaagacaactccctagacatggttctttcacaggtttctgacagtaatttgaggcatactctgcaatttggcataggtctgcatcatgctggtttaaatgacagagacagatccttggttgaggagcttttttcaaacaataagattcaggtgctggtatgtaccagcacattggcgtggggtgtcaatcttccagctcacctggtcataatcaagggcactgaatactatgatgggaaaacaaaaagatacatagattatgatatcacagatattctgcagatgatgggtcgtgcaggtcggccgcaatacgaccaacatggcaaagctgttattcttgtccatgaaccaaaaaagagcttttacaagaagttcctctacgaaccgtttcctgtggaaagtaatctgagggagcacttgcatgaccacataaatgcagaaattgtttctggcaccatcagcaacaaggaggaggcgattatttatctcacctggacttacctatatcgcagattggttgttaatccggcctattatggattggaggatactgaaacaaacacattgaattcttatctatcaaggttagtcgaaactacatttgaagatcttgaggacagtggatgcataaaagtggatgaccactctgtaaagtacttgattttggggaaaatagcttcacagtattacctgagctacctcactgtttcaatgtttgggtcaaatattggccccaacacaacgttggaagtctttctacacatactgtcagctgcatcagaatttgatgagcttcctgtacggcacaatgaggacaatttgaatcgaatactcagcggaaatgtcccgtatccagttgatcaacaccaccttgatgatccacatgttaaagccaacttactctttcaggcacatttctccagagcagaattgccaataagcgactatgtcactgacttgaaatcagttcttgatcagagcatacgcatcatacaggcaatgattgatgtatgcgcgaatagtggatggcttacgagtgcattgacttgcatgcatctcttgcagatgatcatacagggtctctggtttgagagagattatgaatccctctggatgttgccatccatgaatgatgatatattagaccatctcaagagtagaggagtctcaacagtcccctccttactagatctttcccgtgaagaattgcgtagggtacttcaaccattttctgcgtcagagttgtatcaggatctgcaacatttccctcatgttgatgtgaaagttaagcttcataatgaacaggagcgatccaaacctccaactttaaacatcaggttgcaattgaaaaattcgcgacggtcagcatcaagagcatttgcccctagatttcccaaggcaaaacaagaagcttggtggcttgtcctggggaatgctacaagttcagagctgtatggtctgaaaagaattagttttgcagatcgggtgattaatactcgcatggaattgccacagacgttcaatgtgcaggagacgaagctgatcttggtgtcggattgctacctaggttttgacttggagtattctcttgagcatctcaccaagggttgagtgctttattcagagctgtttgggctgtttcattttgtatgggttcagcaaccagctcatcctagattgatcctgtaatcacgagacatgagttcattccatgaatttttgtttgtatgactacatccctcgtgttcatggttatattatatttaatagctatatatacgagtggataggtttataactttcatgaaatatcttttccgtaagcatagtagatgtttgagctctaaggttatgaccaacaaattgtgtatatggtcgtgcaaaatactattttataatataaactatattatttacatggtgaagtttgaaatagaagatcgagatgagtaagttgctggaattagcctaagg

SEQ ID NO: 220890 - DNA, 1737 bp, Zea Mays
attgaagacaactccctagacatggttctttcacaggtttctgacagtaatttgaggcatactctgcaatttggcataggtctgcatcatgctggtttaaatgacagagacagatccttggttgaggagcttttttcaaacaataagattcaggtgctggtatgtaccagcacattggcgtggggtgtcaatcttccagctcacctggtcataatcaagatgatgggtcgtgcaggtcggccgcaatacgaccaacatggcaaagctgttattcttgtccatgaaccaaaaaagagcttttacaagaagttcctctacgaaccgtttcctgtggaaagtaatctgagggagcacttgcatgaccacataaatgcagaaattgtttctggcaccatcagcaacaaggaggaggcgattatttatctcacctggacttacctatatcgcagattggttgttaatccggcctattatggattggaggatactgaaacaaacacattgaattcttatctatcaaggttagtcgaaactacatttgaagatcttgaggacagtggatgcataaaagtggatgaccactctgtaaagtacttgattttggggaaaatagcttcacagtattacctgagctacctcactgtttcaatgtttgggtcaaatattggccccaacacaacgttggaagtctttctacacatactgtcagctgcatcagaatttgatgagcttcctgtacggcacaatgaggacaatttgaatcgaatactcagcggaaatgtcccgtatccagttgatcaacaccaccttgatgatccacatgttaaagccaacttactctttcaggcacatttctccagagcagaattgccaataagcgactatgtcactgacttgaaatcagttcttgatcagagcatacgcatcatacaggcaatgattgatgtatgcgcgaatagtggatggcttacgagtgcattgacttgcatgcatctcttgcagatgatcatacaggatctgcaacatttccctcatgttgatgtgaaagttaagcttcataatgaacaggagcgatccaaacctccaactttaaacatcaggttgcaattgaaaaattcgcgacggtcagcatcaagagcatttgcccctagatttcccaaggcaaaacaagaagcttggtggcttgtcctggggaatgctacaagttcagagctgtatggtctgaaaagaattagttttgcagatcgggtgattaatactcgcatggaattgccacagacgttcaatgtgcaggagacgaagctgatcttggtgtcggattgctacctaggttttgacttggagtattctcttgagcatctcaccaagggttgagtgctttattcagagctgtttgggctgtttcattttgtatgggttcagcaaccagctcatcctagattgatcctgtaatcacgagacatgagttcattccatgaatttttgtttgtatgactacatccctcgtgttcatggttatattatatttaatagctatatatacgagtggataggtttataactttcatgaaatatcttttccgtaagcatagtagatgtttgagctctaaggttatgaccaacaaattgtgtatatggtcgtgcaaaatactattttataatataaactatattatttacatggtgaagtttgaaatagaagatcgagatgagtaagttgctggaattagcctaagg

SEQ ID NO: 220891 - DNA, 1480 bp, Zea Mays
gacttacctatatcgcagattggttgttaatccggcctattatggattggaggatactgaaacaaacacattgaattcttatctatcaaggttagtcgaaactacatttgaagatcttgaggacagtggatgcataaaagtggatgaccactctgtaaagtacttgattttggggaaaatagcttcacagtattacctgagctacctcactgtttcaatgtttgggtcaaatattggccccaacacaacgttggaagtctttctacacatactgtcagctgcatcagaatttgatgagcttcctgtacggcacaatgaggacaatttgaatcgaatactcagcggaaatgtcccgtatccagttgatcaacaccaccttgatgatccacatgttaaagccaacttactctttcaggcacatttctccagagcagaattgccaataagcgactatgtcactgacttgaaatcagttcttgatcagagcatacgcatcatacaggcaatgattgatgtatgcgcgaatagtggatggcttacgagtgcattgacttgcatgcatctcttgcagatgatcatacagggtctctggtttgagagagattatgaatccctctggatgttgccatccatgaatgatgatatattagaccatctcaagagtagaggagtctcaacagtcccctccttactagatctttcccgtgaagaattgcgtagggtacttcaaccattttctgcgtcagagttgtatcaggatctgcaacatttccctcatgttgatgtgaaagttaagcttcataatgaacaggagcgatccaaacctccaactttaaacatcaggttgcaattgaaaaattcgcgacggtcagcatcaagagcatttgcccctagatttcccaaggcaaaacaagaagcttggtggcttgtcctggggaatgctacaagttcagagctgtatggtctgaaaagaattagttttgcagatcgggtgattaatactcgcatggaattgccacagacgttcaatgtgcaggagacgaagctgatcttggtgtcggattgctacctaggttttgacttggagtattctcttgagcatctcaccaagggttgagtgctttattcagagctgtttgggctgtttcattttgtatgggttcagcaaccagctcatcctagattgatcctgtaatcacgagacatgagttcattccatgaatttttgtttgtatgactacatccctcgtgttcatggttatattatatttaatagctatatatacgagtggataggtttataactttcatgaaatatcttttccgtaagcatagtagatgtttgagctctaaggttatgaccaacaaattgtgtatatggtcgtgcaaaatactattttataatataaactatattatttacatggtgaagtttgaaatagaagatcgagatgagtaagttgctggaattagcctaagg

SEQ ID NO: 220892 - DNA, 603 bp, Zea Mays
cttacctatatcgcagattggttgttaatccggcctattatggattggaggatactgaaacaaacacattgaattcttatctatcaaggttagtcgaaactacatttgaagatcttgaggacagtggatgcataaaagtggatgaccactctgtaaagtacttgattttggggaaaatagcttcacagtattacctgagctacctcactgtttcaatgtttgggtcaaatattggccccaacacaacgttggaagtctttctacacatactgtcagctgcatcagaatttgatgagcttcctgtacggcacaatgaggacaatttgaatcgaatactcagcggaaatgtcccgtatccagttgatcaacaccaccttgatgatccacatgttaaagccaacttactctttcaggcacatttctccagagcagaattgccaataagcgactatgtcactgacttgaaatcagttcttgatcagagcatacgcatcatacaggcaatgattgatgtatgcgcgaatagtggatggcttacgagtgcattgacttgcatgcatctcttgcagatgatcatacagcttttctatttttaccttgcta

SEQ ID NO: 220893 - DNA, 823 bp, Zea Mays
gaactcgcccgcacgcttataactcctccctcctctcatctcaagacaccggggtgacacacacggctggctcgctgcccgccggcctttaagagctcgctaggacagtaggacgcgaacgagtctgcggccagccagcaagcagtgcgagtacaggcatgggggctgccggcggacgcgcggttgcggtggcagccatggtggcggtggcggcggcgctgcctctgctcgcgtgtggcggttacgcggagtgctacgactactgcttcaaggactgcatctccaaggacaagtccatgagagactactgcagctacgcctgcgacaagacctgcgcgcccgacgcccggcggcggcgccccgcggtcgtccccatgaactgccagctcgcctgcgtcagggagtcctgccaccgtcgccgcgcggctggaggataaccgtacgtacctacgtacgtacgtgtccgtcggatgtgcgcgcatggttgctttgcgcagatggcgacgacgacaccaagacgaaagcctgctacgggcagtgcttacgacgaccgcggctgcgagaccagtgccgccctgccgaggcctctgcgcgcaggcagcggtgctggcgttgtcgggcggccagggccagcggactcaccggaccacccattccacgagaggcaggacgctcacggaccggcggcggcgtcgcccgaccatcccttccacgtgaaccacaaccgggacgctctcggcccggctgtctgcggcatcccctggccatcccgttccaccacgatgcacagcgcgtttacgccggctggagctcctggatttag

SEQ ID NO: 220894 - DNA, 1975 bp, Zea Mays
gccggccgggaaacgaggcctttgcccgctcttcactctcctccgctcgccgcctcctctttctcctcttctcctctcctctctcacgagggcccaagacctcaccgctaaggtcccggtctccgcggggctctccgtcgcactttctcgtgcctcggggaccccgatccgccaccgcgcgaccgatcgtcccggatgcacgggccgtacccgacggctgctgctgctgctgcttcttcttcggacgacatggcggcgaacggcatgaaggtggcgctgcaccggcaggtctcggggggctcgatgaagcagaacgcggagctccggcgccaggcgtcgctcgagtccccgcggacggggcgggccaccagccggttcctgttcgggcggcagtcgtccatggacccgaaccggaggcgcggccggagccagagccccgtgcgcgcgccggaggacctgggcgtgccggacaacctggacgccaccatgcagctgctcttcttcgcgtgccagggcgacgcgctggggatcgagggcctgctgcgcagcggcgtcgacgtcaacagcatcaacctcgacggccgcaccgcgctgcacatcgccgcgtgcgagggccaccgcgacgtcgtcagggtgttgatcagctggaaggccaacatcgacgcgcgcgaccgctggggaagcacggcagtagctgatgccaagttctacggccactccagggtctacgatctcttgaaattccatggcgcaaaggttccgagaaccaagaggacgccgatgatggtgtcggccccagccgagataccggagtacgagctgaaccccggagaggtccagttccggcgaggctgtgacgttacaccgggtgtgtaccacatcgcgaaatggaatggcacaaaggtttccgtaaaaatacttgacagagacggttgctccgatcaagaagccgcaaactctttcaggcatgaactgactgtactggagaaggtccgacaccctaacgtcgttcagttcgtcggagccgtcactcagagcatacctatgatgattgtgtctgaactccatgaagagaaagacttatcagtctgtatccagaagaaaggaaagttaaagcctcagaaggtgctaagatacggccttgatattgccaggggcatgacctacctccaccagtgcaagccggaccccatcatccactgcgacctaaagccaaaacatatcttcctggatagcggaggccagctgaagatcgcggggttcggagtgacaaggatgtccaaggtcgggaccgacaaggtgaggttgatctaccatggcgctctcgtcgacagcttcagctaccacaccgcgcctgagctgtacaggaacgacgcgttcgactcgagtgtggactcctactccttcggcttcatcctctacgagatggtcgaagggtcggtaagagcgccggaggattcagggcactcgatccggttcgagggactgcggccatccctcaagggcaggctcaagggctatcctcccgacttcaaagcgctggtggaggaatgctggcacccgcaagccatggcgcggccgacgttctcggagatcatcatccggctcgacaagatctacgcccacttcgacaagcatgggagctggaaggactcgctcaagctttggaaatgatcgatggcatggcctgcactgcacgccgccttctttgtgtacatacataccgcgctgcaaacgcgtctctttcccggggaagattgagtactggttgtaccttgtataaggtggagactggagaatcatgtggcatggtgattggttttttgttttttgctacgaattgtaacagattgtgagtaaaattgggcagaacaacacgtatacgtcccccccccccccccccctgcagtgtcaaaaaaagaatgcacatttgctgttgttttttctgctggagtcgtacatacaaaagcaaact

SEQ ID NO: 220895 - DNA, 2165 bp, Zea Mays
ccgaagtcagccgaccccgatccccgactcacacggtacgcgcttctcctcctcgcttgccgccgccgccgccgccgcgatggaaaaggagaagctctcgttctccatatcctcctcgaagcagcggccccccaagcctcccgcacgacctgcggccgccgcagacgacgatgacctccgctccgcgcccgctccgggccagcagtacgtcaccgagttcgatccgtcccaaaccctagccgccgcctgcgcggcgcgcgccgtcatcgcgccgctccccaactccggcaacttcctcacccaccgcccacgcaaaccgtcctcgctccccacccctgaggaggaggccgccctcgccgcggaatccggcggctggggccccgccttcgtcctcgacacctcgaccgctcccgaagacccatcatccaaaatcggctacggcctcactcgccgcaacggcgccatcgacgctgctgctgccaaggaaccggagaaggcgccgccaccgtcaccgtcaccgcctcgggccactgatgctgcctccgctgccggcaacctcatgctgcagcggtacaaggaggacatggaaggccttccggagcaccgtggaatggacgagttcaatgagatacccgtggagggatttggcgcggctctccttgctggatacggctggacagaaggtaagggcattggtaggaacaataagatgggggataccaaagttcttgaataccaccgccgtgctggcacacaggggttagggtacaacccctctgaagcagaccctaggaagactcgttctggcgactggattgttggcaagaaggtgtcagagggcgggagtgcgaagagagatcgaggcagtagagataggatggaagagagcgattctagtgcccagaagaagagatataatgaggaaaggtctgagaaggagggccgtgaaaaggtgaggaatggccgtggtagccgagaaggcacaagtaatgcaagcggtactcatagcaatgtactgtggttgcagagccatatcagggttcggattgttagtcagaaactaagcaagaggctatacttgatgaagggtaaggttgtcgatgtggtggggcctacaaaatgtgacatcatgatggatgatggatcagagttggtgcagggggtggagcaagatatgcttgaaactgtacttccacggacgaatgggcgggtgcttgtgctttatgggaagcacaagggtttatatgggcacctggtagagaagaattccaaagaagagatcggattggtggaggatgcagatacaaaagatattgtacgtgttagatatgatcagatggcagaatacactggagatccagagttgcttggctactgattaagtttttttgggggaggatatgcttaccgggagccttctgctatgcttggtctcctgttcgtcagctgaagatcatacttgctgtggagcttttgatcccttcagagggaccaaggattggagagcacattttcggttacacgatctagtgaggacgccatctagacacaaaagaagggatctttttcttttgtgctgctggaaaatatgcatttgatgcttgtttatctacttctatcttcagtcttggttgacgaagctctgtgcttttgcgtatcttgcgatattgtataggacatgttcgcctgcttctatcttatcctcagcggttatgcttgtcttgtgtagctggagcatcttgttgatctccatggactttgagcctttggttgtactattgggaccctaacatattgtattgtagcttgcttttgacgacagccagctagaatgccgagtagctgtgaaacataatcgttctgtgtaacatatggatagaccgaattttcttgaaccttgtatgaaacctatgctacgattctactctggtatatgtaaatgtgttagcagttatgtttttttccccttgcatttcatattgcttgtgacagcaggtaaaagcaacgacgttgtctgcgtgtcgaaataggtatggtgcaggaaacatctcgctatttaaaattgaatagcaaggaaatttcttacacatggatcatctcgtgatctctggtcactaaatcagccctaagtttttcgtgcgcctcctgttctggtaagacaaaag

SEQ ID NO: 220896 - DNA, 1672 bp, Zea Mays
cgttacccgtcacggggttccgctgtttcaagtccttctggttttcacagccgtgattgagatccaatggtccactgtatccagcatttactgcaaggacatgccgccgaacgtgtatcggcctcacagtgtcacaataactgaatttggtgccgttggggatggtgtcaccctcaatacaaaggcattccagaatgcaatcttctatctcaattcatttgcggacaagggtggcgcgcagcttttcgtgcctgcgggaaggtggttgacggggagttttcatcttatcagccatctcactttatcactggacaaggatgcaataataattggatctccggtgctaatggttcaattgatggtcaaggagctatttggtggggctggttccacaaccacacattgaattatactagaccacatcttgtggagttgatgtattctaccaatgtcgtcatatctaatctaaccttcaagaactcgccgttttggaatatccaccctgtgtactgcaggttggttttctagatagccacttgctttctgttcaaacataaaaaaaaattcattcacaatacaaatatattatctggagtgcttttgctacataaacagccaagtgcttgtccggcatgtcacaatcctagcgcctttgaattcgccaaacaccgacggcgttactccagactcttccacgaatgtgtgtatcaatcattgctatgtaagaaatggcggtgatgttattgtcattaaaagtggctgggatgaatatggcatttcatttgctcaaccaagctccaatatcagcataagcgacatcacaggggagacaaggggtggttcagggattgcctttggaagtgagatgtcaggtggcatatcggaagtacgggctgtgggcctccgcattgtcaactcccttcacgggatcagaatcaagacggccccggggcgcggagggtacgtggagaatgtgtacatagcagatgtgagcatggacaatgtttcgatggccatcaggatcactggaaactatggtgaacatcctgatgacaaatatgacagcactgctctccctgtgataagcaatattacaatcaaggatgttgttggcgttaacattggggttgctggtatattggaaggcattcagggggacaatttcagcaacatttgtctgtccaatgtttccctcagtgtgcaatctgcacatccatggaattgttcacttattgaagggtattcgaactcggtgatcccagaatcatgcgaacagctcagaagcaattgtagacagacatccatttgctacgatggaagcagttcttcagtaatgagtgtgcagcaaccaagacatacatcgcccaccagccggttgctagatctttttactggagttggcttcattttagtgtaggtagagctgtgcttgttcttgctgcaaagggggcttgcttcatgtagtgagagccctattagtcatgtatatctgattcttgcaattatttgtgattagagtgccacttgcttcatgtatatagctgttgagatgactgtcggtgtatctttgcctgttttgttccaatttttggtatgtgaatgcaatctgcataactttatggttttgaacacactccctctgtttcttatcatctgtcattctcatttccta

SEQ ID NO: 220897 - DNA, 1709 bp, Zea Mays
ggacgatggatcgtgccgttacccgtcacggggttccgctgtttcaagtccttctggttttcacagccgtgattgagatccaatggtccactgtatccagcatttactgcaaggacatgccgccgaacgtgtatcggcctcacagtgtcacaataactgaatttggtgccgttggggatggtgtcaccctcaatacaaaggcattccagaatgcaatcttctatctcaattcatttgcggacaagggtggcgcgcagcttttcgtgcctgcgggaaggtggttgacggggagttttcatcttatcagccatctcactttatcactggacaaggatgcaataataattggatctccggattcatctcattggccagttatcgatcctcttccatcctatggtcgaggtagagaccttcctggaaaaagacatcagagtctgatttttggattaaatctgacggatgtaattataactggtgctaatggttcaattgatggtcaaggagctatttggtggggctggttccacaaccacacattgaattatactagaccacatcttgtggagttgatgtattctaccaatgtcgtcatatctaatctaaccttcaagaactcgccgttttggaatatccaccctgtgtactgcagccaagtgcttgtccggcatgtcacaatcctagcgcctttgaattcgccaaacaccgacggcgttactccagactcttccacgaatgtgtgtatcaatcattgctatgtaagaaatggcggtgatgttattgtcattaaaagtggctgggatgaatatggcatttcatttgctcaaccaagctccaatatcagcataagcgacatcacaggggagacaaggggtggttcagggattgcctttggaagtgagatgtcaggtggcatatcggaagtacgggctgtgggcctccgcattgtcaactcccttcacgggatcagaatcaagacggccccggggcgcggagggtacgtggagaatgtgtacatagcagatgtgagcatggacaatgtttcgatggccatcaggatcactggaaactatggtgaacatcctgatgacaaatatgacagcactgctctccctgtgataagcaatattacaatcaaggatgttgttggcgttaacattggggttgctggtatattggaaggcattcagggggacaatttcagcaacatttgtctgtccaatgtttccctcagtgtgcaatctgcacatccatggaattgttcacttattgaagggtattcgaactcggtgatcccagaatcatgcgaacagctcagaagcaattgtagacagacatccatttgctacgatggaagcagttcttcagtaatgagtgtgcagcaaccaagacatacatcgcccaccagccggttgctagatctttttactggagttggcttcattttagtgtaggtagagctgtgcttgttcttgctgcaaagggggcttgcttcatgtagtgagagccctattagtcatgtatatctgattcttgcaattatttgtgattagagtgccacttgcttcatgtatatagctgttgagatgactgtcggtgtatctttgcctgttttgttccaatttttggtatgtgaatgcaatctgcataactttatggttttgaacacactccctctgtttcttatcatctgtcattctcatttccta

SEQ ID NO: 220898 - DNA, 1919 bp, Zea Mays
actgctctctgcctcaatgcccgccccagcctcccaccctctcactccagtcagtccctcccagcggctcgccagccacctgctcctccagtcctctctccatccctctccggctctccgcctctccccctcgtgaggaggtgaggagaggagaagcaacagagggggccgcggcgaccgaccgaccgaccgacgtgtcctgagtcctggtgctggtggtgggtgcttctcgttcctggcgggtccatacacggcggggtgctagctaagggagaggtgccggcgtcggcgtcggctgcgaggagcaggagcagcaggccaccgacggattcggagatctcgccggagaagatgaagagatctgcatctctgtttcaagtccttctggttttcacagccgtgattgagatccaatggtccactgtatccagcatttactgcaaggacatgccgccgaacgtgtatcggcctcacagtgtcacaataactgaatttggtgccgttggggatggtgtcaccctcaatacaaaggcattccagaatgcaatcttctatctcaattcatttgcggacaagggtggcgcgcagcttttcgtgcctgcgggaaggtggttgacggggagttttcatcttatcagccatctcactttatcactggacaaggatgcaataataattggatctccggtgctaatggttcaattgatggtcaaggagctatttggtggggctggttccacaaccacacattgaattatactagaccacatcttgtggagttgatgtattctaccaatgtcgtcatatctaatctaaccttcaagaactcgccgttttggaatatccaccctgtgtactgcagccaagtgcttgtccggcatgtcacaatcctagcgcctttgaattcgccaaacaccgacggcgttactccagactcttccacgaatgtgtgtatcaatcattgctatgtaagaaatggcggtgatgttattgtcattaaaagtggctgggatgaatatggcatttcatttgctcaaccaagctccaatatcagcataagcgacatcacaggggagacaaggggtggttcagggattgcctttggaagtgagatgtcaggtggcatatcggaagtacgggctgtgggcctccgcattgtcaactcccttcacgggatcagaatcaagacggccccggggcgcggagggtacgtggagaatgtgtacatagcagatgtgagcatggacaatgtttcgatggccatcaggatcactggaaactatggtgaacatcctgatgacaaatatgacagcactgctctccctgtgataagcaatattacaatcaaggatgttgttggcgttaacattggggttgctggtatattggaaggcattcagggggacaatttcagcaacatttgtctgtccaatgtttccctcagtgtgcaatctgcacatccatggaattgttcacttattgaagggtattcgaactcggtgatcccagaatcatgcgaacagctcagaagcaattgtagacagacatccatttgctacgatggaagcagttcttcagtaatgagtgtgcagcaaccaagacatacatcgcccaccagccggttgctagatctttttactggagttggcttcattttagtgtaggtagagctgtgcttgttcttgctgcaaagggggcttgcttcatgtagtgagagccctattagtcatgtatatctgattcttgcaattatttgtgattagagtgccacttgcttcatgtatatagctgttgagatgactgtcggtgtatctttgcctgttttgttccaatttttggtatgtgaatgcaatctgcataactttatggttttgaacacactccctctgtttcttatcatctgtcattctcatttccta

SEQ ID NO: 220899 - DNA, 2056 bp, Zea Mays
acccaaactcgccgtccgcctccgccaccacccccgcccgcgcccatagcaagctcgccttccacgcgcgcggccgcgccagcgcaccacgcctcgcttcgttttcccgttgcttgacgctgaatccattccaccaccacccaggcacggccaggccagcgccagcgcgtcgtccccggcccccgctccgcctctccggtcgcgcccgcctcggggcgaccaccaccaaaatagaaacttccgtgtgtaggtgacccccggctttacccccgcccgaccgcccccaccccaccccgcccacgcctccctccctcccgccgggacaaaaccgccgctcctcctcctccgcccctccccgctctttctgtgaggcgggaagcgaggcggatgccgaggcgacggggctcgcgcaccgcacgcgtgtgcccgccgcccgggggccaggcgaggtggtgaggtgaggccgagcgcggttttaaattgttcacccggccgcccttctcgccgtagttttcagtggtacaagcaagggaggaacgaacgtgagggctgcctgcctgcctgcggacatgggctccagcctcaagtaccgatctggcctgtgcctcatcgtcgccgtcgtgctgatctgggtcatctctgccgaggtcacgcagttacttacttgggggcctcccttatggtcatatacctccctttgtcatttctaaaagattttatatacaattcgttgagaaggcattctagaaacactagtgcttccaaaattgcaagcaaatcttcctttggtggtagtgcccctttgaagaatggtgaatttcagaagatgttggaaatggaatcacagaaaactatagtggtaaattgccctgatgtgagcatccctgtagtggaagagacaaaaccactcatatgcggaatcactgaaatggatgatggccttttcaaggacaagcaactttccactaaggagattgcaacgtatggattgtatctttgccccttatggtttgtgacagagtatttatcgaatgcagcgcttgcaagaactagtgttgccagtaccacagtgctgtcttcaacttcaggactcttcactcttttcattggtgttttacttggccaagactccataaatgctgcgaaaattattgctgttttcattagcatggctggcgttgtaatgacaactgtgggccagacttgggcatctgatgaatcagaagcaggcaaatctggttttacacagaggactcttctaggtgatatgtttggtcttatgtcagcaatcgcctatggtctatttactgtgctgcttaaaaaattttgtggagaggaaggagaaaaggttgatgtccaaaaactgtttggttatcttgggctttttacccttgttgctctatggtggattgtctggccattaaccgcactaggcgttgagccaaagttttcaatgccccactcagctaaagtggatgaagtggtggtggcaaatagcctaatcggaagtgtattatcagactacttctgggctctttctgttgtttggactactcccttggtggccactctaggcatgtctctcacaattccaatagcaatggttgctgatatgatcattcacggccgtcactattcagcagtatatattcttggttctgtccaggtattttcaggctttgttatcgcgaaccttgcagatcgcttttctcgttctctagggctatcatagtctcataaaacagaacaggcccttattagagcgtgcatcaggaagctccaaggtcgggttggttaggccaatacttcagaaaacctggatcgggagataccaggaattattttccctttgcttctttaaacatagtggaggtgaattttgccgtggtgaatagtgaaaggcagcagatgaagaagaaaacatatgttatagcaaccctttgcaactgtaaattctcttactacaaattgcgcgacagtgtagactgcggccgttctcggcccatgtcaacaggcttgctcgatttcaaatttgcaatgtccttttatccgtgtt

SEQ ID NO: 220900 - DNA, 2294 bp, Zea Mays
acccaaactcgccgtccgcctccgccaccacccccgcccgcgcccatagcaagctcgccttccacgcgcgcggccgcgccagcgcaccacgcctcgcttcgttttcccgttgcttgacgctgaatccattccaccaccacccaggcacggccaggccagcgccagcgcgtcgtccccggcccccgctccgcctctccggtcgcgcccgcctcggggcgaccaccaccaaaatagaaacttccgtgtgtaggtgacccccggctttacccccgcccgaccgcccccaccccaccccgcccacgcctccctccctcccgccgggacaaaaccgccgctcctcctcctccgcccctccccgctctttctgtgaggcgggaagcgaggcggatgccgaggcgacggggctcgcgcaccgcacgcgtgtgcccgccgcccgggggccaggcgaggtggtgaggtgaggccgagcgcggttttaaattgttcacccggccgcccttctcgccgtagttttcagtggtacaagcaagggaggaacgaacgtgagggctgcctgcctgcctgcggacatgggctccagcctcaagtaccgatctggcctgtgcctcatcgtcgccgtcgtgctgatctgggtcatctctgccgaggtcacgcagggttgtctgcaatagaaaatttctcaggggaatgttatgcatctggcaccattctgtcttgaaaagaacatctggcatcattctgaatccagccgaggcttcaccactggacctggactttatttataccataaagaaacaaagaaaagtcaattcttatgccttctactgtataattctggagttaatgagccaaaaactacatggatattcacaaagtacagacatccatttgcagttacttacttgggggcctcccttatggtcatatacctccctttgtcatttctaaaagattttatatacaattcgttgagaaggcattctagaaacactagtgcttccaaaattgcaagcaaatcttcctttggtggtagtgcccctttgaagaatggtgaatttcagaagatgttggaaatggaatcacagaaaactatagtggtaaattgccctgatgtgagcatccctgtagtggaagagacaaaaccactcatatgcggaatcactgaaatggatgatggccttttcaaggacaagcaactttccactaaggagattgcaacgtatggattgtatctttgccccttatggtttgtgacagagtatttatcgaatgcagcgcttgcaagaactagtgttgccagtaccacagtgctgtcttcaacttcaggactcttcactcttttcattggtgttttacttggccaagactccataaatgctgcgaaaattattgctgttttcattagcatggctggcgttgtaatgacaactgtgggccagacttgggcatctgatgaatcagaagcaggcaaatctggttttacacagaggactcttctaggtgatatgtttggtcttatgtcagcaatcgcctatggtctatttactgtgctgcttaaaaaattttgtggagaggaaggagaaaaggttgatgtccaaaaactgtttggttatcttgggctttttacccttgttgctctatggtggattgtctggccattaaccgcactaggcgttgagccaaagttttcaatgccccactcagctaaagtggatgaagtggtggtggcaaatagcctaatcggaagtgtattatcagactacttctgggctctttctgttgtttggactactcccttggtggccactctaggcatgtctctcacaattccaatagcaatggttgctgatatgatcattcacggccgtcactattcagcagtatatattcttggttctgtccaggtattttcaggctttgttatcgcgaaccttgcagatcgcttttctcgttctctagggctatcatagtctcataaaacagaacaggcccttattagagcgtgcatcaggaagctccaaggtcgggttggttaggccaatacttcagaaaacctggatcgggagataccaggaattattttccctttgcttctttaaacatagtggaggtgaattttgccgtggtgaatagtgaaaggcagcagatgaagaagaaaacatatgttatagcaaccctttgcaactgtaaattctcttactacaaattgcgcgacagtgtagactgcggccgttctcggcccatgtcaacaggcttgctcgatttcaaatttgcaatgtccttttatccgtgtt

SEQ ID NO: 220901 - DNA, 2655 bp, Zea Mays
cgacgatggaggaagccaagcggctgcacgcgcgcctgctccgccgtggggagcgccgcctgcagccgctactcctgcgcgtgctggcggcgggggaactgcgctacgccgcgcgccttctcggctcctgccccgcgtctccgccctccgcgccgctccacaaccgcctgctccacgcgctggccgccgcgcgccacccgctgctgctcccttgcttcgcgcgcgcgcaccgcctccgcgtcctcaccccgctctccttcacgcttctcctctcctccgccaccgccacggccgccgcgtgcgcgcacgctttgctggccaagtccggccacgccgcggcggcgcccggcgacccgttcctcgcgtccgcgctcgtctcctcctacgccagggcggggctgctggcggagtcccgcagggcgttcgacgagctgcctgccggggccggggccggggccgcggccgcgcgcaacgcgatgctgtcggcgtacgcgcgaggcgggcgcgtgggcgacgcggagcggctgttcgcgggaatgcccgaccggagcgtggtgtcgtggaccgcgatggtgtcgggctacgcgcagaacgggaggcacgaggaggcggtgcgcacgttcctggacatgtgggacggggccggggtgcggcccaacgagctcaccgtcagcagcgtcctgcccgcgtgcgctgcgctcggggccctcgcgctggggaggaaggtggagcgctacgccagggggagagggatgctcaggaacgtctatgtcgccaacgccttggtcgagatgtacgccaagtgcggcagcatccgccgggcttggaaggtgtttcggggcatggggacgcggagggatctttgttcttggaactccatgatcatggcgtttgccgtgcatggcctctggacggaggcgctggccttgtttcataaactgagggggcaaaaccagatggcattacatttgttggagtcattttggcctgtactcatggaggcttggtggatgaaggcaagctgctcttcaactcgatgagaggggagttcggtcttaagccaagaatcgagcactatggttgcatggttgacctgctggggcgtgctggcctgttaaaagaagctgacagtctgatcgcgagcatgccaatggagcctgacgccgtaatttggggagccctgcttggagcctgcagcttccatggcaactttgaactagcggaaatagcagtggaaaaactaatgcacctggagccacacaatacagctaacctagtgattctttcgaatatatacgcgtcatgtggcaaatgggacggtgttgcccgggtgtggaagctgctaaaggaaaaagatcacaagaaatctgctgggtacagctttattgagttagatggtaggatgcacaagttcctggttgaagataaatcgcatccaagatctgagaaggtatatgacgccctggatagcatcacgctggccatgaagcttgtcagcttggaaaatcctgaagtggaaagctgattttaacgtcaccatcttctatcccttttatttatgggagaagaaactgagaaaaccatttgagattggtcatggacttcttgctcagatcctccatatcaagtgaatgcaccacctgaatatcaatggatttttcctctactacgaaatggtcatttctcttgttcttacaatgaataattcagaggtgcaagtgcaccagacagatagaagcatatcattgcatgacatacccaaagcagatcatcatggaagacactagaggaactttcagactgtggggttatgcatgagattggttggaactatgacgcaggaatgaccggggttgtataccatattctcatggttgccttcacttggcagccgtggtttggagcgcaccctcatattgggtgcagccttggaagcaaggcaaacatgccccccgtccgcctttgcagtatatgttttggcatgcttcattggatttaccgtgttccttagttttcttttatatatatagctgcggctcatatgttgaacaagtttacagcttttatctgagcacttcatttgtgcactatggatcagtctggattctatcaaacttggaaatgactgctgcttcttaaggtgtgaacgcaccggcacaaacaagcagaaagatctgctcagactggacacttccagaaggacactggtcaacgttcagaaattgccatgtgattgtggaagaaaagaacaatttcaccgggtcagtttcactttaggagcataaccataacgttagatgcttgacgatgacttgtaaatgctgacgaaatgaacatgacgcagcatcttccttctacttttgtcgctgtttctcttgttgaaataaccggggtaatggtcttgtttcttgtccttttgcattttaaaagctgggtgatcctggaagttagtgctctggatgcttggtggcgctatacatgtccaaatgggttgggcttgccgagcggcccgaaacccgacacgggtttggtctggcctgaacccggcacaacacgtagtgaaccaggcccgtgtcgacccagcccggtcatcgagctgtgtctgggccaaaggcgtggcacggcgggctagacacggcacgacccggttttatt

SEQ ID NO: 220902 - DNA, 614 bp, Zea Mays
atttgcttggcggcatgtggatttgagtgcaccgattgcttccgaaatgatacgagcatcctcatagtgtgggaacatgaagtcgatggcaacacaacctatcaagtctgtgatggcagcggtgaagacccaaactgttgcaggagtgtgtttgcgctgttctggagcgcttctgaccatttgacctacatgggagttgagatagcggccgacgactggagcacctgcaggatcgtccttgggcgaggcgtcgagcagctcaaagggagtcttcccaacaacattgttacgtccggacgctccgtcgacgttgtcatcgcagacgatgatacacttcagattgattgacgcagttcagggtagtcgttggtagtcatgcatatagctagaagataagctgttggctgttggtgcatgcttcagagcaaatcaaagggctttcttcctttaatcctttttttttgcttcgtgtggttctttcagccatatgtactatgcagcttgtgaatgtaaagctgtacggaaggtgacatgtttctagcttcgtatatagttggagctcaatacagccaacctggtactcactccgttattttttatttatcacgttttat

SEQ ID NO: 220903 - DNA, 801 bp, Zea Mays
cgaatatatatttctttgcacaagatgagctttggaagtaacaatgttcatctgatgacttttgggcaaccacgcgttggcaatgctgcatttgcctcctactttgcccagtatgtgccatacacagtccgaatgacacatgaacgtgatattgtacctcatctgccgccttatttcttcttcctcccaaaactgacatacaagcacttccccagagaggtgtgggaacatgaagtcgatggcaacacaacctatcaagtctgtgatggcagcggtgaagacccaaactgttgcaggtggggggcgggcgcctgtttcgattcggcactggagtgtgtttgcgctgttctggagcgcttctgaccatttgacctacatgggagttgagatagcggccgacgactggagcacctgcaggatcgtccttgggcgaggcgtcgagcagctcaaagggagtcttcccaacaacattgttacgtccggacgctccgtcgacgttgtcatcgcagacgatgatacacttcagattgattgacgcagttcagggtagtcgttggtagtcatgcatatagctagaagataagctgttggctgttggtgcatgcttcagagcaaatcaaagggctttcttcctttaatcctttttttttgcttcgtgtggttctttcagccatatgtactatgcagcttgtgaatgtaaagctgtacggaaggtgacatgtttctagcttcgtatatagttggagctcaatacagccaacctggtactcactccgttattttttatttatcacgttttat

SEQ ID NO: 220904 - DNA, 2171 bp, Zea Mays
gatcactcaattcctcgttgcggttcgcgggtcctggaagcaggaatcatcaagacgctccgcgcgccattacagtctgacagcgaccccacaggctcgtcctccgtaagtccgtcctcctgtcgctgtcccgctcatgaaccgggcaacaactacggagcgagcggacgaggagatgctgtttcgattttccacttcctcttcctctacctctacctcgggccggaccgcatggctgggcagcgctgggtcggtaaagtggcggctgctgctgttgtggcgctcttgctcctgtcgaccgctcttcccggaggagcacggagaggtacttcgatctcactcgtgccagattcctatggatgcgcagcggaatccatgcgctccggacgggctctgactagttattttgctcccagattgggggtttccatccccggattcccccatttgcctctctgctttcccagtcgtatcttgctaccgtgtgtttttaatgttaactaaagataagtaagaactgccttgtgtaaaccaactgctctaattatcacagaacccgatgtcaacaacaatggacggagttttgtttttaactatactctgaccaaagctgttgtggaatatgctgcagctgtaagttatttcaaagcccttcatttattttagcttaatgtgccatagtactagtttttttgtattttattttccccacatttttcttaagtgcttccaaataaaccctaagagtcagccagtttatgcatcttgttactttattttaatatcattcatttagtttcgatttttcactctatattttaatgttgtcaaaatagagattcccattttttccctggtacataggtatatatgacagatctgacggctctatacacatggacatgctcaagatgcaatgacttgactcgaggctttgagatgacttgtataattgttgatgtccagaattgcttgcaggcattcgtcggtgttgatcacaatctcaatgctatcattgtttccatcagggggactcaagagaacagcatacagaattggattaaggacctgatatggaagcaggttaaacttaattatccaaacatgcccaatgctaaggtttgtggtattaaccatctgatgcaattttacttctcttttcaacagtaaggcatgacttatctttcctccaccttttttttcttctgatgagatttctcctatggttaaaggtccacattgggttttactcttcttacaataatacagttttacgtccagccatcacgaatgctgttcgcaaggcaaggaagctacatggacacagtgacgtaattgtaacagggcattcgatgggtggagcactagcttctttttgtgcccttgatcttgcaatgagctttggaagtaacaatgttcatctgatgacttttgggcaaccacgcgttggcaatgctgcatttgcctcctactttgcccagtatgtgccatacacagtccgaatgacacatgaacgtgatattgtacctcatctgccgccttatttcttcttcctcccaaaactgacatacaagcacttccccagagaggtgtgggaacatgaagtcgatggcaacacaacctatcaagtctgtgatggcagcggtgaagacccaaactgttgcaggtggggggcgggcgcctgtttcgattcggcactggagtgtgtttgcgctgttctggagcgcttctgaccatttgacctacatgggagttgagatagcggccgacgactggagcacctgcaggatcgtccttgggcgaggcgtcgagcagctcaaagggagtcttcccaacaacattgttacgtccggacgctccgtcgacgttgtcatcgcagacgatgatacacttcagattgattgacgcagttcagggtagtcgttggtagtcatgcatatagctagaagataagctgttggctgttggtgcatgcttcagagcaaatcaaagggctttcttcctttaatcctttttttttgcttcgtgtggttctttcagccatatgtactatgcagcttgtgaatgtaaagctgtacggaaggtgacatgtttctagcttcgtatatagttggagctcaatacagccaacctggtactcactccgttattttttatttatcacgttttat

SEQ ID NO: 220905 - DNA, 2428 bp, Zea Mays
gatcactcaattcctcgttgcggttcgcgggtcctggaagcaggaatcatcaagacgctccgcgcgccattacagtctgacagcgaccccacaggctcgtcctccgtaagtccgtcctcctgtcgctgtcccgctcatgaaccgggcaacaactacggagcgagcggacgaggagatgctgtttcgattttccacttcctcttcctctacctctacctcggggtaacttgtagaactcaatttcacccttgcgttccgtccctttcctatgttcctccagcggtccagcctagtagtttcttgctctgcaattcgccagttttgggctcctgatcgatcgaatcgtcgtcctggtggctcccatacagccggaccgcatggctgggcagcgctgggtcggtaaagtggcggctgctgctgttgtggcgctcttgctcctgtcgaccgctcttcccggaggagcacggagagaacccgatgtcaacaacaatggacggagttttgtttttaactatactctgaccaaagctgttgtggaatatgctgcagctgtaagttatttcaaagcccttcatttattttagcttaatgtgccatagtactagtttttttgtattttattttccccacatttttcttaagtgcttccaaataaaccctaagagtcagccagtttatgcatcttgttactttattttaatatcattcatttagtttcgatttttcactctatattttaatgttgtcaaaatagagattcccattttttccctggtacataggtatatatgacagatctgacggctctatacacatggacatgctcaagatgcaatgacttgactcgagtaagattatctaggagtatggcgtgtagtgaatagttcaatgtgacctgtttcagttgaagtacaacaaagatacgtttttcactgactttgccattgttacctatttcacaaaacagggctttgagatgacttgtataattgttgatgtccagaattgcttgcaggcattcgtcggtgttgatcacaatctcaatgctatcattgtttccatcagggggactcaagagaacagcatacagaattggattaaggacctgatatggaagcaggttaaacttaattatccaaacatgcccaatgctaagttttacgtccagccatcacgaatgctgttcgcaaggcaaggaagctacatggacacagtgacgtaattgtaacagggcattcgatgggtggagcactagcttctttttgtgcccttgatcttgcaatgagctttggaagtaacaatgttcatctgatgacttttgggcaaccacgcgttggcaatgctgcatttgcctcctactttgcccagtatgtgccatacacagtccgaatgacacatgaacgtgatattgtacctcatctgccgccttatttcttcttcctcccaaaactgacatacaagcacttccccagagaggtatgctcctgaacaaacataggaaacattgtccaaattttctctttgatgtgcttatcttctctgtggattgaaataaaaagttgaacccgatggctatttgcttggcggcatgtggatttgagtgcaccgattgcttccgaaatgatacgagcatcctcatagtatgtaaacgcaatgaaaacgtaactaatctttcagttcttgaacaaattgttgcaaactgtcattctctgtttctgagttgattaatttgtcacgctgttgagccccacttgaagaacctgcagcatgtgctatgttgtcttgaatcttacatgagctaaattctgaagtgttttcttactgacgaaaccatacacacctttgcaacgccatcctaaactcttcacatgtgttattaggtgtgggaacatgaagtcgatggcaacacaacctatcaagtctgtgatggcagcggtgaagacccaaactgttgcaggagtgtgtttgcgctgttctggagcgcttctgaccatttgacctacatgggagttgagatagcggccgacgactggagcacctgcaggatcgtccttgggcgaggcgtcgagcagctcaaagggagtcttcccaacaacattgttacgtccggacgctccgtcgacgttgtcatcgcagacgatgatacacttcagattgattgacgcagttcagggtagtcgttggtagtcatgcatatagctagaagataagctgttggctgttggtgcatgcttcagagcaaatcaaagggctttcttcctttaatcctttttttttgcttcgtgtggttctttcagccatatgtactatgcagcttgtgaatgtaaagctgtacggaaggtgacatgtttctagcttcgtatatagttggagctcaatacagccaacctggtactcactccgttattttttatttatcacgttttat

SEQ ID NO: 220906 - DNA, 1517 bp, Zea Mays
atggcgcgtctcttcttcctcctcctcctctttcccctcctctactcctccgtcaccggcctcaaccgtagcgacttcccgccgtccttcctcttcggcgccggcacgtcgtcttatcagcctaatttccacgctcatacatattgcatgttaattagacgtatctatttagaagtcttggcaattaaccataaatcaggaaatattgacgatggaagcaatggcgacgtggctgctgaccattatcatcgatacaaggacgacatagaaatgatgcattcgattggcctcggctcctacagattctcattgtcgtggtctagaattcttccaaagggtcgcttcggaggtgttaatcaggcaggcattaaattctacaatagcctcatcaacggactgctggaaaaagggatacaaccattggtgacgatcaaccactttgacatacctgaagaactccaagaaagatacaattcttggttaagcccagagattcaggaggacttcacctacttcgctgagctttgtttcaagatgtttggtgaccgagtaaagcattgggtcacattcaatgagccaaatcttgttgtaaagcttgcatactccattggggcatttccacccaaccactgttctgagccatatgggaaatgtgattcagggaattcatcaactgagccctacattgcagcgcataacatgatattagctcatgcaaagacggtcaacatctacagaaagaattacaagtccaagcaaggtggctttgtaggaatttcattacatctaagatggtatgaaccactaaggaatatcacagaggaccacttggcagatcttggatcccttgttctttggtgactatcctcaccagatgcgccaaatcttaggtccaaacttgccaaaattcacagaaggagagaagaaactactaaagaaccaaattgacttcatcggggtaaatcattaccaaacattctatgttaaggattgcatatattctccatgtgatatggacgcctacccttctgaagctttagtttctatatcaacagaacgaaatgggatacccattggaaaaccgacacctgttgcaaacacatatgccgttccaagctccatggagaagttggtcatgtatttaaaccagagatataaaaacatacctttgtacatcacagagaatggttatgcccaaatagccaatattagcactacaacagaagaaataattaatgatactgaaagatcaacttacattcgtgactacctcacttacttgagctttgcaataaggaaaggagcagatgtgagaggttattttgtgtggtctttgatggataactttgaatggatctctggttacaccgtaaagtatggtctttgtcatgtgaatttcaagtcactaaagcgaacaccaaaactgtctgctaaatggtatagcaagtttatcaaaggctatgaacagatagagatggcctctgaagatttacctaagtatatggtttcctagtaca

SEQ ID NO: 220907 - DNA, 1248 bp, Zea Mays
atggcgcgtctcttcttcctcctcctcctctttcccctcctctactcctccgtcaccggcctcaaccgtagcgacttcccgccgtccttcctcttcggcgccggcacgtcgtcttatcagcctaatttccacgctcatacatattgcatgttaattagacgtatctatttagaagtcttggcaattaaccataaatcaggaaatattgacgatggaagcaatggcgacgtggctgctgaccattatcatcgatacaaggacgacatagaaatgatgcattcgattggcctcggctcctacagattctcattgtcgtggtctagaattcttccaaagggtcgcttcggaggtgttaatcaggcaggcattaaattctacaatagcctcatcaacggactgctggaaaaagggatacaaccattggtgacgatcaaccactttgacatacctgaagaactccaagaaagatacaattcttggttaagcccagagattcaggaggacttcacctacttcgctgagctttgtttcaagatgtttggtgaccgagtaaagcattgggtcacattcaatgagccaaatcttgttgtaaagcttgcatactccattggggcatttccacccaaccactgttctgagccatatgggaaatgtgattcagggaattcatcaactgagccctacattgcagcgcataacatgatattagctcatgcaaagacggtcaacatctacagaaagaattacaagtccaagcaaggtggctttgtaggaatttcattacatctaagatggtatgaaccactaaggaatatcacagaggaccacttggcaatgcgccaaatcttaggtccaaacttgccaaaattcacagaaggagagaagaaactactaaagaaccaaattgacttcatcggggttatgcccaaatagccaatattagcactacaacagaagaaataattaatgatactgaaagatcaacttacattcgtgactacctcacttacttgagctttgcaataaggaaaggagcagatgtgagaggttattttgtgtggtctttgatggataactttgaatggatctctggttacaccgtaaagtatggtctttgtcatgtgaatttcaagtcactaaagcgaacaccaaaactgtctgctaaatggtatagcaagtttatcaaaggctatgaacagatagagatggcctctgaagatttacctaagtatatggtttcctagtaca

SEQ ID NO: 220908 - DNA, 1985 bp, Zea Mays
ccacggtgaggaggaggaagcaaacgtcggagcacgagcacgcgttcttcgcctctcaccccacgggagggacgggaggcgagggcgcggcgagccggcgggcgcaatcggatttggggaggcaaaaggaaaattccggagagcagttcctttccgcctccccatttcctccggatagatttgggtttggcctgcgtcgattagtccggcgctcgaacccgcaccaatccattcgccgagggatcgagcaagcgaggcgtggatcgcaggcgatcattaattttttgttggcatacattcccaaccttgatgtaaagacctccttcattcagaaccctgtgttttggaagggtatttcacaatgaagcccaatcagttgattacatcccatgttgatatacatagggtatacccatacgagttccaaccagagttttcaatgtctcatgatcttggattgaatttgttttcacaagccggtacagtgctgggtacttctttaagacatcataggaagatctcttcttctggaaatgcaatggtccatggagctttcaatcgcctcaacaagctttcccgagctctctatttctggctctctagaccatctgatcctaagattttgcgttgggtggcatctgtagcagcgaccagttctagatcttgtcagttgcgtttcaaccaaatgggctctcacatgcaaaatctgactaaactgcagttcagctttccaatgagggaagagcaagcagtacaactaattttagcgaggcttgcaagtgcaacgattgggcgactgttaaatgagcagcaacgtgcatgcaatcttcttactctagctggcgctgttgctattgtacctccacttgaaaatatatcatcaatgatgcttgccgagtcaatcacatcacgaaatattgacagtgatatcagaagactggtggatcagccttatgtagaaggaaagtgcctaagttgtgcttgcccttctgtgcctagtactatatttcaagaagatccaattgaaccaaaaactggaataaaatttccaacatttctggaagacgactccagtccatctgcagcggtccttgttgggataggtttcaaaggcatgagagtgatgagggtcaaaaatctgaacctctacgcttttggtttatatatgcaaccgacttctatccgtgagaagctgggtcctaagtatgcttcatttccaactgacaagctgatggagaaccctgatttctatagtgatcttctcagggaaaaccttgatataagggtcaggttggtggttaactacaatggccttagcgttggtgcagtgcgagatgtgtttgagaagtcccttggcctgcggctgcagaagatgaatcctaacacagactttcactgcttgaagacctttggttctcacttcacagaagatatcgctataccttcgggtacgaagattgacttctgtcaaacatcagatgggaagcttataacagaaattgatgggaaacaaattggtgctgttcggagcaaagatctttgcaaggctttcttcgacatgtatattggtgattcaccggtttcactggaggccaaaaaagtcgttgcccagaacgtggctgggctcattggaagacgctgaggatagcgagaggatggttatttcattcttctgtacagttagagaggattcatatgagcgggaaaataggccaagtatgtagagtgatctgtcttgtatagaaagcaggcaaaaaggtccaatgtatatgtggaaggtagcatcttcagttgtgctaggcctccattcttttttttttcttgtttggatgggccttttgcctcttcgtagctgctgtatcatgtatgctcccattgagccaggagttgtaaaatattaaattgaaggtgcttcttccataaaatgatgcatacctgtaaatctttgttgcatattgggatgttcctggtttggcgtttcaatg

SEQ ID NO: 220909 - DNA, 402 bp, Zea Mays
acaaacatacttttaagttgttctgaaggaaccttgagattcaaagttagtaggtatggtgaaggctattttataggctgtgatcgacatccaaaatgcaagtacattgctcgctcattatcacaacaagaagatgaaaccgaacccaccgaagaatgtcaaaaaacttttacacccagattacttggtgtcatgcctgattctgatgaaaaggtttttttgaaacaaggcccatatggccactatgttcagattggagaggacaaaaagggactgtttccgaaaagggcttccctttccaagcctgcgtgctggttgggcctaaggcttgtaatgggagaacttggagtgtttgagggtggttttggtagaattttctacaagagaacatatgccatgtaa

SEQ ID NO: 220910 - DNA, 393 bp, Zea Mays
aaacatacttttaagttgttctgaaggaaccttgagattcaaagttagtaggtatggtgaaggctattttataggctgtgatcgacatccaaaatgcaagtacattgctcgctcattatcacaacaagaagatgaaaccgaacccaccgaagaatgtcaaaaaacttttacacccagattacttggtgtcatgcctgattctgatgaaaaggattggtgttgccaatgaaatctgttaagaatctatggcagaccaataggataggaattggttcacaataacataacaccccgacttcctaacaaaaatgtggccacttagtcactcatcgctcacaatcgcccacgccggggtacacccacggcaaagacctgcgaccgtgtcgggggaca

SEQ ID NO: 220911 - DNA, 924 bp, Zea Mays
cgccgttttccccatctcgcgcagcgctactgccggctgtcccgagtcccgaccaccgtcctccgctcccggacgtgaatccttcctcctaccgcgatgaccttcccgtcggtgaagaacatcctcctactggactccgaggggaagcgcgtcgccgtgaagtactacagcgatggctggcctactctctccgcgaagctggccttcgagaagtcggtcttcgccaaaacccagaaagcgaatgctggaacggatgagattgtaatgtttgatggtcaaattgtggtatacaagttcatccaagacctgcacttttttgttactggaggagaagaggagaatgagcttattttagcatcagttcttcagggattctctgatgctgtcgaacgacttctcaagaacatggttgacaaaaggacagcactcgagaatttggacctgatcctattgtgtcttgatgaaattgttgatggagggattgtacttgaaacagaaggaagagagatagctgaaaaggtgtctggtcacggatcggagggtgcttcatcggctgagcagactttagtcaatgccctaacgcaagcaagagagcatctggcgaagtctcttctcatgtgatgttgtgctttatattttgggggtgacgacggagtatctattattgtgtctggatgacactattctttttgttagcaacggagaaagaaaaatgtctgaagcatttgaatgtgtagagtggcacattgcttccaaaattctcatggtcatctataagccttcaaagttctgtagcatgattgttcttatattgactggttcagttatttgtcgttacttgttttgtttaaccttttccctttggaaacgttaaaatagcaagcttatggagataatttagcatgtcctaccataacgaatcag

SEQ ID NO: 220912 - DNA, 1836 bp, Zea Mays
ctccggtcgaccggtcctccccaaaacgtccgcacgccgttttccccatctcgcgcagcgctactgccggctgtcccgagtcccgaccaccgtcctccgctcccggacgtgaatccttcctcctaccgcgatggagaccttcccgtcggtgaagaacatcctcctactggactccgaggggaagcgcgtcgccgtgaagtactacagcgatggctggcctactctctccgcgaagctggccttcgagaagtcggtcttcgccaaaacccagaaagcgaatgctggaacggatggtaatttacatctgatttctcttaatacggaagaattgttttcgactgatggtgagcgttgttgtgctcccttgaggtagtccggagtacttgattaacattatcatctcataatgaactcatgagtgtgatgtattgatgtgcctgtttgcgtgttttttcttttcttcaagtatttcatatgtttatttgtttctctttaacagcagagattgtaatgtttgatggtcaaattgtggtatacaagttcatccaagacctgcacttttttgttactggaggagaagaggagaatgagcttattttagcatcagttcttcagggattctctgatgctgtcgaacgacttctcaagttatcttccctctattgaagtttatcttttcaaccattgtttgttctgttacatgttattgtgttaatgctgattgtatatgaatgtgtttccaaccttggtggtttcaggaacatggttgacaaaaggacagcactcgagaatttggacctgatcctattgtgtcttgatgaaattgttgatggagggtaaagccttttcttactacgtacatgatattaagggcttcttttcttgttctctttattgtgtacatttattatcctttgatctgaaatcacctgactcatctgggccatggcaatagagctctattagggcctctatttgtaatggttgtattcaccggattcaaaggtttagtctggtgttctgcttctgtacctcaagcccaagcatgcctaaccttttaatggggttacacaatttgatgtgtgaaacaatggcttagtttgctaaagacatcagcaaaataaacagcccattcctttttttttgaaatggaacaaaactgattatccacatgaagaattgtatctatttgattttgagtttgagatcttgaacgactgcaggtaccacaactatgcactcgcctcaatgtgtctttgataacccattgatgtctaaactctgaaatgtggaagtgataggatcaagcatagagatgaatagaatcgcacattgtaagcagcatgtaattgtttggtgcattaaacataattttctgaatgattacacaggattgtacttgaaacagaaggaagagagatagctgaaaaggtgtctggtcacggatcggagggtgcttcatcggctgagcagactttagtcaatgccctaacgcaagcaagagagcatctggcgaagtctcttctcatgtgatgttgtgctttatattttgggggtgacgacggagtatctattattgtgtctggatgacactattctttttgttagcaacggagaaagaaaaatgtctgaagcatttgaatgtgtagagtggcacattgcttccaaaattctcatggtcatctataagccttcaaagttctgtagcatgattgttcttatattgactggttcagttatttgtcgttacttgttttgtttaaccttttccctttggaaacgttaaaatagcaagcttatggagataatttagcatgtcctaccataacgaatcag

SEQ ID NO: 220913 - DNA, 753 bp, Zea Mays
aacaggcttgctaagtcagcttcttctgagcttcggctgtctgtatggatggatgatgtctataattttatgcgctcgcaaaagaggcgtcgacttctaagttcagacgttactcaagattttgatgcaatgagaaagcagctagtgtcagattctgcagcaatatttaggtcaaaagttccggagtcactgatggaaaatctcattaaacgcctgagatcatacttcgagggcaaacattcaccacatgagtagtttttcatgcagttcttcagaagctacttaagacaatttaggtgtcaattggatcttggtggtctactccctaacgcttcgcgcggcttattttgaggaattttttgttttctttgctgaggttgagacgaggagttctaagctgtatcttttgttgtttccctgatgttataggcaacgcaccaccatccccaccgcttctctgtctagaatgtagaagatacttccttttctccttttgtaagatactatagctggcagattaaagcaagagtttatggtgtttttgaccctttacaaatgtattttttgccccgatcagtctcagttttggtcaatgttctgttacgggcagattcgatagcaacatttttctagattttctggtgtaatctccggaagcaaattgacttgagaatacaatcttttatcgttctgatggtaaattgatgtttgatcatgagaaaaacctgaatagccctagcgcttcgtctattt

SEQ ID NO: 220914 - DNA, 754 bp, Zea Mays
gttaccttcacattctaaaaccatattcttttcttccatttaatgtatatgcataatatattattccttcctgtgctgatcattgtctcattgtaataattttataatgctaatggcatgttttgttgaccttgcctccaaaaaacaggcttgctaagtcagcttcttctgagcttcggctgtctgtatggatggatgatgtctataattttatgcgctcgcaaaagaggcgtcgacttctaagttcagacgttactcaagattttgatgcaatgagaaagcagctagtgtcagattctgcagcaatatttaggtcaaaagttccggagtcactgatggaaaatctcattaaacgcctgagatcatacttcgagggcaaacattcaccacatgagtagtttttcatgcagttcttcagaagctacttaaggcaacgcaccaccatccccaccgcttctctgtctagaatgtagaagatacttccttttctccttttgtaagatactatagctggcagattaaagcaagagtttatggtgtttttgaccctttacaaatgtattttttgccccgatcagtctcagttttggtcaatgttctgttacgggcagattcgatagcaacatttttctagattttctggtgtaatctccggaagcaaattgacttgagaatacaatcttttatcgttctgatggtaaattgatgtttgatcatgagaaaaacctgaatagccctagcgcttcgtctattt

SEQ ID NO: 220915 - DNA, 570 bp, Zea Mays
atggctcccttcgcgctcggatctcaggtacggacagccacccgcgtacgtggtcgtcgtagcctcggtgtccgtcggcttgaactcttccgtcaagggtgtcgcactcaagtcccaggcagggatgcatgccaaatcacggtgctgcatcatgaggacaatggaatgaatatagagatggcaaagctagctttttccaagggcatctggagttacatatgtaaaatgaacaatgctctacgtcggtatcctcagcatggcagtccatcagtgtcaattctgaccatgcagaaacttatgaagaaggatttggagactgccgacgcaagcctttctgcttctcagaacactgcagcatcggtcgttccttccacaccgacttccaggacttcaccatgcaagcttgcggggaggaagtctcgccaaatgatcgcgagcgggattctgctggttggaagcatcgtttgtctatctcgaggccgatccaacctcggggcgcagctcgcgatggccttcttcctgaaaaaggccttcaagcaagagaggcaatcaggctcctcatcgacatga

SEQ ID NO: 220916 - DNA, 2061 bp, Zea Mays
cgcacacccagccagaacgaacgccagaaggcccagaaccgctacctcctccaatacactttcgtggctccgccgcagcacgaaaccctagcttctgcatctccgccccctccacctcccctccgcgaagcaggcgagatgtcgtcgggcggcggtggggggcagcagttccgctacacgcagacgccgtccaaggtgctgcacctgcggaaccttccgtgggagtgcgcggaagaggagctcgttgagctctgcaagcccttcggccgcatcatcaacacaaagagcggcgtcggcgccaaccgcaaccaggccttcgtcgagttcactgacgttaatcaggcaatctcgatggtttcttactttgcatcatcttcagaaccagcacaaatacgaggcaagactgtttacattcagtattcaaacaggcaagaaataattaacaacaagagtcctggagagactgctggaaatgtcttgcttgttactatagagggtgttcaagctagtgacgtcaccattgatgtgatccatatggcccatgttaactggagaaaatgtcgttatcaacacctgcaatgggagagataccatgtttgttttgccgcctctgtcttctaactagtacattcaaagttcttatgaactcttatgtctcatcttgaggatgcaactttctaagtatcccccatcaacgcgcttatctccggtgtagggcacctcctgtttattcaagttattcatgaaaggttttctcggcctttgggtatgttcataaaatagccacctttgaaaaggctgcaggttttcagatactgcttcagctgctagagaagccttagatggaaggagcatcccaagttacttgcttccagagcacgtgacatcctgctgcctgcggatttctttttctgcacataaggatttaaacatcaagtttcagtcaaaccgcagcagggattataataatccatatcttccaattaattattctgccatggatggtacattgcagcctgctgttggatctgacggaaggaaagtggaggctcaaggcaatgttcttcttgcatcaattgagaatatgcaatatgctgtttctgtagacgtgcttcatactgtgttctcatcatttggtacagtccagaaaattgctatttttgagaagaatgggggaacacaagctttgattcagtaccctgatgtaaatactgccgctgtagcgaaggaagcattggaagggcattgcatctacgatggcggctactgtaagcttcacctgtcatactcccgtcatactgatctgaatgtgaaggcacatggtgacaagagcagagattatacaattccagctggcgtaatccaaggggcgccacaaccacctggtatacaagccacgtcccctgggtggcaaggtaaccttcaagcagcagggccatatgccccacccggtgcccctcctcaaaatcacagtgccaatggacaagtgccgaactggactcctggcaattcagggtattccccagccccaggaacatatccaggccagatgtactcatctccggcacagtatgtagcatcagggagcttccttaatacctcagcggccactccgcctcagtatgcaacctcagggggcttccctaataccccatccaccgctccgtcacagtatgcagcatcaaggggcttccctaacaccacacctgccgcccctcctggtgctccatcacaaacgccgcacgcttcccagcagatgccgcatcagcatggaaatcattcaggaggaggcacgcccggaactagccaaccgccactgccagcatcatattaccgttaagttggatcttcttttgctattgtacttgacctgtgttttgaactgagtaatcatgtaatactgcaataacctgcggtctgtaactgtgtttagatgtgatagcagatggatacgagtgaggaatacatgaatatgtttggggttttcattcattttaaaaaacggatcagtgttggctcatggcgattactggcaagatcatgattgatgttggattggtg

SEQ ID NO: 220917 - DNA, 2039 bp, Zea Mays
cgcacacccagccagaacgaacgccagaaggcccagaaccgctacctcctccaatacactttcgtggctccgccgcagcacgaaaccctagcttctgcatctccgccccctccacctcccctccgcgaagcaggcgagatgtcgtcgggcggcggtggggggcagcagttccgctacacgcagacgccgtccaaggtgctgcacctgcggaaccttccgtgggagtgcgcggaagaggagctcgttgagctctgcaagcccttcggccgcatcatcaacacaaagagcggcgtcggcgccaaccgcaaccaggccttcgtcgagttcactgacgttaatcaggcaatctcgatggtttcttactttgcatcatcttcagaaccagcacaaatacgaggcaagactgtttacattcagtattcaaacaggcaagaaataattaacaacaagagtcctggagagactgctggaaatgtcttgcttgttactatagagggtgttcaagctagtgacgtcaccattgatgtgatccatatggcccatgttaactggagaaaatgtcgttatcaacacctgcaatgggagagataccatgtttgttttgccgcctctgtcttctaactagtacattcaaagttcttatgaactcttatgtctcatcttgaggatgcaactttctaagtatcccccatcaacgcgcttatctccggtgtagggcacctcctgtttattcaagttattcatgaaaggttttctcggcctttgggtatgttcataaaatagccacctttgaaaaggctgcaggttttcaggcattgatccagtacactgatgcagatactgcttcagctgctagagaagccttagatggaaggagcatcccaagttacttgcttccagagcacgtgacatcctgctgcctgcggatttctttttctgcacataaggatttaaacatcaagtttcagtcaaaccgcagcagggattataataatccatatcttccaattaattattctgccatggatggtacattgcagcctgctgttggatctgacggaaggaaagtggaggctcaaggcaatgttcttcttgcatcaattgagaatatgcaatatgctgtttctgtagacgtgcttcatactgtgttctcatcatttggtacagtccagaaaattgctatttttgagaagaatgggggaacacaagctttgattcagtaccctgatgtaaatactgccgctgtagcgaaggaagcattggaagggcattgcatctacgatggcggctactgcacatggtgacaagagcagagattatacaattccagctggcgtaatccaaggggcgccacaaccacctggtatacaagccacgtcccctgggtggcaaggtaaccttcaagcagcagggccatatgccccacccggtgcccctcctcaaaatcacagtgccaatggacaagtgccgaactggactcctggcaattcagggtattccccagccccaggaacatatccaggccagatgtactcatctccggcacagtatgtagcatcagggagcttccttaatacctcagcggccactccgcctcagtatgcaacctcagggggcttccctaataccccatccaccgctccgtcacagtatgcagcatcaaggggcttccctaacaccacacctgccgcccctcctggtgctccatcacaaacgccgcacgcttcccagcagatgccgcatcagcatggaaatcattcaggaggaggcacgcccggaactagccaaccgccactgccagcatcatattaccgttaagttggatcttcttttgctattgtacttgacctgtgttttgaactgagtaatcatgtaatactgcaataacctgcggtctgtaactgtgtttagatgtgatagcagatggatacgagtgaggaatacatgaatatgtttggggttttcattcattttaaaaaacggatcagtgttggctcatggcgattactggcaagatcatgattgatgttggattggtg

SEQ ID NO: 220918 - DNA, 2083 bp, Zea Mays
cccagccagaacgaacgccagaaggcccagaaccgctacctcctccaatacactttcgtggctccgccgcagcacgaaaccctagcttctgcatctccgccccctccacctcccctccgcgaagcaggcgagatgtcgtcgggcggcggtggggggcagcagttccgctacacgcagacgccgtccaaggtgctgcacctgcggaaccttccgtgggagtgcgcggaagaggagctcgttgagctctgcaagcccttcggccgcatcatcaacacaaagagcggcgtcggcgccaaccgcaaccaggccttcgtcgagttcactgacgttaatcaggcaatctcgatggtttcttactttgcatcatcttcagaaccagcacaaatacgaggcaagactgtttacattcagtattcaaacaggcaagaaataattaacaacaagagtcctggagagactgctggaaatgtcttgcttgttactatagagggtgttcaagctagtgacgtcaccattgatgtgatccatatgcaggcccatgttaactggagaaaatgtcgttatcaacacctgcaatgggagagataccatgtttgttttgccgcctctgtcttctaactagtacattcaaagttcttatgaactcttatgtctcatcttgaggatgcaactttctaagtatcccccatcaacgcgcttatctccggtgtagggcacctcctgtttattcaagttattcatgaaaggttttctcggcctttgggtatgttcataaaatagccacctttgaaaaggctgcaggttttcaggcattgatccagtacactgatgcagatactgcttcagctgctagagaagccttagatggaaggagcatcccaagttacttgcttccagagcacgtgacatcctgctgcctgcggatttctttttctgcacataaggatttaaacatcaagtttcagtcaaaccgcagcagggattataataatccatatcttccaattaattattctgccatggatggtacattgcagcctgctgttggatctgacggaaggaaagtggaggctcaaggcaatgttcttcttgcatcaattgagaatatgcaatatgctgtttctgtagacgtgcttcatactgtgttctcatcatttggtacagtccagaaaattgctatttttgagaagaatgggggaacacaagctttgattcagtaccctgatgtaaatactgccgctgtagcgaaggaagcattggaagggcattgcatctacgatggcggctactgtaagcttcacctgtcatactcccgtcatactgatctgaatgtgaaggcacatggtgacaagagcagagattatacaattccagctggcgtaatccaaggggcgccacaaccacctggtatacaagccacgtcccctgggtggcaaggtaaccttcaagcagcagggccatatgccccacccggtgcccctcctcaaaatcacagtgccaatggacaagtgccgaactggactcctggcaattcagggtattccccagccccaggaacatatccaggccagatgtactcatctccggcacagtatgtagcatcagggagcttccttaatacctcagcggccactccgcctcagtatgcaacctcagggggcttccctaataccccatccaccgctccgtcacagtatgcagcatcaaggggcttccctaacaccacacctgccgcccctcctggtgctccatcacaaacgccgcacgcttcccagcagatgccgcatcagcatggaaatcattcaggaggaggcacgcccggaactagccaaccgccactgccagcatcatattaccgttaagttggatcttcttttgctattgtacttgacctgtgttttgaactgagtaatcatgtaatactgcaataacctgcggtctgtaactgtgtttagatgtgatagcagatggatacgagtgaggaatacatgaatatgtttggggttttcattcattttaaaaaacggatcagtgttggctcatggcgattactggcaagatcatgattgatgttggattggtg

SEQ ID NO: 220919 - DNA, 2076 bp, Zea Mays
gccagaacgaacgccagaaggcccagaaccgctacctcctccaatacactttcgtggctccgccgcagcacgaaaccctagcttctgcatctccgccccctccacctcccctccgcgaagcaggcgagatgtcgtcgggcggcggtggggggcagcagttccgctacacgcagacgccgtccaaggtgctgcacctgcggaaccttccgtgggagtgcgcggaagaggagctcgttgagctctgcaagcccttcggccgcatcatcaacacaaagagcggcgtcggcgccaaccgcaaccaggccttcgtcgagttcactgacgttaatcaggcaatctcgatggtttcttactttgcatcatcttcagaaccagcacaaatacgaggcaagactgtttacattcagtattcaaacaggcaagaaataattaacaacaagagtcctggagagactgctggaaatgtcttgcttgttactatagagggtgttcaagctagtgacgtcaccattgatgtgatccatatggcccatgttaactggagaaaatgtcgttatcaacacctgcaatgggagagataccatgtttgttttgccgcctctgtcttctaactagtacattcaaagttcttatgaactcttatgtctcatcttgaggatgcaactttctaagtatcccccatcaacgcgcttatctccggtgtagggcacctcctgtttattcaagttattcatgaaaggttttctcggcctttgggtatgttcataaaatagccacctttgaaaaggctgcaggttttcaggcattgatccagtacactgatgcagatactgcttcagctgctagagaagccttagatggaaggagcatcccaagttacttgcttccagagcacgtgacatcctgctgcctgcggatttctttttctgcacataaggatttaaacatcaagtttcagtcaaaccgcagcagggattataataatccatatcttccaattaattattctgccatggatggtacattgcagcctgctgttggatctgacggaaggaaagtggaggctcaaggcaatgttcttcttgcatcaattgagaatatgcaatatgctgtttctgtagacgtgcttcatactgtgttctcatcatttggtacagtccagaaaattgctatttttgagaagaatgggggaacacaagctttgattcagtaccctgatgtaaatactgccgctgtagcgaaggaagcattggaagggcattgcatctacgatggcggctactgtaagcttcacctgtcatactcccgtcatactgatctgaatgtgaaggcacatggtgacaagagcagagattatacaattccagctggcgtaatccaaggggcgccacaaccacctggtatacaagccacgtcccctgggtggcaaggtaaccttcaagcagcagggccatatgccccacccggtgcccctcctcaaaatcacagtgccaatggacaagtgccgaactggactcctggcaattcagggtattccccagccccaggaacatatccaggccagatgtactcatctccggcacagtatgtagcatcagggagcttccttaatacctcagcggccactccgcctcagtatgcaacctcagggggcttccctaataccccatccaccgctccgtcacagtatgcagcatcaaggggcttccctaacaccacacctgccgcccctcctggtgctccatcacaaacgccgcacgcttcccagcagatgccgcatcagcatggaaatcattcaggaggaggcacgcccggaactagccaaccgccactgccagcatcatattaccgttaagttggatcttcttttgctattgtacttgacctgtgttttgaactgagtaatcatgtaatactgcaataacctgcggtctgtaactgtgtttagatgtgatagcagatggatacgagtgaggaatacatgaatatgtttggggttttcattcattttaaaaaacggatcagtgttggctcatggcgattactggcaagatcatgattgatgttggattggtg

SEQ ID NO: 220920 - DNA, 2021 bp, Zea Mays
cgccagaaggcccagaaccgctacctcctccaatacactttcgtggctccgccgcagcacgaaaccctagcttctgcatctccgccccctccacctcccctccgcgaagcaggcgagatgtcgtcgggcggcggtggggggcagcagttccgctacacgcagacgccgtccaaggtgctgcacctgcggaaccttccgtgggagtgcgcggaagaggagctcgttgagctctgcaagcccttcggccgcatcatcaacacaaagagcggcgtcggcgccaaccgcaaccaggccttcgtcgagttcactgacgttaatcaggcaatctcgatggtttcttactttgcatcatcttcagaaccagcacaaatacgaggcaagactgtttacattcagtattcaaacaggcaagaaataattaacaacaagagtcctggagagactgctggaaatgtcttgcttgttactatagagggtgttcaagctagtgacgtcaccattgatgtgatccatatgcaggcccatgttaactggagaaaatgtcgttatcaacacctgcaatgggagagataccatgtttgttttgccgcctctgtcttctaactagtacattcaaagttcttatgaactcttatgtctcatcttgaggatgcaactttctaagtatcccccatcaacgcgcttatctccggtgtagggcacctcctgtttattcaagttattcatgaaaggttttctcggcctttgggtatgttcataaaatagccacctttgaaaaggctgcaggttttcaggcattgatccagtacactgatgcagatactgcttcagctgctagagaagccttagatggaaggagcatcccaagttacttgcttccagagcacgtgacatcctgctgcctgcggatttctttttctgcacataaggatttaaacatcaagtttcagtcaaaccgcagcagggattataataatccatatcttccaattaattattctgccatggatggtacattgcagcctgctgttggatctgacggaaggaaagtggaggctcaaggcaatgttcttcttgcatcaattgagaatatgcaatatgctgtttctgtagacgtgcttcatactgtgttctcatcatttggtacagtccagaaaattgctatttttgagaagaatgggggaacacaagctttgattcagtaccctgatgtaaatactgccgctgtagcgaaggaagcattggaagggcattgcatctacgatggcggctactgcacatggtgacaagagcagagattatacaattccagctggcgtaatccaaggggcgccacaaccacctggtatacaagccacgtcccctgggtggcaaggtaaccttcaagcagcagggccatatgccccacccggtgcccctcctcaaaatcacagtgccaatggacaagtgccgaactggactcctggcaattcagggtattccccagccccaggaacatatccaggccagatgtactcatctccggcacagtatgtagcatcagggagcttccttaatacctcagcggccactccgcctcagtatgcaacctcagggggcttccctaataccccatccaccgctccgtcacagtatgcagcatcaaggggcttccctaacaccacacctgccgcccctcctggtgctccatcacaaacgccgcacgcttcccagcagatgccgcatcagcatggaaatcattcaggaggaggcacgcccggaactagccaaccgccactgccagcatcatattaccgttaagttggatcttcttttgctattgtacttgacctgtgttttgaactgagtaatcatgtaatactgcaataacctgcggtctgtaactgtgtttagatgtgatagcagatggatacgagtgaggaatacatgaatatgtttggggttttcattcattttaaaaaacggatcagtgttggctcatggcgattactggcaagatcatgattgatgttggattggtg

SEQ ID NO: 220921 - DNA, 1490 bp, Zea Mays
aggcccatgttaactggagaaaatgtcgttatcaacacctgcaatgggagagataccatgtttgttttgccgcctctgtcttctaactagtacattcaaagttcttatgaactcttatgtctcatcttgaggatgcaactttctaagtatcccccatcaacgcgcttatctccggtgtagggcacctcctgtttattcaagttattcatgaaaggttttctcggcctttgggtatgttcataaaatagccacctttgaaaaggctgcaggttttcaggcattgatccagtacactgatgcagatactgcttcagctgctagagaagccttagatggaaggagcatcccaagagcacgtgacatcctgctgcctgcggatttctttttctgcacataaggatttaaacatcaagtttcagtcaaaccgcagcagggattataataatccatatcttccaattaattattctgccatggatggtacattgcagcctgctgttggatctgacggaaggaaagtggaggctcaaggcaatgttcttcttgcatcaattgagaatatgcaatatgctgtttctgtagacgtgcttcatactgtgttctcatcatttggtacagtccagaaaattgctatttttgagaagaatgggggaacacaagctttgattcagtaccctgatgtaaatactgccgctgtagcgaaggaagcattggaagggcattgcatctacgatggcggctactgcacatggtgacaagagcagagattatacaattccagctggcgtaatccaaggggcgccacaaccacctggtatacaagccacgtcccctgggtggcaaggtaaccttcaagcagcagggccatatgccccacccggtgcccctcctcaaaatcacagtgccaatggacaagtgccgaactggactcctggcaattcagggtattccccagccccaggaacatatccaggccagatgtactcatctccggcacagtatgtagcatcagggagcttccttaatacctcagcggccactccgcctcagtatgcaacctcagggggcttccctaataccccatccaccgctccgtcacagtatgcagcatcaaggggcttccctaacaccacacctgccgcccctcctggtgctccatcacaaacgccgcacgcttcccagcagatgccgcatcagcatggaaatcattcaggaggaggcacgcccggaactagccaaccgccactgccagcatcatattaccgttaagttggatcttcttttgctattgtacttgacctgtgttttgaactgagtaatcatgtaatactgcaataacctgcggtctgtaactgtgtttagatgtgatagcagatggatacgagtgaggaatacatgaatatgtttggggttttcattcattttaaaaaacggatcagtgttggctcatggcgattactggcaagatcatgattgatgttggattggtg

SEQ ID NO: 220922 - DNA, 4809 bp, Zea Mays
ggactagtggctagccccgccccggctagacgccacgatccattagccctagccaacgaccggctgccagactgcaacagccaccggcggtcggcacgacagcacggtccttccattgttgctcccagctccaacgcagcattactcatctccattctccagtccgataatccactcattacctcatcatcgtttccaaaagcaaagctttccacgcagattccaccattaaattgggcgaacttttttgaattaaaaactcaaatcctggaaaacgagatgcggtaggctggtagtaggaggactaatcatgtgggcgacgctacataaacccgtcgcgcacgccaacttgcgtctcctcctcacagtctccgccttctccggaccactccacttaggcaccgccagcgctgtcgcggcggcggttacgacccgacgctcgagttctagcaggggcgtcgcggccaccgcgatgccttcgtcgtctccgcctccgctgccaccagccgaggagacgaccgcctctgctgccgctctcgcccctgagggtggattctccctcaccgagccctcgttcctcgagtccctcatgccgaagaaggagatcggcgtcgaccgcttcctcgccgctcaccctgagtatgacgggcgcagcgcactcatcgctatcttcgattctggagtcgatccagctgctgctgggttacagactacttcagatggaaagcctaaaatccttgatgtacttgattgcactggtagtggtgatgttgacacgtccaaagtggtgaaagctgatgctgatggtgctattgttggtgcttcaggtgcccgtttggttataaacccctcatggaaaaacccttctcaagagtggcatgttggctgtaaattaatatatgaactgtttactgacacacttacatctcgattgaagaaagaaagaaagaagaaatgggacgaggaaaaccaggaatcaatttccgatgctctgaagcagctgaatgaatttgaaaagaagcatcctaagcctgatgacaccatgctgaagaaggcacatgaagacatgcaaagcagacttgattacctgaggaaacaagctgaaggttatgacgataaggggcctgtaattgacattgttacatggaatgatggtgatgtgtggagggttgctgtcgatacccagacccttgagggtaacaatgatggtggaaaactagcagattttgttcctctgacaaactacaggcttgaacgcaaatatgcaattttcagcaaattggatgcttgctcttttgtagcaaatgtttataatgatgggaaccttgtcagtatagtaactgactgctctccccatgctactcatgtcgcgggcattgcagctgcatttcatccagatgaacctctgctgaatggagttgcacctggagcacaattgatttcctgtaagattggagacactcgcttaggatctatggagacagggacggggctggtgagggccttgatagctgcagtagagcacaaatgtgatctgattaacatgagctatggagagcctacccttcttcctgactatggcagattcattgatctttctaatgaggttgtggacaaacatcgcattatatttattagtagcgccggaaacaatggaccggctttgaacactgtgggtgctccaggtgggactagtacaagcattattggtgttggtgcttatgtttcaccagccatggctgctggagctcactgtgttgtacaaccacctgcaaagggaatggagtacacatggtctagccgcgggcctactgctgatggggatcttggcgtttccattagtgcacctggtggtgcagttgctcctgtaccaacttggacgcttcaatctcgcatgctcatgaatggcacttccatgtcatctccttctgcctgtggtggggtagctcttcttgttagtggcatgaaggctgaaggcattccattaagcccttattctgtaagaaaagcaatagagaatacagccgcatctataagtaatgcacctgaggagaaactgaccacaggaaatgggcttttgcaagttgatagggcttttgaatatgcacagcaggctaagaagttgccacttgtttcttatagaatctcaatcaatcaagtgggaaagtcagttccaaaactaagaggaatatacctccgcgggggcaatgcatgctgccaaacaagtgagtggactgtgcaacttgacccaaaatttcatgagggcgcgagtaacttggagcaactggttccttttgaggagtgcctgcaactgcattctactgatacctctgtggttcaaattcctgagtatatactggtgacaaacaatggacgcagtttcaacattgttgtcaatcctgctaatatcagcagtggccttcactattttgaagtttatggcatagattacaaagcaccatggcgtgggcctattttccgtgtgccaattactgtaataaagcctattgctctattgggagagccaccactattgtcaatttcaaaccttcgttttcaatctggtcatattgaaaggaggttcataaatgtaccttttggagcttcatgggcggaagttactatgcgaacatcagcttttgatactcctagaagattctttttggacactgttcagatctgtccactgaagcgacctgttaaatgggaggctgttgttactttctcttctccatcttcaaagaatttcagttttcctgtagaaggtggcttaactttggagttgtccatagcccagttctggtctagtggaattgctagccatgaacctacctgtgttgattttgagattgtgctgcatggaatatccattgatcagaaagtaagtacccttgatggtgagtcacccttgcttatagttgctagatcacttctagcgtcagagaagcttgttcctgttggcaccctgaacaagatcaggataccttatcgacccgtggagtgtaatctttcttcacttcccactgaccgtgataaattgccctctggcaagcaaattattgccctgaccttaacttacaagttcaaattagaagacaatgctgaaataaagccccatgtgccactgcttaacaacagaatatatgacaataaatttgagtctcagttttatagaatatcagattcaaacaagcgtatttactcgtccggagacgtttaccctagttatgtcagactttccaaaggagaatacacgttgcaactgtacataaggcatgagaatgtgcaattcttagagaaactcaaggaactggttctgtttattgagaggaaactagacaaaaaggatttcgttccattgatgttctactcccaacctgatggtcctatagttggaagtggcaccttcaaatccactgttctagttccaggcgaacctgaagcattctatgtgggtcctccgtctagtgaaaaactcccaaagaatgctccacctggggctgttttggttgggtccataacctatggtactgtaagcacatttaacaagaaagatgaacaaaaccaccgtgctccagtatcttatagtatctcatataccattttgccatcaaaggttgatgataaagaaaagggggttttagttggtacaaagagcatacctgaacagttagatgaggaggttcgagacaccaagataaagtttctttccagcgttaagcaactaactgaggaggacaagtctgcctggtcagaacttgtggtttctctgaagtcagaatatccgaagtacacacctttgctttctaagattttgcaatgtgtcctccagaaaggaactgatggtgataagattagccatgaaaaagaggttattgctgcagccgatgaggttgtgggcagtattgataaagaggaactggctaagtatttatctctaaattcagatcctgaagatgaagaagcacagaaattcaagaaaaaaatagaagaaacgcgagatcagttggctgatgcactatatcaaaagtgtcttgcattggctgagattgaatcactgaagtctgatgagtcaattgaggtatctgctaaagatatttttgaggagaattacaaagaattgattaaatgggttgatgtcaaatctgcaaaatatggcacttcgactgttttgcgtgaaaaacgctgtggaagacctggtacagcattgaagattctaaatgatttgattcaaaatgaatctgaaccaaagaaaaagctttatgatttgaagatccagttgattgaggagatgggatggaaccatgtctcaacctacgaaaaacagtggatgcaagtccgctttcccccatgtctgccaccattttgattgtgaactcatttttacaatggctctatcatcctgggttcagtagttgtcattttcattgctgggtgcgtcagttcattatttcgatggcaaacagccaactaggcaagctactggatttgtgcgtttggggacacagttattccatagttattttgtggtacaatatcaggggagtcctttctccaaggagataagacggaacagagatattttgatggacttgaaggagattttatcctcttcaatccttataatgtctatcaaaccaaataaggtttataatccttgtcaaaccaaacaatgcctaaatgagcgtagaatagccgagaatgatatgggcttgtctttaacaatttggcattaaacatagttagctgaacattaagcaaaataactgcgtaaaagcatcacttgttaaggcacttcgaggacgcgag

SEQ ID NO: 220923 - DNA, 4711 bp, Zea Mays
ctagacgccacgatccattagccctagccaacgaccggctgccagactgcaacagccaccggcggtcggcacgacagcacggtccttccattgttgctcccagctccaacgcagcattactcatctccattctccagtccgataatccactcattacctcatcatcgtttccaaaagcaaagctttccacgcagattccaccattaaattgggcgaacttttttgaattaaaaactcaaatcctggaaaacgagatgcggtaggctggtagtaggaggactaatcatgtgggcgacgctacataaacccgtcgcgcacgccaacttgcgtctcctcctcacagtctccgccttctccggaccactccacttaggcaccgccagcgctgtcgcggcggcggttacgacccgacgctcgagttctagcaggggcgtcgcggccaccgcgatgccttcgtcgtctccgcctccgctgccaccagccgaggagacgaccgcctctgctgccgctctcgcccctgagggtggattctccctcaccgagccctcgttcctcgagtccctcatgccgaagaaggagatcggcgtcgaccgcttcctcgccgctcaccctgagtatgacgggcgcagcgcactcatcgctatcttcgattctggagtcgatccagctgctgctgggttacagactacttcagatggaaagcctaaaatccttgatgtacttgattgcactggtagtggtgatgttgacacgtccaaagtggtgaaagctgatgctgatggtgctattgttggtgcttcaggtgcccgtttggttataaacccctcatggaaaaacccttctcaagagtggcatgttggctgtaaattaatatatgaactgtttactgacacacttacatctcgattgaagaaagaaagaaagaagaaatgggacgaggaaaaccaggaatcaatttccgatgctctgaagcagctgaatgaatttgaaaagaagcatcctaagcctgatgacaccatgctgaagaaggcacatgaagacatgcaaagcagacttgattacctgaggaaacaagctgaaggttatgacgataaggggcctgtaattgacattgttacatggaatgatggtgatgtgtggagggttgctgtcgatacccagacccttgagggtaacaatgatggtggaaaactagcagattttgttcctctgacaaactacaggcttgaacgcaaatatgcaattttcagcaaattggatgcttgctcttttgtagcaaatgtttataatgatgggaaccttgtcagtatagtaactgactgctctccccatgctactcatgtcgcgggcattgcagctgcatttcatccagatgaacctctgctgaatggagttgcacctggagcacaattgatttcctgtaagattggagacactcgcttaggatctatggagacagggacggggctggtgagggccttgatagctgcagtagagcacaaatgtgatctgattaacatgagctatggagagcctacccttcttcctgactatggcagattcattgatctttctaatgaggttgtggacaaacatcgcattatatttattagtagcgccggaaacaatggaccggctttgaacactgtgggtgctccaggtgggactagtacaagcattattggtgttggtgcttatgtttcaccagccatggctgctggagctcactgtgttgtacaaccacctgcaaagggaatggagtacacatggtctagccgcgggcctactgctgatggggatcttggcgtttccattagtgcacctggtggtgcagttgctcctgtaccaacttggacgcttcaatctcgcatgctcatgaatggcacttccatgtcatctccttctgcctgtggtggggtagctcttcttgttagtggcatgaaggctgaaggcattccattaagcccttattctgtaagaaaagcaatagagaatacagccgcatctataagtaatgcacctgaggagaaactgaccacaggaaatgggcttttgcaagttgatagggcttttgaatatgcacagcaggctaagaagttgccacttgtttcttatagaatctcaatcaatcaagtgggaaagtcagttccaaaactaagaggaatatacctccgcgggggcaatgcatgctgccaaacaagtgagtggactgtgcaacttgacccaaaatttcatgagggcgcgagtaacttggagcaactggttccttttgaggagtgcctgcaactgcattctactgatacctctgtggttcaaattcctgagtatatactggtgacaaacaatggacgcagtttcaacattgttgtcaatcctgctaatatcagcagtggccttcactattttgaagtttatggcatagattacaaagcaccatggcgtgggcctattttccgtgtgccaattactgtaataaagcctattgctctattgggagagccaccactattgtcaatttcaaaccttcgttttcaatctggtcatattgaaaggaggttcataaatgtaccttttggagcttcatgggcggaagttactatgcgaacatcagcttttgatactcctagaagattctttttggacactgttcagatctgtccactgaagcgacctgttaaatgggaggctgttgttactttctcttctccatcttcaaagaatttcagttttcctgtagaaggtggcttaactttggagttgtccatagcccagttctggtctagtggaattgctagccatgaacctacctgtgttgattttgagattgtgctgcatggaatatccattgatcagaaagtaagtacccttgatggtgagtcacccttgcttatagttgctagatcacttctagcgtcagagaagcttgttcctgttggcaccctgaacaagatcaggataccttatcgacccgtggagtgtaatctttcttcacttcccactgaccgtgataaattgccctctggcaagcaaattattgccctgaccttaacttacaagttcaaattagaagacaatgctgaaataaagccccatgtgccactgcttaacaacagaatatatgacaataaatttgagtctcagttttatagaatatcagattcaaacaagcgtatttactcgtccggagacgtttaccctagttatgtcagactttccaaaggagaatacacgttgcaactgtacataaggatttcgttccattgatgttctactcccaacctgatggtcctatagttggaagtggcaccttcaaatccactgttctagttccaggcgaacctgaagcattctatgtgggtcctccgtctagtgaaaaactcccaaagaatgctccacctggggctgttttggttgggtccataacctatggtactgtaagcacatttaacaagaaagatgaacaaaaccaccgtgctccagtatcttatagtatctcatataccattttgccatcaaaggttgatgataaagaaaagggggttttagttggtacaaagagcatacctgaacagttagatgaggaggttcgagacaccaagataaagtttctttccagcgttaagcaactaactgaggaggacaagtctgcctggtcagaacttgtggtttctctgaagtcagaatatccgaagtacacacctttgctttctaagattttgcaatgtgtcctccagaaaggaactgatggtgataagattagccatgaaaaagaggttattgctgcagccgatgaggttgtgggcagtattgataaagaggaactggctaagtatttatctctaaattcagatcctgaagatgaagaagcacagaaattcaagaaaaaaatagaagaaacgcgagatcagttggctgatgcactatatcaaaagtgtcttgcattggctgagattgaatcactgaagtctgatgagtcaattgaggtatctgctaaagatatttttgaggagaattacaaagaattgattaaatgggttgatgtcaaatctgcaaaatatggcacttcgactgttttgcgtgaaaaacgctgtggaagacctggtacagcattgaagattctaaatgatttgattcaaaatgaatctgaaccaaagaaaaagctttatgatttgaagatccagttgattgaggagatgggatggaaccatgtctcaacctacgaaaaacagtggatgcaagtccgctttcccccatgtctgccaccattttgattgtgaactcatttttacaatggctctatcatcctgggttcagtagttgtcattttcattgctgggtgcgtcagttcattatttcgatggcaaacagccaactaggcaagctactggatttgtgcgtttggggacacagttattccatagttattttgtggtacaatatcaggggagtcctttctccaaggagataagacggaacagagatattttgatggacttgaaggagattttatcctcttcaatccttataatgtctatcaaaccaaataaggtttataatccttgtcaaaccaaacaatgcctaaatgagcgtagaatagccgagaatgatatgggcttgtctttaacaatttggcattaaacatagttagctgaacattaagcaaaataactgcgtaaaagcatcacttgttaaggcacttcgaggacgcgag

SEQ ID NO: 220924 - DNA, 4347 bp, Zea Mays
ctagacgccacgatccattagccctagccaacgaccggctgccagactgcaacagccaccggcggtcggcacgacagcacggtccttccattgttgctcccagctccaacgcagcattactcatctccattctccagtccgataatccactcattacctcatcatcgtttccaaaagcaaagctttccacgcagattccaccattaaattgggcgaacttttttgaattaaaaactcaaatcctggaaaacgagatgcggtaggctggtagtaggaggactaatcatgtgggcgacgctacataaacccgtcgcgcacgccaacttgcgtctcctcctcacagtctccgccttctccggaccactccacttaggcaccgccagcgctgtcgcggcggcggttacgacccgacgctcgagttctagcaggggcgtcgcggccaccgcgatgccttcgtcgtctccgcctccgctgccaccagccgaggagacgaccgcctctgctgccgctctcgcccctgagggtggattctccctcaccgagccctcgttcctcgagtccctcatgccgaagaaggagatcggcgtcgaccgcttcctcgccgctcaccctgagtatgacgggcgcagcgcactcatcgctatcttcgattctggagtcgatccagctgctgctgggttacagactacttcagatggaaagcctaaaatccttgatgtacttgattgcactggtagtggtgatgttgacacgtccaaagtggtgaaagctgatgctgatggtgctattgttggtgcttcaggtgcccgtttggttataaacccctcatggaaaaacccttctcaagagtggcatgttggctgtaaattaatatatgaactgtttactgacacacttacatctcgattgaagaaagaaagaaagaagaaatgggacgaggaaaaccaggaatcaatttccgatgctctgaagcagctgaatgaatttgaaaagaagcatcctaagcctgatgacaccatgctgaagaaggcacatgaagacatgcaaagcagacttgattacctgaggaaacaagctgaaggttatgacgataaggggcctgtaattgacattgttacatggaatgatggtgatgtgtggagggttgctgtcgatacccagacccttgagggtaacaatgatggtggaaaactagcagattttgttcctctgacaaactacaggcttgaacgcaaatatgcaattttcagcaaattggatgcttgctcttttgtagcaaatgtttataatgatgggaaccttgtcagtatagtaactgactgctctccccatgctactcatgtcgcgggcattgcagctgcatttcatccagatgaacctctgctgaatggagttgcacctggagcacaattgatttcctgtaagattggagacactcgcttaggatctatggagacagggacggggctggtgagggccttgatagctgcagtagagcacaaatgtgatctgattaacatgagctatggagagcctacccttcttcctgactatggcagattcattgatctttctaatgaggttgtggacaaacatcgcattatatttattagtagcgccggaaacaatggaccggctttgaacactgtgggtgctccaggtgggactagtacaagcattattggtgttggtgcttatgtttcaccagccatggctgctggagctcactgtgttgtacaaccacctgcaaagggaatggagtacacatggtctagccgcgggcctactgctgatggggatcttggcgtttccattagtgcacctggtggtgcagttgctcctgtaccaacttggacgcttcaatctcgcatgctcatgaatggcacttccatgtcatctccttctgcctgtggtggggtagctcttcttgttagtggcatgaaggctgaaggcattccattaagcccttattctgtaagaaaagcaatagagaatacagccgcatctataagtaatgcacctgaggagaaactgaccacaggaaatgggcttttgcaagttgatagggcttttgaatatgcacagcaggctaagaagttgccacttgtttcttatagaatctcaatcaatcaagtgggaaagtcagttccaaaactaagaggaatatacctccgcgggggcaatgcatgctgccaaacaagtgagtggactgtgcaacttgacccaaaatttcatgagggcgcgagtaacttggagcaactggttccttttgaggagtgcctgcaactgcattctactgatacctctgtggttcaaattcctgagtatatactggtgacaaacaatggacgcagtttcaacattgttgtcaatcctgctaatatcagcagtggccttcactattttgaagtttatggcatagattacaaagcaccatggcgtgggcctattttccgtgtgccaattactgtaataaagcctattgctctattgggagagccaccactattgtcaatttcaaaccttcgttttcaatctggtcatattgaaaggaggttcataaatgtaccttttggagcttcatgggcggaagttactatgcgaacatcagcttttgatactcctagaagattctttttggacactgttcagatctgtccactgaagcgacctgttaaatgggaggctgttgttactttctcttctccatcttcaaagaatttcagttttcctgtagaaggtggcttaactttggagttgtccatagcccagttctggtctagtggaattgctagccatgaacctacctgtgttgattttgagattgtgctgcatggaatatccattgatcagaaagtaagtacccttgatgatcaggataccttatcgacccgtggagtgtaatctttcttcacttcccactgaccgtgataaattgccctctggcaagcaaattattgccctgaccttaacttacaagttcaaattagaagacaatgctgaaataaagccccatgtgccactgcttaacaacagaatatatgacaataaatttgagtctcagttttatagaatatcagattcaaacaagcgtatttactcgtccggagacgtttaccctagttatgtcagactttccaaaggagaatacacgttgcaactgtacataaggatttcgttccattgatgttctactcccaacctgatggtcctatagttggaagtggcaccttcaaatccactgttctagttccaggcgaacctgaagcattctatgtgggtcctccgtctagtgaaaaactcccaaagaatgctccacctggggctgttttggttgggtccataacctatggtactgtaagcacatttaacaagaaagatgaacaaaaccaccgtgctccagtatcttatagtatctcatataccattttgccatcaaaggtcagtagtatagaatgcgccgtctccctattgtctacctttgttgttatgatgatccttgtgttagttctggatcaccagttcaggatcaccatacgggtacacagtcctgatcctgatactttttgtacagcatatatttgtgctctagattttgtctcatatatgttgcgatatattttgtttcatgctgtggttcattccttgttcggtcttcggtgtaatcaatacaagttattgcaggttgatgataaagaaaagggggttttagttggtacaaagagcatacctgaacagttagatgaggaggttcgagacaccaagataaagtttctttccagcgttaagcaactaactgaggaggacaagtctgcctggtcagaacttgtggtttctctgaagaatatccgaagtacacacctttgctttctaagattttgcaatgtgtcctccagaaaggaactgatggtgataagattagccatgaaaaagaggttattgctgcagccgatgaggttgtgggcagtattgataaagaggaactggctaagtatttatctctaaattcagatcctgaagatgaagaagcacagaaattcaagaaaaaaatagaagaaacgcgagatcagttggctgatgcactatatcaaaagtgtcttgcattggctgagattgaatcactgaagtctgatgagtcaattgaggtatctgctaaagatatttttgaggagaattacaaagaattgattaaatgggttgatgtcaaatctgcaaaatatggcacttcgactgttttgcgtgaaaaacgctgtggaagacctggtacagcattgaaggtcgtgagatactccaaacttgtggagattcctcacaaacgggtttgatataaggaagacatatgtggca

SEQ ID NO: 220925 - DNA, 4288 bp, Zea Mays
ctagacgccacgatccattagccctagccaacgaccggctgccagactgcaacagccaccggcggtcggcacgacagcacggtccttccattgttgctcccagctccaacgcagcattactcatctccattctccagtccgataatccactcattacctcatcatcgtttccaaaagcaaagctttccacgcagattccaccattaaattgggcgaacttttttgaattaaaaactcaaatcctggaaaacgagatgcggtaggctggtagtaggaggactaatcatgtgggcgacgctacataaacccgtcgcgcacgccaacttgcgtctcctcctcacagtctccgccttctccggaccactccacttaggcaccgccagcgctgtcgcggcggcggttacgacccgacgctcgagttctagcaggggcgtcgcggccaccgcgatgccttcgtcgtctccgcctccgctgccaccagccgaggagacgaccgcctctgctgccgctctcgcccctgagggtggattctccctcaccgagccctcgttcctcgagtccctcatgccgaagaaggagatcggcgtcgaccgcttcctcgccgctcaccctgagtatgacgggcgcagcgcactcatcgctatcttcgattctggagtcgatccagctgctgctgggttacagactacttcagatggaaagcctaaaatccttgatgtacttgattgcactggtagtggtgatgttgacacgtccaaagtggtgaaagctgatgctgatggtgctattgttggtgcttcaggtgcccgtttggttataaacccctcatggaaaaacccttctcaagagtggcatgttggctgtaaattaatatatgaactgtttactgacacacttacatctcgattgaagaaagaaagaaagaagaaatgggacgaggaaaaccaggaatcaatttccgatgctctgaagcagctgaatgaatttgaaaagaagcatcctaagcctgatgacaccatgctgaagaaggcacatgaagacatgcaaagcagacttgattacctgaggaaacaagctgaaggttatgacgataaggggcctgtaattgacattgttacatggaatgatggtgatgtgtggagggttgctgtcgatacccagacccttgagggtaacaatgatggtggaaaactagcagattttgttcctctgacaaactacaggcttgaacgcaaatatgcaattttcagcaaattggatgcttgctcttttgtagcaaatgtttataatgatgggaaccttgtcagtatagtaactgactgctctccccatgctactcatgtcgcgggcattgcagctgcatttcatccagatgaacctctgctgaatggagttgcacctggagcacaattgatttcctgtaagattggagacactcgcttaggatctatggagacagggacggggctggtgagggccttgatagctgcagtagagcacaaatgtgatctgattaacatgagctatggagagcctacccttcttcctgactatggcagattcattgatctttctaatgaggttgtggacaaacatcgcattatatttattagtagcgccggaaacaatggaccggctttgaacactgtgggtgctccaggtgggactagtacaagcattattggtgttggtgcttatgtttcaccagccatggctgctggagctcactgtgttgtacaaccacctgcaaagggaatggagtacacatggtctagccgcgggcctactgctgatggggatcttggcgtttccattagtgcacctggtggtgcagttgctcctgtaccaacttggacgcttcaatctcgcatgctcatgaatggcacttccatgtcatctccttctgcctgtggtggggtagctcttcttgttagtggcatgaaggctgaaggcattccattaagcccttattctgtaagaaaagcaatagagaatacagccgcatctataagtaatgcacctgaggagaaactgaccacaggaaatgggcttttgcaagttgatagggcttttgaatatgcacagcaggctaagaagttgccacttgtttcttatagaatctcaatcaatcaagtgggaaagtcagttccaaaactaagaggaatatacctccgcgggggcaatgcatgctgccaaacaagtgagtggactgtgcaacttgacccaaaatttcatgagggcgcgagtaacttggagcaactggttccttttgaggagtgcctgcaactgcattctactgatacctctgtggttcaaattcctgagtatatactggtgacaaacaatggacgcagtttcaacattgttgtcaatcctgctaatatcagcagtggccttcactattttgaagtttatggcatagattacaaagcaccatggcgtgggcctattttccgtgtgccaattactgtaataaagcctattgctctattgggagagccaccactattgtcaatttcaaaccttcgttttcaatctggtcatattgaaaggaggttcataaatgtaccttttggagcttcatgggcggaagttactatgcgaacatcagcttttgatactcctagaagattctttttggacactgttcagatctgtccactgaagcgacctgttaaatgggaggctgttgttactttctcttctccatcttcaaagaatttcagttttcctgtagaaggtggcttaactttggagttgtccatagcccagttctggtctagtggaattgctagccatgaacctacctgtgttgattttgagattgtgctgcatggaatatccattgatcagaaagtaagtacccttgatggtgagtcacccttgcttatagttgctagatcacttctagcgtcagagaagcttgttcctgttggcaccctgaacaagatcaggataccttatcgacccgtggagtgtaatctttcttcacttcccactgaccgtgataaattgccctctggcaagcaaattattgccctgaccttaacttacaagttcaaattagaagacaatgctgaaataaagccccatgtgccactgcttaacaacagaatatatgacaataaatttgagtctcagttttatagaatatcagattcaaacaagcgtatttactcgtccggagacgtttaccctagttatgtcagactttccaaaggagaatacacgttgcaactgtacataaggcatgagaatgtgcaattcttagagaaactcaaggaactggttctgtttattgagaggaaactagacaaaaaggatttcgttccattgatgttctactcccaacctgatggtcctatagttggaagtggcaccttcaaatccactgttctagttccaggcgaacctgaagcattctatgtgggtcctccgtctagtgaaaaactcccaaagaatgctccacctggggctgttttggttgggtccataacctatggtactgtaagcacatttaacaagaaagatgaacaaaaccaccgtgctccagtatcttatagtatctcatataccattttgccatcaaaggttgatgataaagaaaagggggttttagttggtacaaagagcatacctgaacagttagatgaggaggttcgagacaccaagataaagtttctttccagcgttaagcaactaactgaggaggacaagtctgcctggtcagaacttgtggtttctctgaagtcagaatatccgaagtacacacctttgctttctaagattttgcaatgtgtcctccagaaaggaactgatggtgataagattagccatgaaaaagaggttattgctgcagccgatgaggttgtgggcagtattgataaagaggaactggctaagtatttatctctaaattcagatcctgaagatgaagaagcacagaaattcaagaaaaaaatagaagaaacgcgagatcagttggctgatgcactatatcaaaagtgtcttgcattggctgagattgaatcactgaagtctgatgagtcaattgaggtatctgctaaagatatttttgaggagaattacaaagaattgattaaatgggttgatgtcaaatctgcaaaatatggcacttcgactgttttgcgtgaaaaacgctgtggaagacctggtacagcattgaaggtgtggctactggagactctcctcaattggtgatattttcttttggagcatgactgggcatgggtgggcacggcattgtggcgacatcagaagaacatat

SEQ ID NO: 220926 - DNA, 2601 bp, Zea Mays
aagactctccttatggtggccaaaacaaccgtacagttccaaaactaagaggaatatacctccgcgggggcaatgcatgctgccaaacaagtgagtggactgtgcaacttgacccaaaatttcatgagggcgcgagtaacttggagcaactggttccttttgaggagtgcctgcaactgcattctactgatacctctgtggttcaaattcctgagtatatactggtgacaaacaatggacgcagtttcaacattgttgtcaatcctgctaatatcagcagtggccttcactattttgaagtttatggcatagattacaaagcaccatggcgtgggcctattttccgtgtgccaattactgtaataaagcctattgctctattgggagagccaccactattgtcaatttcaaaccttcgttttcaatctggtcatattgaaaggaggttcataaatgtaccttttggagcttcatgggcggaagttactatgcgaacatcagcttttgatactcctagaagattctttttggacactgttcagatctgtccactgaagcgacctgttaaatgggaggctgttgttactttctcttctccatcttcaaagaatttcagttttcctgtagaaggtggcttaactttggagttgtccatagcccagttctggtctagtggaattgctagccatgaacctacctgtgttgattttgagattgtgctgcatggaatatccattgatcagaaagtaagtacccttgatggtgagtcacccttgcttatagttgctagatcacttctagcgtcagagaagcttgttcctgttggcaccctgaacaagatcaggataccttatcgacccgtggagtgtaatctttcttcacttcccactgaccgtgataaattgccctctggcaagcaaattattgccctgaccttaacttacaagttcaaattagaagacaatgctgaaataaagccccatgtgccactgcttaacaacagaatatatgacaataaatttgagtctcagttttatagaatatcagattcaaacaagcgtatttactcgtccggagacgtttaccctagttatgtcagactttccaaaggagaatacacgttgcaactgtacataaggatttcgttccattgatgttctactcccaacctgatggtcctatagttggaagtggcaccttcaaatccactgttctagttccaggcgaacctgaagcattctatgtgggtcctccgtctagtgaaaaactcccaaagaatgctccacctggggctgttttggttgggtccataacctatggtactgtaagcacatttaacaagaaagatgaacaaaaccaccgtgctccagtatcttatagtatctcatataccattttgccatcaaaggttgatgataaagaaaagggggttttagttggtacaaagagcatacctgaacagttagatgaggaggttcgagacaccaagataaagtttctttccagcgttaagcaactaactgaggaggacaagtctgcctggtcagaacttgtggtttctctgaagtcagaatatccgaagtacacacctttgctttctaagattttgcaatgtgtcctccagaaaggaactgatggtgataagattagccatgaaaaagaggttattgctgcagccgatgaggttgtgggcagtattgataaagaggaactggctaagtatttatctctaaattcagatcctgaagatgaagaagcacagaaattcaagaaaaaaatagaagaaacgcgagatcagttggctgatgcactatatcaaaagtgtcttgcattggctgagattgaatcactgaagtctgatgagtcaattgaggtatctgctaaagatatttttgaggagaattacaaagaattgattaaatgggttgatgtcaaatctgcaaaatatggcacttcgactgttttgcgtgaaaaacgctgtggaagacctggtacagcattgaagattctaaatgatttgattcaaaatgaatctgaaccaaagaaaaagctttatgatttgaagatccagttgattgaggagatgggatggaaccatgtctcaacctacgaaaaacagtggatgcaagtccgctttcccccatgtctgccaccattttgattgtgaactcatttttacaatggctctatcatcctgggttcagtagttgtcattttcattgctgggtgcgtcagttcattatttcgatggcaaacagccaactaggcaagctactggatttgtgcgtttggggacacagttattccatagttattttgtggtacaatatcaggggagtcctttctccaaggagataagacggaacagagatattttgatggacttgaaggagattttatcctcttcaatccttataatgtctatcaaaccaaataaggtttataatccttgtcaaaccaaacaatgcctaaatgagcgtagaatagccgagaatgatatgggcttgtctttaacaatttggcattaaacatagttagctgaacattaagcaaaataactgcgtaaaagcatcacttgttaaggcacttcgaggacgcgag

SEQ ID NO: 220927 - DNA, 1225 bp, Zea Mays
ttctggatcaccagttcaggatcaccatacgggttgatgataaagaaaagggggttttagttggtacaaagagcatacctgaacagttagatgaggaggttcgagacaccaagataaagtttctttccagcgttaagcaactaactgaggaggacaagtctgcctggtcagaacttgtggtttctctgaagtcagaatatccgaagtacacacctttgctttctaagattttgcaatgtgtcctccagaaaggaactgatggtgataagattagccatgaaaaagaggttattgctgcagccgatgaggttgtgggcagtattgataaagaggaactggctaagtatttatctctaaattcagatcctgaagatgaagaagcacagaaattcaagaaaaaaatagaagaaacgcgagatcagttggctgatgcactatatcaaaagtgtcttgcattggctgagattgaatcactgaagtctgatgagtcaattgaggtatctgctaaagatatttttgaggagaattacaaagaattgattaaatgggttgatgtcaaatctgcaaaatatggcacttcgactgttttgcgtgaaaaacgctgtggaagacctggtacagcattgaagattctaaatgatttgattcaaaatgaatctgaaccaaagaaaaagctttatgatttgaagatccagttgattgaggagatgggatggaaccatgtctcaacctacgaaaaacagtggatgcaagtccgctttcccccatgtctgccaccattttgattgtgaactcatttttacaatggctctatcatcctgggttcagtagttgtcattttcattgctgggtgcgtcagttcattatttcgatggcaaacagccaactaggcaagctactggatttgtgcgtttggggacacagttattccatagttattttgtggtacaatatcaggggagtcctttctccaaggagataagacggaacagagatattttgatggacttgaaggagattttatcctcttcaatccttataatgtctatcaaaccaaataaggtttataatccttgtcaaaccaaacaatgcctaaatgagcgtagaatagccgagaatgatatgggcttgtctttaacaatttggcattaaacatagttagctgaacattaagcaaaataactgcgtaaaagcatcacttgttaaggcacttcgaggacgcgag

SEQ ID NO: 220928 - DNA, 2924 bp, Zea Mays
cccagaagcagcagcagcagcaagtaaataccacacaggagacccaaaaaaaactctgaggacccgcatgcagatggacgtagagacggtgcaggcgggtcctgcgctcgcggctcatctgcagctgcaggcatcgccggtgaagaagtactacttcaagaagaagacgagcagtagtcatagcagaaatggtaaggatgatgtcaaccacgactccacgattcaacccaggtcgcccctgagcagacagagcctgaccttcgacgccatccccacataccacgctggagctttctacgagatcgaccacgataaattgccccctaaatccccaatccatctgaaatccatacgggtggttaaggtgagcgagtgcacgaacctggacatcacagtgaaattcccgtcccttcaggcgctgcgcagcttcttctcctcctacccggcacccggcaccggaccggaactagacgagcgcttcgtcatgagcagcaaccacgccgcgcgcatcttgcgccgccgagtgaccgaggaggagctcgagggcgaggtgcagcaggacagcttctggctcatcaagccccggctctatgacttcgccgcacctcagcaggtgccgtcacggacattgtgcctgccgccgccgcccgctccaccggcggctacgctggggctaacagctgactcctgtctactcaccacgttgaagtgcgatggcgccgggtggggtatgaggcgccgcgtcaggtacattggacggcatcgtgatgaagctcccaaggaggctagtgttgatggctacgacacagagtccagtgtcagggaggtgcagcagcctccagcgacgcaggaagttaaaaggagcgaaagaaactgtaaaagaaagcgggaggcggaagcgagcagcaaggacaacaacggagacgagggcaagaagaataacaaggttcagggcgccagcaagaagatttcaaaaaaggcgaagaagcggaccgtcgaatccaaggacggtgaccctcggcacggcaaggaccggtggtcagccgagcgctacgccgcagcagagaagagcctgctcaacatcatgcgctcccgagacgcacggttcggcgcaccggtgatgcggcaggtgctgcgggaggaagcccgcaagcacatcggcgacaccggcctccttgaccacctgctcaagcacatggctggccgggtgccggaaggcagcgttcaccggtttcgtcgccggcacaatgcggatggtgccatggagtactggcttgagccagccgagcttgctgaggtacggaaacaggccggtgtatctgatccatactgggtgccaccgccgggatggaaaccaggtgatgatgtgtccctcgtcgccggcgacattctagtcaagaggcaggttgaggagctcaccgaggaggtcaatggcgtaaaaaggcaaatggagcagttattgtgcaaggatgatggggacttcggtgcagagagagactacagttcattgaaagagaagtaccagcgtgctgtgagggctaatgaaaagcttgagaagcaggtgctctgtttgaaggacatgtgtgagaatgtggttcagatgaatggtgagctgaagaaggaggtgtcatccttcaaggaaaagtacgagcatatagctgacaagaatgataagttagaggagcaggttacctacctctccagctccttcctttctttcaaggatcagctggtagtggctctgaagctggaactggctccaagtgaagctgttccccgcacagcactgttcgttgcttccggtgagcagatgaccggcaccgtcatccaaggcggccaagacagggcggaaaggaagagcagcttccgcgtctgtaagccacagggcaagttcctgttgccgagcatggcgtctggcatgaccatcggcaggggcgccagcagcacctgcccggccgccgccacgccaggcccggggatccctcgcagcaccagtttccccagtatgccgggcctcccgcggtcgtcgcgaggcccagttgaggtggtggcggcggcgtccggcctggacgagcacgtgatgtttggcgcccacttctctacgccgcccctcggcgtcgtccaccaacgacgctgccaagctgcagctgtccctgcccagcccgaggtcgcccctgcagccgcagaagctgtttgacactgttactgctgctgcttctgggtttagtccccaaaagctgatgcatttctccggcctgactcgacgcgatgtggacacctcgtcgtcatcgtccggggcctgcggttccggcctgctagaggggaagagggtcctgttcgatgcagacgccggcgggatcagcgcggtgggaaccgagctggccctggctactccatcctactgctgacctactcctacctttccacttcaggatcatcgcctcttccccatctgcaagcaaagctttggatggttggcctcagggtgctccaattttctgtctttgtaacaaaggagcaacacgtagcgtaaatacagagagagagagaaaaaaagagagagagaaaaaagataagaaaaagggaatatgaactcacttgagcagtctttgtggcataatcgtacttccgtagccatctcaggttcgtcagtttctagttaattctcaggttgaagctaaagtcgttgcattggattggtctcttcagtaagtcagttgggtatggtcatctcccattctcccctgtccatggtgcatgacacatttggagttgagatgtgtcgattttgctggcaccatagggcatatagagtcatgttatagaatataccgggtcattcttgtatgcctgctgcactacatattaagtgtgaccaattttttcgggcatatatatattggtgatatttaatttccccttac

SEQ ID NO: 220929 - DNA, 2942 bp, Zea Mays
cccatccccgcataggtcgcgtctgcgccatcgccgcacgccatcacgtccgcagcccacatgctccaccctcgcccccctccccgccattctcggcgcaccgctcgccatccccataggccatcattgctagcgcgcccatgccccctgcccctgtcatcggcaccagaaaccgctcccctcgcacgccggccctagctggctagctcccaaatccgcccctccgcctcagatccctacggtgggatgcgagggaacgacaaccacgcggcctcccgtccttagagcctcaaatccgatgccccctccctaagccattccctcggccgcgacatcaacgaaaacgagcatggcccccctctacctcctccaccttgccgtttatggcctccgcactgccccaacgtcgacaccttcgtcctccccctctactcccagtgcaccgccgccgcgtatgcgctatcccacccgatggacgtgttgccgcctctgcagcacgccctgtcgctgtcgaccccacccagccatgcatttggagtttacaatgtggagacatgatttatccaccggacgacgaggttggtgcgcggatggcgagggaggacctccactgggcctactccacacctcttcctgtctaccgaggtcgagcacatggaggacctgctccgctgtcgggcactcctgagccagcgactacaaaatccactctggctctctacttcaccctccatattacaatatgtactttgtatatgtgagatgagacacccaagcagtcaaactaaacactattgtccaatcccctcttccaaattcattacaatcctattagcatgcaaagatttaatttgatgcaatgttttgatttgtactacgtttttactagctttgcagatgcttcagaaggttatggtcagtgacttttttcttttcagatttgttagaatagacacagaaatttagatttctctcctgtaatgttgttagcattggtcttaattttatttgttgttgttaggagaggatttgattatcatgatcagtacaagatatcaatcattaaatagcgaattcactctaatttctagccaccatttttctaagtaccatgttgctgctctctttccgctggatgaacatttgaacagtggcaccgaatagtgatcttatagtgctggcccgcaacacatggggtgcttctgttcttttacccattgaaatgttatggatcttttttctaatctaagattagaagtatggtcgtgatactattttgctataatctatgaatgtttttctgtaaaaaccaatctgtttttgctttagattaccaaactaaattgtctctatgcttttttgtgggtgattttgttggacccctacagccgtgatggcatgggaggctggcaagtcgattctttgtatatagttagtagtacaaaactatatgctatgagggtccagagaaattgatgatgaggagcagctagaggtcgtggtggagaagggctagagaaagggatgacgagggacagttgcaagttgtggtggagaagggcgacgaccccatgacaacatggggtgaatttctatatcagttgccaatcataagaaacaaatcttattattgcactccagggccagatgctattattgttggctatatcagacagtttgtcatcaagcctttgtctggattcctttttggcactcttatggagtactaagccacactgaagaatttgggcttaagagtgaggttttgaaggtgactcttgcaactgacgtcgtgaactgagtgtgaatatctactggatgggcaagcaagtttccaaccccatgccctcccatcgattctgctgcctgatccggctagagtttattaggactcgcaactacctcggagttcactgctgtaaatatgggtaacaccctaccagtgcatgatatgtcggaatccacagcagccataggatctcccaacaaggaggatcttgcaacaatgacattgatcaagaattggatgttggaaattatggtttggcattgttacttctcttactcctgtttcatgtcccaatctgaggtgactcgtgttggtaatcatggcatctcagattgggagtgggaggaggatgaggagatgatttggtgctaccagggacaggccccatctcctagaaatggatcttcctcctttgcatgggcaacttgtgcatcgggctactcttcaccaacagaaaaccatcactgagaaagagcagttagcaactggtgttgtcgtgttgcgactcaaaagggcttgcctatgggcatccacataggagccatccccaaatgctgactgaccaaatgttcggtatgggagccacaaatagcagcacgatgggaatgcagcagcagcagcagcaaggggtatacgggaacatgcaggcaggtgcacagaacgtgcaaagtatggtgggccttcagaaccagacccagaatcccaacttcactcagcagattcaacaaaaccaacaatgattcaacactaacggtcatggaggttgaaagatgagcaatatagccatcgttttgctatttgtctgttggtctttactcagcttatctgtgagactgatagtagccccaggttgatagccttcgtttttctgtaaatcaatgtagatgcatcgccattagcgagatgcaggtcaattatatacgttgtaactgtgttttggatatgtgaatagtgttacgtgtgttccttttatttataattaagcctcgcagcaaggccgacaatcgaattgcatacgactagacgagtgggtggttcatcaggatgaaaattggtcatcaggtggaccctagaattatttgaggaactcacagatgtactgtaatatgtattccctgttgtctttctggataaatagcccaagatgttggcc

SEQ ID NO: 220930 - DNA, 3104 bp, Zea Mays
cccatccccgcataggtcgcgtctgcgccatcgccgcacgccatcacgtccgcagcccacatgctccaccctcgcccccctccccgccattctcggcgcaccgctcgccatccccataggccatcattgctagcgcgcccatgccccctgcccctgtcatcggcaccagaaaccgctcccctcgcacgccggccctagctggctagctcccaaatccgcccctccgcctcagatccctacggtgggatgcgagggaacgacaaccacgcggcctcccgtccttagagcctcaaatccgatgccccctccctaagccattccctcggccgcgacatcaacgaaaacgagcatggcccccctctacctcctccaccttgccgtttatggcctccgcactgccccaacgtcgacaccttcgtcctccccctctactcccagtgcaccgccgccgcgtatgcgctatcccacccgatggacgtgttgccgcctctgcagcacgccctgtcgctgtcgaccccacccagccatgcatttggagtttacaatgtggagacatgatttatccaccggacgacgaggttggtgcgcggatggcgagggaggacctccactgggcctactccacacctcttcctgtctaccgaggtcgagcacatggaggacctgctccgctgtcgggcactcctgagccagcgactacaaaatccactctggctctctacttcaccctccatattacaatatgtactttgtatatgtgagatgagacacccaagcagtcaaactaaacactattgtccaatcccctcttccaaattcattacaatcctattagcatgcaaagatttaatttgatgcaatgttttgatttgtactacgtttttactagctttgcagatgcttcagaaggttatggtcagtgacttttttcttttcagatttgttagaatagacacagaaatttagatttctctcctgtaatgttgttagcattggtcttaattttatttgttgttgttaggagaggatttgattatcatgatcagtacaagatatcaatcattaaatagcgaattcactctaatttctagccaccatttttctaagtaccatgttgctgctctctttccgctggatgaacatttgaacagtggcaccgaatagtgatcttatagtgctggcccgcaacacatggggtgcttctgttcttttacccattgaaatgttatggatcttttttctaatctaagattagaagtatggtcgtgatactattttgctataatctatgaatgtttttctgtaaaaaccaatctgtttttgctttagattaccaaactaaattgtctctatgcttttttgtgggtgattttgttggacccctacagccgtgatggcatgggaggctggcaagtcgattctttgtatatagttagtagtacaaaactatatgctatgagggtccagagaaattgatgatgaggagcagctagaggtcgtggtggagaagggctagagaaagggatgacgagggacagttgcaagttgtggtggagaagggcgacgaccccatgacaacatggggtgaatttctatatcagttgccaatcataagaaacaaatcttattattgcactccagatgctattattgttggctatatcagacagtttgtcatcaagcctttgtctggattcctttttggcactcttatggagtactaagccacactgaagaatttgggcttaagagtgaggttttgaaggtgactcttgcaactgacgtcgtgaactgagtgtgaatatctactggatgggcaagcaagtttccaaccccatgccctcccatcgattctgctgcctgatccggctagagtttattaggactcgcaactacctcggagttcactgctgtaaatatgggtaacaccctaccagtgcatgatatgtcggaatccacaggtaaaatcgaatctatgttgcttcaaaagttactcccttttgtctgttcttggctagaacaaggtctggtcaaaataagaatgttttttgttccattttagttggagtttgggttttcaaatctgggccagattagttggatttaataatttggtttctaaggtgcagcagccataggatctcccaacaaggaggatcttgcaacaatgacattgatcaagaattggatgttggaaattatggtttggcattgttacttctcttactcctgtttcatgtcccaatctgaggtgactcgtgttggtaatcatggcatctcagattgggagtgggaggaggatgaggagatgatttggtgctaccagggacaggccccatctcctagaaatggatcttcctcctttgcatgggcaacttgtgcatcgggctactcttcaccaacagaaaaccatcactgagaaagagcagttagcaactggtgttgtcgtgttgcgactcaaaagggcttgcctatgggcatccacataggagccatccccaaatgctgactgaccaaatgttcggtatgggagccacaaatagcagcacgatgggaatgcagcagcagcagcagcaaggggtatacgggaacatgcaggcaggtgcacagaacgtgcaaagtatggtgggccttcagaaccagacccagaatcccaacttcactcagcagattcaacaaaaccaacaatgattcaacactaacggtcatggaggttgaaagatgagcaatatagccatcgttttgctatttgtctgttggtctttactcagcttatctgtgagactgatagtagccccaggttgatagccttcgtttttctgtaaatcaatgtagatgcatcgccattagcgagatgcaggtcaattatatacgttgtaactgtgttttggatatgtgaatagtgttacgtgtgttccttttatttataattaagcctcgcagcaaggccgacaatcgaattgcatacgactagacgagtgggtggttcatcaggatgaaaattggtcatcaggtggaccctagaattatttgaggaactcacagatgtactgtaatatgtattccctgttgtctttctggataaatagcccaagatgttggcc

SEQ ID NO: 220931 - DNA, 2949 bp, Zea Mays
catccccgcataggtcgcgtctgcgccatcgccgcacgccatcacgtccgcagcccacatgctccaccctcgcccccctccccgccattctcggcgcaccgctcgccatccccataggccatcattgctagcgcgcccatgccccctgcccctgtcatcggcaccagaaaccgctcccctcgcacgccggccctagctggctagctcccaaatccgcccctccgcctcagatccctacggtgggatgcgagggaacgacaaccacgcggcctcccgtccttagagcctcaaatccgatgccccctccctaagccattccctcggccgcgacatcaacgaaaacgagcatggcccccctctacctcctccaccttgccgtttatggcctccgcactgccccaacgtcgacaccttcgtcctccccctctactcccagtgcaccgccgccgcgtatgcgctatcccacccgatggacgtgttgccgcctctgcagcacgccctgtcgctgtcgaccccacccagccatgcatttggagtttacaatgtggagacatgatttatccaccggacgacgaggttggtgcgcggatggcgagggaggacctccactgggcctactccacacctcttcctgtctaccgaggtcgagcacatggaggacctgctccgctgtcgggcactcctgagccagcgactacaaaatccactctggctctctacttcaccctccatattacaatatgtactttgtatatgtgagatgagacacccaagcagtcaaactaaacactattgtccaatcccctcttccaaattcattacaatcctattagcatgcaaagatttaatttgatgcaatgttttgatttgtactacgtttttactagctttgcagatgcttcagaaggttatggtcagtgacttttttcttttcagatttgttagaatagacacagaaatttagatttctctcctgtaatgttgttagcattggtcttaattttatttgttgttgttaggagaggatttgattatcatgatcagtacaagatatcaatcattaaatagcgaattcactctaatttctagccaccatttttctaagtaccatgttgctgctctctttccgctggatgaacatttgaacagtggcaccgaatagtgatcttatagtgctggcccgcaacacatggggtgcttctgttcttttacccattgaaatgttatggatcttttttctaatctaagattagaagtatggtcgtgatactattttgctataatctatgaatgtttttctgtaaaaaccaatctgtttttgctttagattaccaaactaaattgtctctatgcttttttgtgggtgattttgttggacccctacagccgtgatggcatgggaggctggcaagtcgattctttgtatatagttagtagtacaaaactatatgctatgagggtccagagaaattgatgatgaggagcagctagaggtcgtggtggagaagggctagagaaagggatgacgagggacagttgcaagttgtggtggagaagggcgacgaccccatgacaacatggggtgaatttctatatcagttgccaatcataagaaacaaatcttattattgcactccagcaataaaagggccagatgctattattgttggctatatcagacagtttgtcatcaagcctttgtctggattcctttttggcactcttatggagtactaagccacactgaagaatttgggcttaagagtgaggttttgaaggtgactcttgcaactgacgtcgtgaactgagtgtgaatatctactggatgggcaagcaagtttccaaccccatgccctcccatcgattctgctgcctgatccggctagagtttattaggactcgcaactacctcggagttcactgctgtaaatatgggtaacaccctaccagtgcatgatatgtcggaatccacagcagccataggatctcccaacaaggaggatcttgcaacaatgacattgatcaagaattggatgttggaaattatggtttggcattgttacttctcttactcctgtttcatgtcccaatctgaggtgactcgtgttggtaatcatggcatctcagattgggagtgggaggaggatgaggagatgatttggtgctaccagggacaggccccatctcctagaaatggatcttcctcctttgcatgggcaacttgtgcatcgggctactcttcaccaacagaaaaccatcactgagaaagagcagttagcaactggtgttgtcgtgttgcgactcaaaagggcttgcctatgggcatccacataggagccatccccaaatgctgactgaccaaatgttcggtatgggagccacaaatagcagcacgatgggaatgcagcagcagcagcagcaaggggtatacgggaacatgcaggcaggtgcacagaacgtgcaaagtatggtgggccttcagaaccagacccagaatcccaacttcactcagcagattcaacaaaaccaacaatgattcaacactaacggtcatggaggttgaaagatgagcaatatagccatcgttttgctatttgtctgttggtctttactcagcttatctgtgagactgatagtagccccaggttgatagccttcgtttttctgtaaatcaatgtagatgcatcgccattagcgagatgcaggtcaattatatacgttgtaactgtgttttggatatgtgaatagtgttacgtgtgttccttttatttataattaagcctcgcagcaaggccgacaatcgaattgcatacgactagacgagtgggtggttcatcaggatgaaaattggtcatcaggtggaccctagaattatttgaggaactcacagatgtactgtaatatgtattccctgttgtctttctggataaatagcccaagatgttggcc

SEQ ID NO: 220932 - DNA, 2918 bp, Zea Mays
cataggtcgcgtctgcgccatcgccgcacgccatcacgtccgcagcccacatgctccaccctcgcccccctccccgccattctcggcgcaccgctcgccatccccataggccatcattgctagcgcgcccatgccccctgcccctgtcatcggcaccagaaaccgctcccctcgcacgccggccctagctggctagctcccaaatccgcccctccgcctcagatccctacggtgggatgcgagggaacgacaaccacgcggcctcccgtccttagagcctcaaatccgatgccccctccctaagccattccctcggccgcgacatcaacgaaaacgagcatggcccccctctacctcctccaccttgccgtttatggcctccgcactgccccaacgtcgacaccttcgtcctccccctctactcccagtgcaccgccgccgcgtatgcgctatcccacccgatggacgtgttgccgcctctgcagcacgccctgtcgctgtcgaccccacccagccatgcatttggagtttacaatgtggagacatgatttatccaccggacgacgaggttggtgcgcggatggcgagggaggacctccactgggcctactccacacctcttcctgtctaccgaggtcgagcacatggaggacctgctccgctgtcgggcactcctgagccagcgactacaaaatccactctggctctctacttcaccctccatattacaatatgtactttgtatatgtgagatgagacacccaagcagtcaaactaaacactattgtccaatcccctcttccaaattcattacaatcctattagcatgcaaagatttaatttgatgcaatgttttgatttgtactacgtttttactagctttgcagatgcttcagaaggttatggtcagtgacttttttcttttcagatttgttagaatagacacagaaatttagatttctctcctgtaatgttgttagcattggtcttaattttatttgttgttgttaggagaggatttgattatcatgatcagtacaagatatcaatcattaaatagcgaattcactctaatttctagccaccatttttctaagtaccatgttgctgctctctttccgctggatgaacatttgaacagtggcaccgaatagtgatcttatagtgctggcccgcaacacatggggtgcttctgttcttttacccattgaaatgttatggatcttttttctaatctaagattagaagtatggtcgtgatactattttgctataatctatgaatgtttttctgtaaaaaccaatctgtttttgctttagattaccaaactaaattgtctctatgcttttttgtgggtgattttgttggacccctacagccgtgatggcatgggaggctggcaagtcgattctttgtatatagttagtagtacaaaactatatgctatgagggtccagagaaattgatgatgaggagcagctagaggtcgtggtggagaagggctagagaaagggatgacgagggacagttgcaagttgtggtggagaagggcgacgaccccatgacaacatggggtgaatttctatatcagttgccaatcataagaaacaaatcttattattgcactccagatgctattattgttggctatatcagacagtttgtcatcaagcctttgtctggattcctttttggcactcttatggagtactaagccacactgaagaatttgggcttaagagtgaggttttgaaggtgactcttgcaactgacgtcgtgaactgagtgtgaatatctactggatgggcaagcaagtttccaaccccatgccctcccatcgattctgctgcctgatccggctagagtttattaggactcgcaactacctcggagttcactgctgtaaatatgggtaacaccctaccagtgcatgatatgtcggaatccacagcagccataggatctcccaacaaggaggatcttgcaacaatgacattgatcaagaattggatgttggaaattatggtttggcattgttacttctcttactcctgtttcatgtcccaatctgaggtgactcgtgttgggcatctcagattgggagtgggaggaggatgaggagatgatttggtgctaccagggacaggccccatctcctagaaatggatcttcctcctttgcatgggcaacttgtgcatcgggctactcttcaccaacagaaaaccatcactgagaaagagcagttagcaactggtgttgtcgtgttgcgactcaaaagggcttgcctatgggcatccacataggagccatccccaaatgctgactgaccaaatgttcggtatgggagccacaaatagcagcacgatgggaatgcagcagcagcagcagcaaggggtatacgggaacatgcaggcaggtgcacagaacgtgcaaagtatggtgggccttcagaaccagacccagaatcccaacttcactcagcagattcaacaaaaccaacaatgattcaacactaacggtcatggaggttgaaagatgagcaatatagccatcgttttgctatttgtctgttggtctttactcagcttatctgtgagactgatagtagccccaggttgatagccttcgtttttctgtaaatcaatgtagatgcatcgccattagcgagatgcaggtcaattatatacgttgtaactgtgttttggatatgtgaatagtgttacgtgtgttccttttatttataattaagcctcgcagcaaggccgacaatcgaattgcatacgactagacgagtgggtggttcatcaggatgaaaattggtcatcaggtggaccctagaattatttgaggaactcacagatgtactgtaatatgtattccctgttgtctttctggataaatagcccaagatgttggcc

SEQ ID NO: 220933 - DNA, 2829 bp, Zea Mays
gtcgcgtctgcgccatcgccgcacgccatcacgtccgcagcccacatgctccaccctcgcccccctccccgccattctcggcgcaccgctcgccatccccataggccatcattgctagcgcgcccatgccccctgcccctgtcatcggcaccagaaaccgctcccctcgcacgccggccctagctggctagctcccaaatccgcccctccgcctcagatccctacggtgggatgcgagggaacgacaaccacgcggcctcccgtccttagagcctcaaatccgatgccccctccctaagccattccctcggccgcgacatcaacgaaaacgagcatggcccccctctacctcctccaccttgccgtttatggcctccgcactgccccaacgtcgacaccttcgtcctccccctctactcccagtgcaccgccgccgcgtatgcgctatcccacccgatggacgtgttgccgcctctgcagcacgccctgtcgctgtcgaccccacccagccatgcatttggagtttacaatgtggagacatgatttatccaccggacgacgaggttggtgcgcggatggcgagggaggacctccactgggcctactccacacctcttcctgtctaccgaggtcgagcacatggaggacctgctccgctgtcgggcactcctgagccagcgactacaaaatccactctggctctctacttcaccctccatattacaatatgtactttgtatatgtgagatgagacacccaagcagtcaaactaaacactattgtccaatcccctcttccaaattcattacaatcctattagcatgcaaagatttaatttgatgcaatgttttgatttgtactacgtttttactagctttgcagatgcttcagaaggttatggtcagtgacttttttcttttcagatttgttagaatagacacagaaatttagatttctctcctgtaatgttgttagcattggtcttaattttatttgttgttgttaggagaggatttgattatcatgatcagtacaagatatcaatcattaaatagcgaattcactctaatttctagccaccatttttctaagtaccatgttgctgctctctttccgctggatgaacatttgaacagtggcaccgaatagtgatcttatagtgctggcccgcaacacatggggtgcttctgttcttttacccattgaaatgttatggatcttttttctaatctaagattagaagtatggtcgtgatactattttgctataatctatgaatgtttttctgtaaaaaccaatctgtttttgctttagattaccaaactaaattgtctctatgcttttttgtgggtgattttgttggacccctacagccgtgatggcatgggaggctggcaagtcgattctttgtatatagttagtagtacaaaactatatgctatgagggtccagagaaattgatgatgaggagcagctagaggtcgtggtggagaagggctagagaaagggatgacgagggacagttgcaagttgtggtggagaagggcgacgaccccatgacaacatggggtgaatttctatatcagttgccaatcataagaaacaaatcttattattgcactccagcaataaaagggccagatgctattattgttggctatatcagacagtttgtcatcaagcctttgtctggattcctttttggcactcttatggagtactaagccacactgaagaatttgggcttaagagtgaggttttgaaggtgactcttgcaactgacgtcgtgaactgagtgtgaatatctactggatgggcaagcaagtttccaaccccatgccctcccatcgattctgctgcctgatccggctagagtttattaggactcgcaactacctcggagttcactgctgtaaatatgggtaacaccctaccagtgcatgatatgtcggaatccacaggtgcagcagccataggatctcccaacaaggaggatcttgcaacaatgacattgatcaagaattggatgttggaaattatggtttggcattgttacttctcttactcctgtttcatgtcccaatctgaggtgactcgtgttggtaatcatggcatctcagattgggagtgggaggaggatgaggagatgatttggtgctaccagggacaggccccatctcctagaaatggatcttcctcctttgcatgggcaacttgtgcatcgggctactcttcaccaacagtgttcggtatgggagccacaaatagcagcacgatgggaatgcagcagcagcagcagcaaggggtatacgggaacatgcaggcaggtgcacagaacgtgcaaagtatggtgggccttcagaaccagacccagaatcccaacttcactcagcagattcaacaaaaccaacaatgattcaacactaacggtcatggaggttgaaagatgagcaatatagccatcgttttgctatttgtctgttggtctttactcagcttatctgtgagactgatagtagccccaggttgatagccttcgtttttctgtaaatcaatgtagatgcatcgccattagcgagatgcaggtcaattatatacgttgtaactgtgttttggatatgtgaatagtgttacgtgtgttccttttatttataattaagcctcgcagcaaggccgacaatcgaattgcatacgactagacgagtgggtggttcatcaggatgaaaattggtcatcaggtggaccctagaattatttgaggaactcacagatgtactgtaatatgtattccctgttgtctttctggataaatagcccaagatgttggcc

SEQ ID NO: 220934 - DNA, 2648 bp, Zea Mays
cccctgtcatcggcaccagaaaccgctcccctcgcacgccggccctagctggctagctcccaaatccgcccctccgcctcagatccctacggtgggatgcgagggaacgacaaccacgcggcctcccgtccttagagcctcaaatccgatgccccctccctaagccattccctcggccgcgacatcaacgaaaacgagcatggcccccctctacctcctccaccttgccgtttatggcctccgcactgccccaacgtcgacaccttcgtcctccccctctactcccagtgcaccgccgccgcgtatgcgctatcccacccgatggacgtgttgccgcctctgcagcacgccctgtcgctgtcgaccccacccagccatgcatttggagtttacaatgtggagacatgatttatccaccggacgacgaggttggtgcgcggatggcgagggaggacctccactgggcctactccacacctcttcctgtctaccgaggtcgagcacatggaggacctgctccgctgtcgggcactcctgagccagcgactacaaaatccactctggctctctacttcaccctccatattacaatatgtactttgtatatgtgagatgagacacccaagcagtcaaactaaacactattgtccaatcccctcttccaaattcattacaatcctattagcatgcaaagatttaatttgatgcaatgttttgatttgtactacgtttttactagctttgcagatgcttcagaaggttatggtcagtgacttttttcttttcagatttgttagaatagacacagaaatttagatttctctcctgtaatgttgttagcattggtcttaattttatttgttgttgttaggagaggatttgattatcatgatcagtacaagatatcaatcattaaatagcgaattcactctaatttctagccaccatttttctaagtaccatgttgctgctctctttccgctggatgaacatttgaacagtggcaccgaatagtgatcttatagtgctggcccgcaacacatggggtgcttctgttcttttacccattgaaatgttatggatcttttttctaatctaagattagaagtatggtcgtgatactattttgctataatctatgaatgtttttctgtaaaaaccaatctgtttttgctttagattaccaaactaaattgtctctatgcttttttgtgggtgattttgttggacccctacagccgtgatggcatgggaggctggcaagtcgattctttgtatatagttagtagtacaaaactatatgctatgagggtccagagaaattgatgatgaggagcagctagaggtcgtggtggagaagggctagagaaagggatgacgagggacagttgcaagttgtggtggagaagggcgacgaccccatgacaacatggggtgaatttctatatcagttgccaatcataagaaacaaatcttattattgcactccagacagtttgtcatcaagcctttgtctggattcctttttggcactcttatggagtactaagccacactgaagaatttgggcttaagagtgaggttttgaaggtgactcttgcaactgacgtcgtgaactgagtgtgaatatctactggatgggcaagcaagtttccaaccccatgccctcccatcgattctgctgcctgatccggctagagtttattaggactcgcaactacctcggagttcactgctgtaaatatgggtaacaccctaccagtgcatgatatgtcggaatccacagcagccataggatctcccaacaaggaggatcttgcaacaatgacattgatcaagaattggatgttggaaattatggtttggcattgttacttctcttactcctgtttcatgtcccaatctgaggtgactcgtgttggtaatcatggcatctcagattgggagtgggaggaggatgaggagatgatttggtgctaccagggacaggccccatctcctagaaatggatcttcctcctttgcatgggcaacttgtgcatcgggctactcttcaccaacagtgttcggtatgggagccacaaatagcagcacgatgggaatgcagcagcagcagcagcaaggggtatacgggaacatgcaggcaggtgcacagaacgtgcaaagtatggtgggccttcagaaccagacccagaatcccaacttcactcagcagattcaacaaaaccaacaatgattcaacactaacggtcatggaggttgaaagatgagcaatatagccatcgttttgctatttgtctgttggtctttactcagcttatctgtgagactgatagtagccccaggttgatagccttcgtttttctgtaaatcaatgtagatgcatcgccattagcgagatgcaggtcaattatatacgttgtaactgtgttttggatatgtgaatagtgttacgtgtgttccttttatttataattaagcctcgcagcaaggccgacaatcgaattgcatacgactagacgagtgggtggttcatcaggatgaaaattggtcatcaggtggaccctagaattatttgaggaactcacagatgtactgtaatatgtattccctgttgtctttctggataaatagcccaagatgttggcc

SEQ ID NO: 220935 - DNA, 633 bp, Zea Mays
gttgaacggaggctgtccttggagatccgggttcacagggagcgctgtgttcggtatgggagccacaaatagcagcacgatgggaatgcagcagcagcagcagcaaggggtatacgggaacatgcaggcaggtgcacagaacgtgcaaagtatggtgggccttcagaaccagacccagaatcccaacttcactcagcagattcaacaaaaccaacaatgattcaacactaacggtcatggaggttgaaagatgagcaatatagccatcgttttgctatttgtctgttggtctttactcagcttatctgtgagactgatagtagccccaggttgatagccttcgtttttctgtaaatcaatgtagatgcatcgccattagcgagatgcaggtcaattatatacgttgtaactgtgttttggatatgtgaatagtgttacgtgtgttccttttatttataattaagcctcgcagcaaggccgacaatcgaattgcatacgactagacgagtgggtggttcatcaggatgaaaattggtcatcaggtggaccctagaattatttgaggaactcacagatgtactgtaatatgtattccctgttgtctttctggataaatagcccaagatgttggcc

SEQ ID NO: 220936 - DNA, 2222 bp, Zea Mays
ttcagttcaaaaccattctccactgttgctcctgtcctgttcctccgcttcctctgtctctgtctcgtcgtctcccccatctggccatctccggctagggtttgccctcccaccacgtccgaggtctagctcgtctccgccactgccggaccaaggatgtcgcaagagcaaggtatggaggagccgccgccgcaggcggtaggcgaggcacaatcggccgccgatgtccccatgagcgaggccgcagcggtggaggatgaggatgaggaacccgtcatgggggaggggcagggcggtgaaagcgggaccgccgatgccgttgattccgtcaaggcttcagtgaagcccgaagcagagggcgcggaggaaggggacagagaggagcttaatggtggcccgacggcggatttgactgacgaggttgtgaaattggagaacggggatggccccgtgccggtgggtggctccgcggatgagtgcggagctggagatggcggtgttgataagggcctggttggtcagaatgagcctgttgtgaaccagcttgtgctggtgcaggctgaggaggagctggcattgtctaagatctcaaacagttccttcatgttcgattacaccactgggggtgatgactcagggactgaggaggagcaggctgccttcatgaaggagctggagcgtttccacagggagaaaatgttggagttcaagccccctaagttttatggtgaaggattgaattgcctcaaattgtggagacaagttactggattgggtggctatgatcaggtgacatcatgcaagctgtggcgtcaagtgggagagtcattcaaacctccaaagacatgtacaactgtttcatggactttccgtaacttctatgagaaggcactccttgaatatgagaaacacaaaatcgaaacaggagagttccaagtagcttcatctgctctaccagatcgagttggttctgagagccaggtgggtggaagccacgtatctggttctggaagagccagaagagaatctgcaactcgtgcaatgcaaggctggcattctcaccgcctactaggcaatggtgaaaatgctgatcctataattaaggataaagggcctattgtcttaaagaaggataaaactcctaaaagcagtggttctgccaagaggaaaaggataccatcccttgaagatgacatggtgataccttataaatccgataagctacaaaatgactcaatggttattgacatgggccctcctgctgattgggtgaaaataaatgttaggaaaaccttctcagttccgttaattcctgaagcaaaatttggagtgttgaatgccagtgaatgtgtgaactgctgattctttatgaaataaagattgctatgaagtctatgcattggttcctggccttctgcgtgaagaggtacatgttcagtctgaccctgctggtcgtttgatagttactggagagcccgagcaattggataacccatggggtgtcactccattcaagaaggtcattaggttgccttcccgcattgatcctcaccaaacctctgcagttgtcaccctccatgggcagctatttgtgcgtgcaccatttgaacaatcaaaataatgttgatgccacaatgaagcacaatactacaagtttgccttatgagtgggattataccgttatgacatgagcttagaagtgctcaccctgaccgtcctccaaaactagttccttgctgattttaatgcttcaagcctcctccatgctagatctctcatgtatcaagttaaactcattagttgacatagttctgtgtgtattcggttgtgcccgttggctgtgaattgtagctaaagcaaagttactaagcctagagtttaggatgttgatagtctgatgctcaacatgtccatggtttcttttcaatttagtcggcatagaatgtactgtttgtagcaatgtagtatgtagcttgttcccagtatttaagctccggaacatggagagcggtagagattcattgtatgtaactgttgctggtgcattgcaattgctattcaacttgtattgtcaaacaatctgaaactctatggcctccttgtaccctgccttcgtattgtgtgactttgtgtttccgtactagctgaaagaggaagataaatgactgccaaggacaccgtgtttagttgaagcctttttccatctcaaaaagagagaaaat

SEQ ID NO: 220937 - DNA, 1399 bp, Zea Mays
gttcaaaaccattctccactgttgctcctgtcctgttcctccgcttcctctgtctctgtctcgtcgtctcccccatctggccatctccggctagggtttgccctcccaccacgtccgaggtctagctcgtctccgccactgccggaccaaggatgtcgcaagagcaaggtatggaggagccgccgccgcaggcggtaggcgaggcacaatcggccgccgatgtccccatgagcgaggccgcagcggtggaggatgaggatgaggaacccgtcatgggggaggggcagggcggtgaaagcgggaccgccgatgccgttgattccgtcaaggcttcagtgaagcccgaagcagagggcgcggaggaaggggacagagaggagcttaatggtggcccgacggcggatttgactgacgaggttgtgaaattggagaacggggatggccccgtgccggtgggtggctccgcggatgagtgcggagctggagatggcggtgttgataagggcctggttggtcagaatgagcctgttgtgaaccagcttgtgctggtgcaggctgaggaggagctggcattgtctaagatctcaaacagttccttcatgttcgattacaccactgggggtgatgactcagggactgaggaggagcaggctgccttcatgaaggagctggagcgtttccacagggagaaaatgttggagttcaagccccctaagttttatggtgaaggattgaattgcctcaaattgtggagacaagttactggattgggtggctatgatcaggtgacatcatgcaagctgtggcgtcaagtgggagagtcattcaaacctccaaagacatgtacaactgtttcatggactttccgtaacttctatgagaaggcactccttgaatatgagaaacacaaaatcgaaacaggagagttccaagtagcttcatctgctctaccagatcgagttggttctgagagccaggtgggtggaagccacgtatctggttctggaagagccagaagagaatctgcaactcgtgcaatgcaaggctggcattctcaccgcctactaggcaatggtgaaaatgctgatcctataattaaggataaagggcctattgtcttaaagaaggataaaactcctaaaagcagtggttctgccaagaggaaaaggataccatcccttgaagatgacatggtgataccttataaatccgataagctacaaaatgactcaatggttattgacatgggccctcctgctgattgggtgaaaataaatgttaggaaaaccgtcctgtggttattatggaattttcataaagaatataggctaacggctaaccaggaattagtgaaactacaatgacttgagggcattttgtgaaagaggttatgttttag

SEQ ID NO: 220938 - DNA, 2529 bp, Zea Mays
gatttgtagtggggcatgtaagcttgtgggagaggaaagcagcaggagacgaaggtagtagacaaggaaaagtatgccaaagaaaatgagagaacaaccttcttagcttctcctccagtctctctccaccaccgctctatctcctcggtaggaagaagagcaagcaagagaggagcaagctagctagcggtacaagggagagtgagcggcgaaggggacggacgaattgaagaacacctgccagtccgatcgagctggtggtgccgccaggataaatcgggagcagcagcagcagctggcagcggcactgcccagcgtggcgtccggccaaggcgcgccgacggcggcggcgcagccaccgcccaagaagaagaggactatgcccgacccagacgctgaggtgatcgccctgtcgcccaagacgctgatggcgaccaacaggttcgtgtgcgaggtgtgcagcaaggggttccagcgagagcagaacctgcagctgcaccggcgcgggcacaacctgccgtggaagctgaagcagaaggacccgctgcaggcgcagcggcggcgcgtgtacctgtgcccggagccgacgtgcgcgcaccacgacccggcgcgcgccctgggcgacctgacggggatcaagaagcacttcagccgcaagcacggcgagaagaagtggaagtgcgacaagtgctccaagcgctacgccgtgcagtcggactggaaggcgcactccaagatctgcggcacccgcgagtaccgctgcgactgcggcacgctcttctcccggagggacagcttcatcacgcaccgggcgttctgcgacgcgctcgcgcaggagagcgcgcggctgccgccgaccagcagcctcagcaacctcaccagccacctctacggcgccgccaccaacgcgggcaacatggcgctcagtctctcgcaggtgggctcccacctcacctccactctccaggacggccaccaccaccgcccgtccccggagctcctgcgactcggcgctacggccggcggcggcggtggcagcagcatcgccgcgcgcctcgaccacctcctgtcgcccaacggtgcctccgccttccgcccagcgcagcctccgtccttcttccacaacgcgggggcatcggtcggccaggactttggggatgacgcgggcaatgggccgcactcgttccttcagctgcaggccaacaagcctttccatggactactcatgcagctgcccgacctccaaggcaacggtgctgggggccccggcgcctcaggcggacccagctctctcttcagcctgggtttctttgctaacaatggcaacagcagctcggggtccagtcacgagcatgcaagtcaggggctcatgaacagtgaccagttcagcggcggcggttcggaggcacaggcggcggcagggatttttggcgggaacttcgttagtgctggtggagatcaagttccaccgccggggctctacagagaccaagcctccatgctgccgcagatgtcggcgaccgctctgctccagaaggcggcgcagatgggcgcgaccacgagcgccaacggcgccagcgcggcgtccatgttccgaggcttcgcgggctcttccccacaacacgtgcggccagcgacgccgcacatggaacagagcgacgcgaacctgaacgacctgatgaactcgctcgctggaggcggtggcctcggtgccggcggaggaatgttcggcggcggcagcaacggcgccggccacgcgggcatgtttgatccgaggcagctgtgcgacatggcggagcgcgaggggaagttcggcttcggccagggtggtggcggagacatcacgcgggacttccttggcgtcggcggaggcggcctcgtgcgcgggatatcgacgccgagaggagaccaccagagcagcagcgatatgagctccatggaggctgagttgaagtcggcctcgtccttcaatggaggcaggatgccatgacagagaccgacccatcgatcaagattatacagacataagctcgcgcacagtaatccagagacttgatcaaccagatgcaatgggagagcagtaaggtcgtcgtcatgaagttagaaactgagtcgcatgagtgagttcatgcatgggataaagctagctagctagctttcatcatccgaagggaccttgggtgagaaagatgcgtcttctctgactaatggagcagtaagctggagtgcgagttggacgcatgtgatcacccatttgctcgtgcatggcgggggttggtgttcattctgctggtctcgttcttgttggttttcccttcctttgtagttggataatctttgttggatcaagtatagtttttctagtgatagtatctataaggatgttatttgtagctagcttataaaggggcgtgatttgcagcttaatttgctccattcccctcctcctattttttatttccttttctcttgtatcaaaacaatacccccccttacaatgtcattaatcatgctagctgaaattcatca

SEQ ID NO: 220939 - DNA, 3526 bp, Zea Mays
cggaaacggaaatagcagagggtttttggtttcattcctaatcacaaccctggttagtactagtacagtagtaataatcgattaaccagaaaaaacctgaaagtgtaacttgatctggaattcctggatccgtgcgcacactctaggcgttgtgcgtgtttggtcccgtcaatcagtcagtctttacgacgcattcgcattcgcgctcacctccagaaccgagatccaccaccgcgcaccttcacgactcggccggcgctccgtcactcatgatggccggccgcccgcgcccgcagacggagctgcactcgccgtccgcctccacgcggcggcgtgagcggtggctggttgtactcggcgtcgcactccacgccgtgtacatgctcagcatcttcgacatatacttcaagtcccccatcgtgcacggcatggatcccgtgccgcctcgcctctcggcgccccccgccaagcgcctcgtcctcctcgtcgcggacgggctcagggcggacaagttcttcgagcccgacgaacgggggaggtacagagcgccgttcctgcgcggtgtgatcgaggagaagggccggtggggagtcagccacgcgcgcccgcccaccgagtccaggcccggccatgtctccctcatcgctggcttctacgaggaccctagtgctgtcaccaaaggatggaaggccaatccagttgagtttgattctgtattcaatcagagtcggcacactatctcatttggaagtccagatattgttcctatattctgcagtaacctacctcacagtacctgggacacttatccccatgaatatgaagactttgcaacagatgcatcatttctggatcattggtcatttgaccagtttcaagatcttgtcaacaggtcttttgacgatattaaattgaggcagttactcctacaagataagttggttatatttttgcatttactgggttgtgataccaatggccatgcacaccgaccctattcaagcatatacctgaacaatgtcaaggttgttgaccaaatagctgaaagtgtgtacaatcttatggagaactacttcaatgacaatcaaacagcatacgtgtttactgcagatcatggaatgagtgacaaaggaagccatggagacggacacccttcaaacacagatactcctcttgtggcatggggtgctggaattagaagcccaaagttcctggcttatacagagaaacctgatgacggctttcggtttgtagataaccacaaacatgatacacccactccaaaagactgggcccttgaaggatttgaaagagtagatgtcaaccaggctgacatagctcccctaatggctacacttgtgggtttgccatgcccgatgaattctgtggggagcttacctactccttatttgaaactaaggaaggctgatgaagttgaagccgttctggccaatacaaagcaaattcttaaccagtttctccgaaagtcacagctgaaggaatccagttcactctacttcaaaccttttaagccactggcgaacttttctttagtgctcagtcagattgaggatcttatatctggaagggactatgaaactgccatggagcaatctgaggagctccgaaggctggctcttgctgggcttcattatttccaaacatatgattggttcatgttaatgactacaattacccttggatatattggatggatggtgaacctcattatacatgtgctacagtcttatacatcatatcctgtaattcttctcaagagggctcaattgtatcctaacaatacctccatgaaagtttacatttgtggatgcttctttatgggtttgtcatccattttgctacttctagagaaatcaccacttctttaccatgcttatgtattgtgcacaatattcctttggacaagaattgtacaaaaaattgattttttgaagtccgtatggagagaactagctaatatgcccttcaagtatatttttaatctcctgaccagttcagttgttgcactgcttgtattggagtttctggttatgagcttctttgataggaaaatttatacgtggtgcttcttggtccttgggatactcggttcaacatatgtagcattgtttattcaagctagtgctgcacttgcgatatacatatggcttgcttgctggttcctgtctgtatttactttgatgccagctgaaattccagaaaacaacaacttggtaatttttagtggagggctcataatacttattggattagcttcaagatggattaaatcaaatagttccagcttttggctatatctcactcgagcaaataaacgggatcctcaatcttttaaactctattttgttcaggttattttagtcgcaatatcttcgataatggtgtggctatctacctcacaccggtcccagaacagagaattgctctcactacaccagtttatcaattggtctgtagctggtgttgctatggtgctacctcttttctcaccacctagtgttctatcccgtcttacatctatattcttgggttttgctcctccatttctgctgctttccattggctatgaagcagttttctatagcgcttttgcaatggtactcattggatggatatttgtggaatctgccaacctgtattgctcagaagaaagtggttctgcacgtcgcagaagccttgcggataactcagtttttggctatgaagaaagacacctgcgactatctgatttaagaatccctttgttatttgtgatattatttaatgtcgccttctttggtactggtaattttgcaagtattgcaagctttgagatctcgtctgtgtacagattcattacagtttttagtccatttcttatggcaggacttcttatctttaagttgtttattccgtttatgcttgtcatatgtacgtttagtgcgatcaccaaggtcgtccgtatcccacggctgggctgttattttcttgtaatactgctttcagatgtaatgactattcatttctttttcctggtacggaataccggtagttggatggaaatcggcaacagcattagccatttcggaatagtgagcgcccaagtggtcttcgttttgctgctctttgccctcacgaatatatacactagagatattttggtctcgtctcggcaactaaccgcacggaaagttatgtaaatcgttcagtttatttagaaatccaaatacatccatccttttatttattcatttttgggtcgactttcattttgggatcaagtttgtagcttagcttttggctaaagttttgtagcttagcttttttgttttctgtgaatggaccttggtgtcaaatttttgtgctaatttcattcgcttacttacagcctgaacagattttacgtacaccattataactatattagctttcctctcgggctatgataaactgaagttgtcttgatctagttcttctcagagttgaagttgatgaagcaatcactggaggcggagcttaaaattac

SEQ ID NO: 220940 - DNA, 3505 bp, Zea Mays
cctggttagtactagtacagtagtaataatcgattaaccagaaaaaacctgaaagtgtaacttgatctggaattcctggatccgtgcgcacactctaggcgttgtgcgtgtttggtcccgtcaatcagtcagtctttacgacgcattcgcattcgcgctcacctccagaaccgagatccaccaccgcgcaccttcacgactcggccggcgctccgtcactcatgatggccggccgcccgcgcccgcagacggagctgcactcgccgtccgcctccacgcggcggcgtgagcggtggctggttgtactcggcgtcgcactccacgccgtgtacatgctcagcatcttcgacatatacttcaagtcccccatcgtgcacggcatggatcccgtgccgcctcgcctctcggcgccccccgccaagcgcctcgtcctcctcgtcgcggacgggctcagggcggacaagttcttcgagcccgacgaacgggggaggtacagagcgccgttcctgcgcggtgtgatcgaggagaagggccggtggggagtcagccacgcgcgcccgcccaccgagtccaggcccggccatgtctccctcatcgctggcttctacgaggaccctagtgctgtcaccaaaggtgcgctgccccggtgctagctctagtgatggaaggccaatccagttgagtttgattctgtattcaatcagagtcggcacactatctcatttggaagtccagatattgttcctatattctgcagtaacctacctcacagtacctgggacacttatccccatgaatatgaagactttgcaacagatgcatcatttctggatcattggtcatttgaccagtttcaagatcttgtcaacaggtcttttgacgatattaaattgaggcagttactcctacaagataagttggttatatttttgcatttactgggttgtgataccaatggccatgcacaccgaccctattcaagcatatacctgaacaatgtcaaggttgttgaccaaatagctgaaagtgtgtacaatcttatggagaactacttcaatgacaatcaaacagcatacgtgtttactgcagatcatggaatgagtgacaaaggaagccatggagacggacacccttcaaacacagatactcctcttgtggcatggggtgctggaattagaagcccaaagttcctggcttatacagagaaacctgatgacggctttcggtttgtagataaccacaaacatgatacacccactccaaaagactgggcccttgaaggatttgaaagagtagatgtcaaccaggctgacatagctcccctaatggctacacttgtgggtttgccatgcccgatgaattctgtggggagcttacctactccttatttgaaactaaggaaggctgatgaagttgaagccgttctggccaatacaaagcaaattcttaaccagtttctccgaaagtcacagctgaaggaatccagttcactctacttcaaaccttttaagccactggcgaacttttctttagtgctcagtcagattgaggatcttatatctggaagggactatgaaactgccatggagcaatctgaggagctccgaaggctggctcttgctgggcttcattatttccaaacatatgattggttcatgttaatgactacaattacccttggatatattggatggatggtgaacctcattatacatgtgctacagtcttatacatcatatcctgtaattcttctcaagagggctcaattgtatcctaacaatacctccatgaaagtttacatttgtggatgcttctttatgggtttgtcatccattttgctacttctagagaaatcaccacttctttaccatgcttatgtattgtgcacaatattcctttggacaagaattgtacaaaaaattgattttttgaagtccgtatggagagaactagctaatatgcccttcaagtatatttttaatctcctgaccagttcagttgttgcactgcttgtattggagtttctggttatgagcttctttgataggaaaatttatacgtggtgcttcttggtccttgggatactcggttcaacatatgtagcattgtttattcaagctagtgctgcacttgcgatatacatatggcttgcttgctggttcctgtctgtatttactttgatgccagctgaaattccagaaaacaacaacttggtaatttttagtggagggctcataatacttattggattagcttcaagatggattaaatcaaatagttccagcttttggctatatctcactcgagcaaataaacgggatcctcaatcttttaaactctattttgttcaggttattttagtcgcaatatcttcgataatggtgtggctatctacctcacaccggtcccagaacagagaattgctctcactacaccagtttatcaattggtctgtagctggtgttgctatggtgctacctcttttctcaccacctagtgttctatcccgtcttacatctatattcttgggttttgctcctccatttctgctgctttccattggctatgaagcagttttctatagcgcttttgcaatggtactcattggatggatatttgtggaatctgccaacctgtattgctcagaagaaagtggttctgcacgtcgcagaagccttgcggataactcagtttttggctatgaagaaagacacctgcgactatctgatttaagaatccctttgttatttgtgatattatttaatgtcgccttctttggtactggtaattttgcaagtattgcaagctttgagatctcgtctgtgtacagattcattacagtttttagtccatttcttatggcaggacttcttatctttaagttgtttattccgtttatgcttgtcatatgtacgtttagtgcgatcaccaaggtcgtccgtatcccacggctgggctgttattttcttgtaatactgctttcagatgtaatgactattcatttctttttcctggtacggaataccggtagttggatggaaatcggcaacagcattagccatttcggaatagtgagcgcccaagtggtcttcgttttgctgctctttgccctcacgaatatatacactagagatattttggtctcgtctcggcaactaaccgcacggaaagttatgtaaatcgttcagtttatttagaaatccaaatacatccatccttttatttattcatttttgggtcgactttcattttgggatcaagtttgtagcttagcttttggctaaagttttgtagcttagcttttttgttttctgtgaatggaccttggtgtcaaatttttgtgctaatttcattcgcttacttacagcctgaacagattttacgtacaccattataactatattagctttcctctcgggctatgataaactgaagttgtcttgatctagttcttctcagagttgaagttgatgaagcaatcactggaggcggagcttaaaattac

SEQ ID NO: 220941 - DNA, 4005 bp, Zea Mays
cctggttagtactagtacagtagtaataatcgattaaccagaaaaaacctgaaagtgtaacttgatctggaattcctggatccgtgcgcacactctaggcgttgtgcgtgtttggtcccgtcaatcagtcagtctttacgacgcattcgcattcgcgctcacctccagaaccgagatccaccaccgcgcaccttcacgactcggccggcgctccgtcactcatgatggccggccgcccgcgcccgcagacggagctgcactcgccgtccgcctccacgcggcggcgtgagcggtggctggttgtactcggcgtcgcactccacgccgtgtacatgctcagcatcttcgacatatacttcaagtcccccatcgtgcacggcatggatcccgtgccgcctcgcctctcggcgccccccgccaagcgcctcgtcctcctcgtcgcggacgggctcagggcggacaagttcttcgagcccgacgaacgggggaggtacagagcgccgttcctgcgcggtgtgatcgaggagaagggccggtggggagtcagccacgcgcgcccgcccaccgagtccaggcccggccatgtctccctcatcgctggcttctacgaggaccctagtgctgtcaccaaaggatggaaggccaatccagttgagtttgattctgtattcaatcagagtcggcacactatctcatttggaagtccagatattgttcctatattctgcagtaacctacctcacagtacctgggacacttatccccatgaatatgaagactttgcaacagatgcatcatttctggatcattggtcatttgaccagtttcaagatcttgtcaacaggtcttttgacgatattaaattgaggcagttactcctacaagataagttggttatatttttgcatttactgggttgtgataccaatggccatgcacaccgaccctattcaagcatatacctgaacaatgtcaaggttgttgaccaaatagctgaaagtgtgtacaatcttatggagaactacttcaatgacaatcaaacagcatacgtgtttactgcagatcatggaatgagtgacaaaggaagccatggagacggacacccttcaaacacagatactcctcttgtggcatggggtgctggaattagaagcccaaagttcctggcttatacagagaaacctgatgacggctttcggtttgtagataaccacaaacatgatacacccactccaaaagactgggcccttgaaggatttgaaagagtagatgtcaaccaggctgacatagctcccctaatggctacacttgtgggtttgccatgcccgatgaattctgtggggagcttacctactccttatttgaaactaaggaaggctgatgaagttgaagccgttctggccaatacaaagcaaattcttaaccagtttctccgaaagtcactatgatgaccaagactaccaaattaaacaacaaaccatactgttacccctaagcatgtcttcccttatcgatctcagagctgaaggaatccagttcactctacttcaaaccttttaagccactggcgaacttttctttagtgctcagtcagattgaggatcttatatctggaagggactatgaaactgccatggagcaatctgaggagctccgaaggctggctcttgctgggcttcattatttccaaacatatgattggttcatgttaatgactacaattacccttggatatattggatggatggtgaacctcattatacatgtgctacagtcttatacatcatatcctgtaattcttctcaagagggctcaattgtatcctaacaatacctccatgaaagtttacatttgtggatgcttctttatgggtttgtcatccattttgctacttctagagaaatcaccacttctttaccatgcttatgtattgtgcacaatattcctttggacaagaattgtacaaaaaattgattttttgaagtccgtatggagagaactagctaatatgcccttcaagtatatttttaatctcctgaccagttcagttgttgcactgcttgtattggagtttctggttatgagcttctttgataggaaaatttatacgtggtgcttcttggtccttgggatactcggttcaacatatgtagcattgtttattcaagctagtgctgcacttgcgatatacatatggcttgcttgctggttcctgtctgtatttactttgatgccagctgaaattccagaaaacaacaacttggtaatttttagtggagggctcataatacttattggattagcttcaagatggattaaatcaaatagttccagcttttggctatatctcactcgagcaaataaacgggatcctcaatcttttaaactctattttgttcaggttattttagtcgcaatatcttcgataatggtgtggctatctacctcacaccggtcccagaacagagaattgctctcactacaccagtttatcaattggtctgtagctggtgttgctatggtgctacctcttttctcaccacctagtgttctatcccgtcttacatctatattcttgggttttgctcctccatttctgctgctttccattggctatgaagcagttttctatagcgcttttgcaatggtactcattggatggatatttgtggaatctgccaacctgtattgctcagaagaaagtggttctgcacgtcgcagaagccttgcggataactcagtttttggctatgaagaaagacacctgcgactatctgatttaagaatccctttgttatttgtgatattatttaatgtcgccttctttggtactggtaattttgcaagtattgcaagctttgagatctcgtctgtgtacagattcattacagtttttagtccatttcttatggcaggacttcttatctttaagttgtttattccgtttatgcttgtcatgtaagttttttttaaccttgttaactttatgctacatgatgtcatggagttaaagttaaatgaagatgtgctgaattcgatttcagtgtacagttatttttatttttcaaaatatgaatatacgatactttaatgaaagttcttgtcacaaattaggtcaccatttgctatagaaagataaaaacaggcaacgatccatttataatttaatgttcgttttgatatctatatagactttatatactatctgcatagttatctgttgagcaactttaagattattttgggagttcctgcacagggtaacaagctataacaaataaaatgtgaagaagacagttttctccaaatgttaggtctttgacatttttctataacacttcagcttaaatatgtacttttttcttttaatttgcgctgaacttgatgctaccttggtgacaagtgcagatgtacgtttagtgcgatcaccaaggtcgtccgtatcccacggctgggctgttattttcttgtaatactgctttcagatgtaatgactattcatttctttttcctggtacggaataccggtagttggatggaaatcggcaacagcattagccatttcggaatagtgagcgcccaagtggtcttcgttttgctgctctttgccctcacgaatatatacactagagatattttggtctcgtctcggcaactaaccgcacggaaagttatgtaaatcgttcagtttatttagaaatccaaatacatccatccttttatttattcatttttgggtcgactttcattttgggatcaagtttgtagcttagcttttggctaaagttttgtagcttagcttttttgttttctgtgaatggaccttggtgtcaaatttttgtgctaatttcattcgcttacttacagcctgaacagattttacgtacaccattataactatattagctttcctctcgggctatgataaactgaagttgtcttgatctagttcttctcagagttgaagttgatgaagcaatcactggaggcggagcttaaaattac

SEQ ID NO: 220942 - DNA, 3928 bp, Zea Mays
cctggttagtactagtacagtagtaataatcgattaaccagaaaaaacctgaaagtgtaacttgatctggaattcctggatccgtgcgcacactctaggcgttgtgcgtgtttggtcccgtcaatcagtcagtctttacgacgcattcgcattcgcgctcacctccagaaccgagatccaccaccgcgcaccttcacgactcggccggcgctccgtcactcatgatggccggccgcccgcgcccgcagacggagctgcactcgccgtccgcctccacgcggcggcgtgagcggtggctggttgtactcggcgtcgcactccacgccgtgtacatgctcagcatcttcgacatatacttcaagtcccccatcgtgcacggcatggatcccgtgccgcctcgcctctcggcgccccccgccaagcgcctcgtcctcctcgtcgcggacgggctcagggcggacaagttcttcgagcccgacgaacgggggaggtacagagcgccgttcctgcgcggtgtgatcgaggagaagggccggtggggagtcagccacgcgcgcccgcccaccgagtccaggcccggccatgtctccctcatcgctggcttctacgaggaccctagtgctgtcaccaaaggatggaaggccaatccagttgagtttgattctgtattcaatcagagtcggcacactatctcatttggaagtccagatattgttcctatattctgcagtaacctacctcacagtacctgggacacttatccccatgaatatgaagactttgcaacagatgcatcatttctggatcattggtcatttgaccagtttcaagatcttgtcaacaggtcttttgacgatattaaattgaggcagttactcctacaagataagttggttatatttttgcatttactgggttgtgataccaatggccatgcacaccgaccctattcaagcatatacctgaacaatgtcaaggttgttgaccaaatagctgaaagtgtgtacaatcttatggagaactacttcaatgacaatcaaacagcatacgtgtttactgcagatcatggaatgagtgacaaaggaagccatggagacggacacccttcaaacacagatactcctcttgtggcatggggtgctggaattagaagcccaaagttcctggcttatacagagaaacctgatgacggctttcggtttgtagataaccacaaacatgatacacccactccaaaagactgggcccttgaaggatttgaaagagtagatgtcaaccaggctgacatagctcccctaatggctacacttgtgggtttgccatgcccgatgaattctgtggggagcttacctactccttatttgaaactaaggaaggctgatgaagttgaagccgttctggccaatacaaagcaaattcttaaccagtttctccgaaagtcacagctgaaggaatccagttcactctacttcaaaccttttaagccactggcgaacttttctttagtgctcagtcagattgaggatcttatatctggaagggactatgaaactgccatggagcaatctgaggagctccgaaggctggctcttgctgggcttcattatttccaaacatatgattggttcatgttaatgactacaattacccttggatatattggatggatggtgaacctcattatacatgtgctacagtcttatacatcatatcctgtaattcttctcaagagggctcaattgtatcctaacaatacctccatgaaagtttacatttgtggatgcttctttatgggtttgtcatccattttgctacttctagagaaatcaccacttctttaccatgcttatgtattgtgcacaatattcctttggacaagaattgtacaaaaaattgattttttgaagtccgtatggagagaactagctaatatgcccttcaagtatatttttaatctcctgaccagttcagttgttgcactgcttgtattggagtttctggttatgagcttctttgataggaaaatttatacgtggtgcttcttggtccttgggatactcggttcaacatatgtagcattgtttattcaagctagtgctgcacttgcgatatacatatggcttgcttgctggttcctgtctgtatttactttgatgccagctgaaattccagaaaacaacaacttggtaatttttagtggagggctcataatacttattggattagcttcaagatggattaaatcaaatagttccagcttttggctatatctcactcgagcaaataaacgggatcctcaatcttttaaactctattttgttcaggttattttagtcgcaatatcttcgataatggtgtggctatctacctcacaccggtcccagaacagagaattgctctcactacaccagtttatcaattggtctgtagctggtgttgctatggtgctacctcttttctcaccacctagtgttctatcccgtcttacatctatattcttgggttttgctcctccatttctgctgctttccattggctatgaagcagttttctatagcgcttttgcaatggtactcattggatggatatttgtggaatctgccaacctgtattgctcagaagaaagtggttctgcacgtcgcagaagccttgcggataactcagtttttggctatgaagaaagacacctgcgactatctgatttaagaatccctttgttatttgtgatattatttaatgtcgccttctttggtactggtaattttgcaagtattgcaagctttgagatctcgtctgtgtacagattcattacagtttttagtccatttcttatggcaggacttcttatctttaagttgtttattccgtttatgcttgtcatgtaagttttttttaaccttgttaactttatgctacatgatgtcatggagttaaagttaaatgaagatgtgctgaattcgatttcagtgtacagttatttttatttttcaaaatatgaatatacgatactttaatgaaagttcttgtcacaaattaggtcaccatttgctatagaaagataaaaacaggcaacgatccatttataatttaatgttcgttttgatatctatatagactttatatactatctgcatagttatctgttgagcaactttaagattattttgggagttcctgcacagggtaacaagctataacaaataaaatgtgaagaagacagttttctccaaatgttaggtctttgacatttttctataacacttcagcttaaatatgtacttttttcttttaatttgcgctgaacttgatgctaccttggtgacaagtgcagatgtacgtttagtgcgatcaccaaggtcgtccgtatcccacggctgggctgttattttcttgtaatactgctttcagatgtaatgactattcatttctttttcctggtacggaataccggtagttggatggaaatcggcaacagcattagccatttcggaatagtgagcgcccaagtggtcttcgttttgctgctctttgccctcacgaatatatacactagagatattttggtctcgtctcggcaactaaccgcacggaaagttatgtaaatcgttcagtttatttagaaatccaaatacatccatccttttatttattcatttttgggtcgactttcattttgggatcaagtttgtagcttagcttttggctaaagttttgtagcttagcttttttgttttctgtgaatggaccttggtgtcaaatttttgtgctaatttcattcgcttacttacagcctgaacagattttacgtacaccattataactatattagctttcctctcgggctatgataaactgaagttgtcttgatctagttcttctcagagttgaagttgatgaagcaatcactggaggcggagcttaaaattac

SEQ ID NO: 220943 - DNA, 3471 bp, Zea Mays
cctggttagtactagtacagtagtaataatcgattaaccagaaaaaacctgaaagtgtaacttgatctggaattcctggatccgtgcgcacactctaggcgttgtgcgtgtttggtcccgtcaatcagtcagtctttacgacgcattcgcattcgcgctcacctccagaaccgagatccaccaccgcgcaccttcacgactcggccggcgctccgtcactcatgatggccggccgcccgcgcccgcagacggagctgcactcgccgtccgcctccacgcggcggcgtgagcggtggctggttgtactcggcgtcgcactccacgccgtgtacatgctcagcatcttcgacatatacttcaagtcccccatcgtgcacggcatggatcccgtgccgcctcgcctctcggcgccccccgccaagcgcctcgtcctcctcgtcgcggacgggctcagggcggacaagttcttcgagcccgacgaacgggggaggtacagagcgccgttcctgcgcggtgtgatcgaggagaagggccggtggggagtcagccacgcgcgcccgcccaccgagtccaggcccggccatgtctccctcatcgctggcttctacgaggaccctagtgctgtcaccaaaggatggaaggccaatccagttgagtttgattctgtattcaatcagagtcggcacactatctcatttggaagtccagatattgttcctatattctgcagtaacctacctcacagtacctgggacacttatccccatgaatatgaagactttgcaacagatgcatcatttctggatcattggtcatttgaccagtttcaagatcttgtcaacaggtcttttgacgatattaaattgaggcagttactcctacaagataagttggttatatttttgcatttactgggttgtgataccaatggccatgcacaccgaccctattcaagcatatacctgaacaatgtcaaggttgttgaccaaatagctgaaagtgtgtacaatcttatggagaactacttcaatgacaatcaaacagcatacgtgtttactgcagatcatggaatgagtgacaaaggaagccatggagacggacacccttcaaacacagatactcctcttgtggcatggggtgctggaattagaagcccaaagttcctggcttatacagagaaacctgatgacggctttcggtttgtagataaccacaaacatgatacacccactccaaaagactgggcccttgaaggatttgaaagagtagatgtcaaccaggctgacatagctcccctaatggctacacttgtgggtttgccatgcccgatgaattctgtggggagcttacctactccttatttgaaactaaggaaggctgatgaagttgaagccgttctggccaatacaaagcaaattcttaaccagtttctccgaaagtcacagctgaaggaatccagttcactctacttcaaaccttttaagccactggcgaacttttctttagtgctcagtcagattgaggatcttatatctggaagggactatgaaactgccatggagcaatctgaggagctccgaaggctggctcttgctgggcttcattatttccaaacatatgattggttcatgttaatgactacaattacccttggatatattggatggatggtgaacctcattatacatgtgctacagtcttatacatcatatcctgtaattcttctcaagagggctcaattgtatcctaacaatacctccatgaaagtttacatttgtggatgcttctttatgggtttgtcatccattttgctacttctagagaaatcaccacttctttaccatgcttatgtattgtgcacaatattcctttggacaagaattgtacaaaaaattgattttttgaagtccgtatggagagaactagctaatatgcccttcaagtatatttttaatctcctgaccagttcagttgttgcactgcttgtattggagtttctggttatgagcttctttgataggaaaatttatacgtggtgcttcttggtccttgggatactcggttcaacatatgtagcattgtttattcaagctagtgctgcacttgcgatatacatatggcttgcttgctggttcctgtctgtatttactttgatgccagctgaaattccagaaaacaacaacttggtaatttttagtggagggctcataatacttattggattagcttcaagatggattaaatcaaatagttccagcttttggctatatctcactcgagcaaataaacgggatcctcaatcttttaaactctattttgttcaggttattttagtcgcaatatcttcgataatggtgtggctatctacctcacaccggtcccagaacagagaattgctctcactacaccagtttatcaattggtctgtagctggtgttgctatggtgctacctcttttctcaccacctagtgttctatcccgtcttacatctatattcttgggttttgctcctccatttctgctgctttccattggctatgaagcagttttctatagcgcttttgcaatggtactcattggatggatatttgtggaatctgccaacctgtattgctcagaagaaagtggttctgcacgtcgcagaagccttgcggataactcagtttttggctatgaagaaagacacctgcgactatctgatttaagaatccctttgtgatattatttaatgtcgccttctttggtactggtaattttgcaagtattgcaagctttgagatctcgtctgtgtacagattcattacagtttttagtccatttcttatggcaggacttcttatctttaagttgtttattccgtttatgcttgtcatatgtacgtttagtgcgatcaccaaggtcgtccgtatcccacggctgggctgttattttcttgtaatactgctttcagatgtaatgactattcatttctttttcctggtacggaataccggtagttggatggaaatcggcaacagcattagccatttcggaatagtgagcgcccaagtggtcttcgttttgctgctctttgccctcacgaatatatacactagagatattttggtctcgtctcggcaactaaccgcacggaaagttatgtaaatcgttcagtttatttagaaatccaaatacatccatccttttatttattcatttttgggtcgactttcattttgggatcaagtttgtagcttagcttttggctaaagttttgtagcttagcttttttgttttctgtgaatggaccttggtgtcaaatttttgtgctaatttcattcgcttacttacagcctgaacagattttacgtacaccattataactatattagctttcctctcgggctatgataaactgaagttgtcttgatctagttcttctcagagttgaagttgatgaagcaatcactggaggcggagcttaaaattac

SEQ ID NO: 220944 - DNA, 3555 bp, Zea Mays
cctggttagtactagtacagtagtaataatcgattaaccagaaaaaacctgaaagtgtaacttgatctggaattcctggatccgtgcgcacactctaggcgttgtgcgtgtttggtcccgtcaatcagtcagtctttacgacgcattcgcattcgcgctcacctccagaaccgagatccaccaccgcgcaccttcacgactcggccggcgctccgtcactcatgatggccggccgcccgcgcccgcagacggagctgcactcgccgtccgcctccacgcggcggcgtgagcggtggctggttgtactcggcgtcgcactccacgccgtgtacatgctcagcatcttcgacatatacttcaagtcccccatcgtgcacggcatggatcccgtgccgcctcgcctctcggcgccccccgccaagcgcctcgtcctcctcgtcgcggacgggctcagggcggacaagttcttcgagcccgacgaacgggggaggtacagagcgccgttcctgcgcggtgtgatcgaggagaagggccggtggggagtcagccacgcgcgcccgcccaccgagtccaggcccggccatgtctccctcatcgctggcttctacgaggaccctagtgctgtcaccaaaggatggaaggccaatccagttgagtttgattctgtattcaatcagagtcggcacactatctcatttggaagtccagatattgttcctatattctgcagtaacctacctcacagtacctgggacacttatccccatgaatatgaagactttgcaacagatgcatcatttctggatcattggtcatttgaccagtttcaagatcttgtcaacaggtcttttgacgatattaaattgaggcagttactcctacaagataagttggttatatttttgcatttactgggttgtgataccaatggccatgcacaccgaccctattcaagcatatacctgaacaatgtcaaggttgttgaccaaatagctgaaagtgtgtacaatcttatggagaactacttcaatgacaatcaaacagcatacgtgtttactgcagatcatggaatgagtgacaaaggaagccatggagacggacacccttcaaacacagatactcctcttgtggcatggggtgctggaattagaagcccaaagttcctggcttatacagagaaacctgatgacggctttcggtttgtagataaccacaaacatgatacacccactccaaaagactgggcccttgaaggatttgaaagagtagatgtcaaccaggctgacatagctcccctaatggctacacttgtgggtttgccatgcccgatgaattctgtggggagcttacctactccttatttgaaactaaggaaggctgatgaagttgaagccgttctggccaatacaaagcaaattcttaaccagtttctccgaaagtcactatgatgaccaagactaccaaattaaacaacaaaccatactgttacccctaagcatgtcttcccttatcgatctcagagctgaaggaatccagttcactctacttcaaaccttttaagccactggcgaacttttctttagtgctcagtcagattgaggatcttatatctggaagggactatgaaactgccatggagcaatctgaggagctccgaaggctggctcttgctgggcttcattatttccaaacatatgattggttcatgttaatgactacaattacccttggatatattggatggatggtgaacctcattatacatgtgctacagtcttatacatcatatcctgtaattcttctcaagagggctcaattgtatcctaacaatacctccatgaaagtttacatttgtggatgcttctttatgggtttgtcatccattttgctacttctagagaaatcaccacttctttaccatgcttatgtattgtgcacaatattcctttggacaagaattgtacaaaaaattgattttttgaagtccgtatggagagaactagctaatatgcccttcaagtatatttttaatctcctgaccagttcagttgttgcactgcttgtattggagtttctggttatgagcttctttgataggaaaatttatacgtggtgcttcttggtccttgggatactcggttcaacatatgtagcattgtttattcaagctagtgctgcacttgcgatatacatatggcttgcttgctggttcctgtctgtatttactttgatgccagctgaaattccagaaaacaacaacttggtaatttttagtggagggctcataatacttattggattagcttcaagatggattaaatcaaatagttccagcttttggctatatctcactcgagcaaataaacgggatcctcaatcttttaaactctattttgttcaggttattttagtcgcaatatcttcgataatggtgtggctatctacctcacaccggtcccagaacagagaattgctctcactacaccagtttatcaattggtctgtagctggtgttgctatggtgctacctcttttctcaccacctagtgttctatcccgtcttacatctatattcttgggttttgctcctccatttctgctgctttccattggctatgaagcagttttctatagcgcttttgcaatggtactcattggatggatatttgtggaatctgccaacctgtattgctcagaagaaagtggttctgcacgtcgcagaagccttgcggataactcagtttttggctatgaagaaagacacctgcgactatctgatttaagaatccctttgttatttgtgatattatttaatgtcgccttctttggtactggtaattttgcaagtattgcaagctttgagatctcgtctgtgtacagattcattacagtttttagtccatttcttatggcaggacttcttatctttaagttgtttattccgtttatgcttgtcatatgtacgtttagtgcgatcaccaaggtcgtccgtatcccacggctgggctgttattttcttgtaatactgctttcagatgtaatgactattcatttctttttcctggtacggaataccggtagttggatggaaatcggcaacagcattagccatttcggaatagtgagcgcccaagtggtcttcgttttgctgctctttgccctcacgaatatatacactagagatattttggtctcgtctcggcaactaaccgcacggaaagttatgtaaatcgttcagtttatttagaaatccaaatacatccatccttttatttattcatttttgggtcgactttcattttgggatcaagtttgtagcttagcttttggctaaagttttgtagcttagcttttttgttttctgtgaatggaccttggtgtcaaatttttgtgctaatttcattcgcttacttacagcctgaacagattttacgtacaccattataactatattagctttcctctcgggctatgataaactgaagttgtcttgatctagttcttctcagagttgaagttgatgaagcaatcactggaggcggagcttaaaattac

SEQ ID NO: 220945 - DNA, 3497 bp, Zea Mays
cctggttagtactagtacagtagtaataatcgattaaccagaaaaaacctgaaagtgtaacttgatctggaattcctggatccgtgcgcacactctaggcgttgtgcgtgtttggtcccgtcaatcagtcagtctttacgacgcattcgcattcgcgctcacctccagaaccgagatccaccaccgcgcaccttcacgactcggccggcgctccgtcactcatgatggccggccgcccgcgcccgcagacggagctgcactcgccgtccgcctccacgcggcggcgtgagcggtggctggttgtactcggcgtcgcactccacgccgtgtacatgctcagcatcttcgacatatacttcaagtcccccatcgtgcacggcatggatcccgtgccgcctcgcctctcggcgccccccgccaagcgcctcgtcctcctcgtcgcggacgggctcagggcggacaagttcttcgagcccgacgaacgggggaggtacagagcgccgttcctgcgcggtgtgatcgaggagaagggccggtggggagtcagccacgcgcgcccgcccaccgagtccaggcccggccatgtctccctcatcgctggcttctacgaggaccctagtgctgtcaccaaaggatggaaggccaatccagttgagtttgattctgtattcaatcagagtcggcacactatctcatttggaagtccagatattgttcctatattctgcagtaacctacctcacagtacctgggacacttatccccatgaatatgaagactttgcaacagatgcatcatttctggatcattggtcatttgaccagtttcaagatcttgtcaacaggtcttttgacgatattaaattgaggcagttactcctacaagataagttggttatatttttgcatttactgggttgtgataccaatggccatgcacaccgaccctattcaagcatatacctgaacaatgtcaaggttgttgaccaaatagctgaaagtgtgtacaatcttatggagaactacttcaatgacaatcaaacagcatacgtgtttactgcagatcatggaatgagtgacaaaggaagccatggagacggacacccttcaaacacagatactcctcttgtggcatggggtgctggaattagaagcccaaagttcctggcttatacagagaaacctgatgacggctttcggtttgtagataaccacaaacatgatacacccactccaaaagactgggcccttgaaggatttgaaagagtagatgtcaaccaggctgacatagctcccctaatggtggcttgaaaatctccatgctacacttgtgggtttgccatgcccgatgaattctgtggggagcttacctactccttatttgaaactaaggaaggctgatgaagttgaagccgttctggccaatacaaagcaaattcttaaccagtttctccgaaagtcacagctgaaggaatccagttcactctacttcaaaccttttaagccactggcgaacttttctttagtgctcagtcagattgaggatcttatatctggaagggactatgaaactgccatggagcaatctgaggagctccgaaggctggctcttgctgggcttcattatttccaaacatatgattggttcatgttaatgactacaattacccttggatatattggatggatggtgaacctcattatacatgtgctacagtcttatacatcatatcctgtaattcttctcaagagggctcaattgtatcctaacaatacctccatgaaagtttacatttgtggatgcttctttatgggtttgtcatccattttgctacttctagagaaatcaccacttctttaccatgcttatgtattgtgcacaatattcctttggacaagaattgtacaaaaaattgattttttgaagtccgtatggagagaactagctaatatgcccttcaagtatatttttaatctcctgaccagttcagttgttgcactgcttgtattggagtttctggttatgagcttctttgataggaaaatttatacgtggtgcttcttggtccttgggatactcggttcaacatatgtagcattgtttattcaagctagtgctgcacttgcgatatacatatggcttgcttgctggttcctgtctgtatttactttgatgccagctgaaattccagaaaacaacaacttggtaatttttagtggagggctcataatacttattggattagcttcaagatggattaaatcaaatagttccagcttttggctatatctcactcgagcaaataaacgggatcctcaatcttttaaactctattttgttcaggttattttagtcgcaatatcttcgataatggtgtggctatctacctcacaccggtcccagaacagagaattgctctcactacaccagtttatcaattggtctgtagctggtgttgctatggtgctacctcttttctcaccacctagtgttctatcccgtcttacatctatattcttgggttttgctcctccatttctgctgctttccattggctatgaagcagttttctatagcgcttttgcaatggtactcattggatggatatttgtggaatctgccaacctgtattgctcagaagaaagtggttctgcacgtcgcagaagccttgcggataactcagtttttggctatgaagaaagacacctgcgactatctgatttaagaatccctttgttatttgtgatattatttaatgtcgccttctttggtactggtaattttgcaagtattgcaagctttgagatctcgtctgtgtacagattcattacagtttttagtccatttcttatggcaggacttcttatctttaagttgtttattccgtttatgcttgtcatatgtacgtttagtgcgatcaccaaggtcgtccgtatcccacggctgggctgttattttcttgtaatactgctttcagatgtaatgactattcatttctttttcctggtacggaataccggtagttggatggaaatcggcaacagcattagccatttcggaatagtgagcgcccaagtggtcttcgttttgctgctctttgccctcacgaatatatacactagagatattttggtctcgtctcggcaactaaccgcacggaaagttatgtaaatcgttcagtttatttagaaatccaaatacatccatccttttatttattcatttttgggtcgactttcattttgggatcaagtttgtagcttagcttttggctaaagttttgtagcttagcttttttgttttctgtgaatggaccttggtgtcaaatttttgtgctaatttcattcgcttacttacagcctgaacagattttacgtacaccattataactatattagctttcctctcgggctatgataaactgaagttgtcttgatctagttcttctcagagttgaagttgatgaagcaatcactggaggcggagcttaaaattac

SEQ ID NO: 220946 - DNA, 1009 bp, Zea Mays
gaaggagaaaagctaatcatatagcataaatcgtccctgttggtgagctgttccaaagactcaaaggttaaagtttgggacacagtggctccttcgagtggttcatcaccatgtgtaggcagtgctcacctcaactcaaacaggccaccaattgctatgaaatgccatgaatccctttgctatattgctgctggagctcaagtgacagcgattgacttgaggacaatgaagaaggcttctgtccttgcactccagaaccacagaatactttcttacggatacgtcaatggctgtgcagtccaaaaaaatgaagagaagggaatttgacattgtcgttcaagcttcaacattgatcacttattggttttcaggaagtctttctgaatgtcagttgctataggattatttgaacaacatctcttccaatggtgatatattttatgatgctcagaatgatttcttgacacctgaatgggacagtgagaatttacaagtggtactgatgattctatccatgttcaaatcatcaagatagtcatcagggttattgcccacggaagcttaaatacttggtgctgaactgctgaagtatgatgtctcactgaaaaacaacgagatggcaatgagaagtgttcaggaagaggggtaatatttactcagagcagcaaaggaaggtcgccccaccaagctgccatgatattcctccacttaccagtgtttcaaattccaatgacatcaggttgaagaaaggaacttcacacatgaaaagagacgatccggacgaccatgaagattaaacgttgctgttaagaaaagccatattttctgtattgcttctaagctgttttatggcctttaaaccaatacttttgcttggcatatatgtagctataactattgtaatataatctctgagcttctcatgctgctattcaacatatcattactcctaccaatatatgtacagtttcagttgacttgcttgctttccgttcttgccttatcaagc

SEQ ID NO: 220947 - DNA, 1828 bp, Zea Mays
ctatactgtaacaatgtgtataatgctgctgtccagaacatacatgttctggcactctgcttcaagcataaatcgtccctgttggtgagctgttccaaagactcaaaggttaaagtttgggacacagtggctccttcgagtggttcatcaccatgtgtaggcagtgctcacctcaactcaaacaggccaccaattgctatgaaatgccatgaatccctttgctatattgctgctggagctcaagtgacagcgattgacttgaggacaatgaagaaggcttctgtccttgcactccagaaccacagaatactttcttacggatacgtcaatggctgtgcagtccaaaaaaatgaagagaagggaatttgacattgtcgttcaagcttcaacattgatcacttattggttttcaggaagtctttctgaatgtcagttgctataggattatttgaacaacatctcttccaatggtgatatattttatgatgctcagaatgatttcttgacacctgaatgggacagtgagaatttacaagtggtactgatgattctatccatgttcaaatcatcaagatagtcatcaggttccttcagtaattcaaaccatcactaatcccttctgacgggctatatattctatcggaccaggcacaactatccaaatttcttttctatataacaaacgcggacgtaaagttgctcaaccacgctgtccacgtcgctcctccgtttcccagccattggatcggcaaccaacgacacaagagaattccgtgcgattgtttcttaacgtgaagtttctggacagcgccggacagatagagagaatagaagaatatacacatcttcttcctctcgcttccaaaggtgatgccttccacggagaggagatcgtgcgaccatgatggcagcgactcttgattttgcccatcttcccacgctcaaacggataacagtctccttccttctgtctcttccaatcgtctcttcctagttccataacactctcacaacacgctagcaggacactcattctctcaatcggctcttcccgctgcgctacacgccaccaagagcctccccaactcctccccgtcaaacggcgccgcgtcgcaaggagcacaaccaccccccgtctccttcctcagacgctgtcgcgtttctcgcgcggtgcgccccctccctgaaattcttatatacagagcaaggagcaaatatgggattccatgatgtccacgtcgctattttttgacggctcaacttgattgtgccgtgaattgtctgttagctagggagtcatcatttctgttttggcctctaaaataacgtttacagctggaaccgaagtatgcttgacaaatggttattgcccacggaagcttaaatacttggtgctgaactgctgaagtatgatgtctcactgaaaaacaacgagatggcaatgagaagtgttcaggaagaggggtaatatttactcagagcagcaaaggaaggtcgccccaccaagctgccatgatattcctccacttaccagtgtttcaaattccaatgacatcaggttgaagaaaggaacttcacacatgaaaagagacgatccggacgaccatgaagattaaacgttgctgttaagaaaagccatattttctgtattgcttctaagctgttttatggcctttaaaccaatacttttgcttggcatatatgtagctataactattgtaatataatctctgagcttctcatgctgctattcaacatatcattactcctaccaatatatgtacagtttcagttgacttgcttgctttccgttcttgccttatcaagc

SEQ ID NO: 220948 - DNA, 1838 bp, Zea Mays
ctgaatgaagttcgctatactgtaacaatgtgtataatgctgctgtccagaacatacatgttctggcactctgcttcaagcataaatcgtccctgttggtgagctgttccaaagactcaaaggttaaagtttgggacacagtggctccttcgagtggttcatcaccatgtgtaggcagtgctcacctcaactcaaacaggccaccaattgctatgaaatgccatgaatccctttgctatattgctgctggagctcaagtgacagcgattgacttgaggacaatgaagaaggcttctgtccttgcactccagaaccacagaatactttcttacggatacgtcaatggctgtgcagtccaaaaaaatgaagagaagggaatttgacattgtcgttcaagcttcaacattgatcacttattggttttcaggaagtctttctgaatgtcagttgctataggattatttgaacaacatctcttccaatggtgatatattttatgatgctcagaatgatttcttgacacctgaatgggacagtgagaatttacaagtggtactgatgattctatccatgttcaaatcatcaagatagtcatcaggttccttcagtaattcaaaccatcactaatcccttctgacgggctatatattctatcggaccaggcacaactatccaaatttcttttctatataacaaacgcggacgtaaagttgctcaaccacgctgtccacgtcgctcctccgtttcccagccattggatcggcaaccaacgacacaagagaattccgtgcgattgtttcttaacgtgaagtttctggacagcgccggacagatagagagaatagaagaatatacacatcttcttcctctcgcttccaaaggtgatgccttccacggagaggagatcgtgcgaccatgatggcagcgactcttgattttgcccatcttcccacgctcaaacggataacagtctccttccttctgtctcttccaatcgtctcttcctagttccataacactctcacaacacgctagcaggacactcattctctcaatcggctcttcccgctgcgctacacgccaccaagagcctccccaactcctccccgtcaaacggcgccgcgtcgcaaggagcacaaccaccccccgtctccttcctcagacgctgtcgcgtttctcgcgcggtgcgccccctccctgaaattcttatatacagagcaaggagcaaatatgggattccatgatgtccacgtcgctattttttgacggctcaacttgattgtgccgtgaattgtctgttagctagggagtcatcatttctgttttggcctctaaaataacgtttacagctggaaccgaagtatgcttgacaaatggttattgcccacggaagcttaaatacttggtgctgaactgctgaagtatgatgtctcactgaaaaacaacgagatggcaatgagaagtgttcaggaagaggggtaatatttactcagagcagcaaaggtcgccccaccaagctgccatgatattcctccacttaccagtgtttcaaattccaatgacatcaggttgaagaaaggaacttcacacatgaaaagagacgatccggacgaccatgaagattaaacgttgctgttaagaaaagccatattttctgtattgcttctaagctgttttatggcctttaaaccaatacttttgcttggcatatatgtagctataactattgtaatataatctctgagcttctcatgctgctattcaacatatcattactcctaccaatatatgtacagtttcagttgacttgcttgctttccgttcttgccttatcaagc

SEQ ID NO: 220949 - DNA, 2220 bp, Zea Mays
cgcttcttcacgtcccccctcaatcacatcaccggcactccccattgtccttcatctgctgcctgctcctccgcgcggccatgcccgagctcgcggtcctcgttctcagccacgcgctctttcacgcgcgcctccgttgccgctcttgctcccagactttgccgtggccctctcccgtctctcattggcatttttttatgtagggttactcacactgttacaagggtcattcagcgcctgtcactgctctggctgatagattgcttatggatggtgaatctaaactgcttgcaagtggagggtaccaatccaccttccctacccgtccagctgctcgatgcctctgaaattgatggagcgatacctagcacgcggtgcatgttgttctgaagattctgctgctgttggttgccattcaccctgacagtattgccagtggcaccgtcaactatttcttccctctccgcccgagcctgcagatgaatgtttgacggcacttctcgcctactgtcctcactggtgtttccaaagtctgcagtgagttcggtctcagctctaattaacgaggaagtcatgctaggcaccctctggtcttctcgtctccaaccaaccactaccggcgtgtggatgatagcaggttatctgttgcgtggcataaatcgtccctgttggtgagctgttccaaagactcaaaggttaaagtttgggacacagtggctccttcgagtggttcatcaccatgtgtaggcagtgctcacctcaactcaaacaggccaccaattgctatgaaatgccatgaatccctttgctatattgctgctggagctcaagtgacagcgattgacttgaggacaatgaagaaggcttctgtccttgcactccagaaccacagaatactttcttacggatacgtcaatggctgtgcagtccaaaaaaatgaagagaagggaatttgacattgtcgttcaagcttcaacattgatcacttattggttttcaggaagtctttctgaatgtcagttgctataggattatttgaacaacatctcttccaatggtgatatattttatgatgctcagaatgatttcttgacacctgaatgggacagtgagaatttacaagtggtactgatgattctatccatgttcaaatcatcaagatagtcatcaggttccttcagtaattcaaaccatcactaatcccttctgacgggctatatattctatcggaccaggcacaactatccaaatttcttttctatataacaaacgcggacgtaaagttgctcaaccacgctgtccacgtcgctcctccgtttcccagccattggatcggcaaccaacgacacaagagaattccgtgcgattgtttcttaacgtgaagtttctggacagcgccggacagatagagagaatagaagaatatacacatcttcttcctctcgcttccaaaggtgatgccttccacggagaggagatcgtgcgaccatgatggcagcgactcttgattttgcccatcttcccacgctcaaacggataacagtctccttccttctgtctcttccaatcgtctcttcctagttccataacactctcacaacacgctagcaggacactcattctctcaatcggctcttcccgctgcgctacacgccaccaagagcctccccaactcctccccgtcaaacggcgccgcgtcgcaaggagcacaaccaccccccgtctccttcctcagacgctgtcgcgtttctcgcgcgggttattgcccacggaagcttaaatacttggtgctgaactgctgaagtatgatgtctcactgaaaaacaacgagatggcaatgagaagtgttcaggaagaggggtaatatttactcagagcagcaaaggtcgccccaccaagctgccatgatattcctccacttaccagtgtttcaaattccaatgacatcaggttgaagaaaggaacttcacacatgaaaagagacgatccggacgaccatgaagattaaacgttgctgttaagaaaagccatattttctgtattgcttctaagctgttttatggcctttaaaccaatacttttgcttggcatatatgtagctataactattgtaatataatctctgagcttctcatgctgctattcaacatatcattactcctaccaatatatgtacagtttcagttgacttgcttgctttccgttcttgccttatcaagc

SEQ ID NO: 220950 - DNA, 2224 bp, Zea Mays
cgcttcttcacgtcccccctcaatcacatcaccggcactccccattgtccttcatctgctgcctgctcctccgcgcggccatgcccgagctcgcggtcctcgttctcagccacgcgctctttcacgcgcgcctccgttgccgctcttgctcccagactttgccgtggccctctcccgtctctcattggcatttttttatgtagggttactcacactgttacaagggtcattcagcgcctgtcactgctctggctgatagattgcttatggatggtgaatctaaactgcttgcaagtggagggtaccaatccaccttccctacccgtccagctgctcgatgcctctgaaattgatggagcgatacctagcacgcggtgcatgttgttctgaagattctgctgctgttggttgccattcaccctgacagtattgccagtggcaccgtcaactatttcttccctctccgcccgagcctgcagatgaatgtttgacggcacttctcgcctactgtcctcactggtgtttccaaagtctgcagtgagttcggtctcagctctaattaacgaggaagtcatgctaggcaccctctggtcttctcgtctccaaccaaccactaccggcgtgtggatgatagcaggttatctgttgcgtggcataaatcgtccctgttggtgagctgttccaaagactcaaaggttaaagtttgggacacagtggctccttcgagtggttcatcaccatgtgtaggcagtgctcacctcaactcaaacaggccaccaattgctatgaaatgccatgaatccctttgctatattgctgctggagctcaagtgacagcgattgacttgaggacaatgaagaaggcttctgtccttgcactccagaaccacagaatactttcttacggatacgtcaatggctgtgcagtccaaaaaaatgaagagaagggaatttgacattgtcgttcaagcttcaacattgatcacttattggttttcaggaagtctttctgaatgtcagttgctataggattatttgaacaacatctcttccaatggtgatatattttatgatgctcagaatgatttcttgacacctgaatgggacagtgagaatttacaagtggtactgatgattctatccatgttcaaatcatcaagatagtcatcaggttccttcagtaattcaaaccatcactaatcccttctgacgggctatatattctatcggaccaggcacaactatccaaatttcttttctatataacaaacgcggacgtaaagttgctcaaccacgctgtccacgtcgctcctccgtttcccagccattggatcggcaaccaacgacacaagagaattccgtgcgattgtttcttaacgtgaagtttctggacagcgccggacagatagagagaatagaagaatatacacatcttcttcctctcgcttccaaaggtgatgccttccacggagaggagatcgtgcgaccatgatggcagcgactcttgattttgcccatcttcccacgctcaaacggataacagtctccttccttctgtctcttccaatcgtctcttcctagttccataacactctcacaacacgctagcaggacactcattctctcaatcggctcttcccgctgcgctacacgccaccaagagcctccccaactcctccccgtcaaacggcgccgcgtcgcaaggagcacaaccaccccccgtctccttcctcagacgctgtcgcgtttctcgcgcgggttattgcccacggaagcttaaatacttggtgctgaactgctgaagtatgatgtctcactgaaaaacaacgagatggcaatgagaagtgttcaggaagaggggtaatatttactcagagcagcaaaggaaggtcgccccaccaagctgccatgatattcctccacttaccagtgtttcaaattccaatgacatcaggttgaagaaaggaacttcacacatgaaaagagacgatccggacgaccatgaagattaaacgttgctgttaagaaaagccatattttctgtattgcttctaagctgttttatggcctttaaaccaatacttttgcttggcatatatgtagctataactattgtaatataatctctgagcttctcatgctgctattcaacatatcattactcctaccaatatatgtacagtttcagttgacttgcttgctttccgttcttgccttatcaagc

SEQ ID NO: 220951 - DNA, 355 bp, Zea Mays
cagggcaagggttatatgggctgacaaaaccctggaaaaggaagtgctgattcaataggggcatgccaaaaattgaaggtagacctccaagcagcattcaatgtactgccgaaggacttgcagcaactcctgctctccaaccctaaaagagctgttcttcttcaaggtagtcaagagaaggccctgggtgccaatggcattggcacccagacaagtttgtagcagccccctctgtaacattaccattgtcactattttttgcacacataatacaaagttacacatttatatacacccacgtttgtcagatctgtctctttccttcgttcttcctctattaattttccataataac

SEQ ID NO: 220952 - DNA, 2009 bp, Zea Mays
gcaacgctcacacccacacccaccacgccggctgcaggcacgcaccacggtaccagccgccagcgcacgcccgccaagccgccagcgagaaaacaccgaaccattcgccctcccggccgacatcacgaccgcccgatccggccggagcctctccctaccccttccgcgcctccgcgctgacgaccgtcgcggcgtccgcccctcgagtccaaccccaattctgccgtggccgcggctctctgaatccccaattttttcacttcccccaagggccgcggggatgaaccggatcccgtccgtctcgctgcggggcggcggggcgaacgaggacgccgcggcggcgtcgccgccccccgatcccgcggcgctgtcgcggtgggtgcgggccttctgtgtcatccggttcgacctggagcgcgggcagctggtggaggcctgcttccctcccgacgcgctgacggcgcccggcagcggcctcgaccgcctcgtcgccttctcgtccttcccggactccatgtctcaccacctcccgcgccaccgctcctccgtccacgactcgctcttctccttccgcatccccgacccgtcctccccacgccgcgccttcctctacggcttcgttttcaaccgccagcgccaggacgagcgcctcccccgcggcggcgagcagaagtccgtagtcatcctctcccacgccccctactcctcgctcttccgcctgctgctgcagatcctcggcccgctctgctttgacgtcggcccttccgcactggccatggtggcgtcgcacgttgccgtgtggccggcgccggcgccagggcacccaatggagcttccaattggcagtgccgcgctgcgcgtgcacctcccgcctgcggctgacgatcctggcccaccgcctgcgctgctgcccgccaacccctcggtgccgtacggactcttccatgatgctgatctgtttgccgcattccgtggcttactcctccacctatggaccctctgggagctcatggtggttggtgagcccattctggttgttgcgccgtccccagctcagtgctcagaggctgtgtctgcgcttgttagccttgttgctccgcttttgtatagtgtcgacttcaggccatacttcaccatccatgatcccgattttgctcgcttgaatgtgcttgcggaaggcgaggtgttcccgccgatggtacttggagtgaccaacttgtttttcttgaagagtcttaagagcattcccaatgtcgtatccgtgggaagcccaaatccatattcaacaagggtgttaccagtgggtggccaatcgccaggaaatggaatgaatgggacacctgggaaactcaagcttgagaaacttgcaatcaataagttctctccaactagcctattgaattccatcaaattgagaagagaaggtcctctttctctcatgacagagcacaaagaagcattatggagcacgtattcaccaaccacaaagcccgatacttctgttctaaataggctcattgacgctggtgtgtcaccaaggattgaggagtccatgtcagtagtcaacaatgagatattgcggcggcacttcttggagttgacgaccaacttccttgcgccttttgggccgtatctgagaactacaacaccatcagaagggacttcaccttttgttgacccaccattgctaccaccgtttcatgcagatgagttcatcaatggtttggcagctagaggtccagggaagtttttgtccaaaaggatgaggtccaattggttggacctatataggagatttctcgaaggccccaattttatgccttggttccggcaaaggcgtgctgctgcggagcaagaacagcagaggctctggaggcaggctcgcatgaatgttgacattgaaaagctaatgtcaaatatgtccgaaatagagaggattgattcttttgatgctgttgagcgttatcttctcagagagatggagaatttgaaggcaaaggaatatgttg

SEQ ID NO: 220953 - DNA, 3691 bp, Zea Mays
tattgttgtgattcatcgtaatattatattcataacgagatagcataatcctcgctcccgcacaaatgcacaattccatcccggccatggcagtctcctccccgccgcctcctcgattgcacctctccctccatcttcgaaagcctatccagaactcgccgcctagcggcaaaaaggcacgccccgctccgacagccgagacgctccgccgccggttcctccgccggggcgtctcgccgacccccaagatcctccacaccctccgcaagaaggaggcgcttaaggccctccgccgcgcaaggaaggacacggccgcagccgctactgcgtcacgcaatccgtgcgacgaggaggagacccgcttccgtgcggccgccgcggagtaccacgcgctcgcgggacggccatgggacgccggcacccgcggcatggcgcccccgcgcggtttggacggggaggagggcgggctcgagggcctgagggagatgctcgcggcgaggaggggcgacgggttccgttggctactggatgacgacatcgaggctgaggcagcggagaggaagcaacagaggcgtccgggcgccggctgggatgtggggaccgaggacgaggagaggaggattcagttgctagtcagcagaacatccatccaactggtattggagtcaaatgatccaaccttgccgcagcctgaagatcgaatatctggtgtcgagaagggcttggctgggttacaaccaaattgcgggccaccatggaacaaaaagaggttaaacggagattacctaagttttcgtgattggaggcttactagagtgatgaaaagggctgacatcatatatagtgaagataatctactgagaatactagatgggcttgaggcacgaggaaactggaggcaggctttatctattattgagtgggtgtacaatgaaaatagctataggcatcggaaaagcaggtttgtgtatacaaaattactctcaatccttgggaaatcattaagagcaactgaagcacttcacattttcaccatcatgcggggagatgctcaaatataccctgatatgcctgcataccattgtattgctgttactcttggtcgagctggtcttctgaaggagttaatcaagattattgagtatatgagacagaagccctcaaaactagtaatgaagatgcggcgcaaggattgggatccttcattggagcctgatgtacttgtttataactcggtgctcaatgcatgtgttctgtcacagcagtggaaaggtgtattttgggtgttccagcaaatgagaattggtggtttaccacctacaggagcaacatatgggttggccatggaagttatgttgaaagccaagaagtatgactttgtccagaagttctatgagaagatgcagaaaaatggcgtaccaccaagagcaataacttacaaagtgcttgtaagatctttttgggagcaggataaaattaatgaagctgttgaagcagtcaatgacatggaacaaagaggagttgttggagcagcaagtgtttactatgaattagcttgctgtctctgcaataatggaaggtggagagatgctatgttacaggttgagaagctgaaacagcttcccctcacgaaaccactggagtacgcatttactggaatgatcttagcctcatttaatggtggatatatctatgattgcatctcaatatttgaattaatgaaggaccactgcatgccaaatattgggactgtgaatgtcatgttaaaagtttatggacattgtgatatgtttgggaaggcaaaggacttgtttgaaaccaccaaggcttgtttcttaaattctcagacatatatccacgagcattcgtcattcaaagcagacacatatacatacaactctatgcttgaagcatctgcctctgcccaacagtgggaatacttcgaatatgtgtatagagagatggctctgtctcatcactgtctagatcaaagcaaatattcatggttgctcatcaaggcatgcagagctggaaagccatatttgctggagcatgcacttgactcgatacttgaaagaggagagatccctgatgtacagttgattactgaatcgatatgccagtctattgctcatagagattatggaaggacgctgcagctcttgaatattatgacccaggcctcaataaaaattaaagaagtcgagtgggattacctactacagcaaaatatgcatcaattcagcattgatgccctcgagggccttataaagtatctcagtactaatggtactaccaatgctgatcctgcagttgatttagtaagagcactgcagtcccaatgccgggacgataccagtactcaacagtttgaactctcttttcatggaagtggaaacaaatattcatgtagcagtctggcagaactagatcagctcacttgcaagaacttgtgcactgatataattcttgacgtccctggttctgatagagagatgcctcagttaggtgtcagtgctctcatgtgcagggacatctcattaaacggtcaacgagtggaaaacaaacatgagctttctgatcttgggcagaggggtccacaggtatctgcaattgacaaagtacttgattccatgaattcttatggtgacaattcgtatggggagatgccatcagcttcaaaaattcttgagctgtgggagcatgagaggtaaatgacatgtttgctccaaaaacagaaaattagaggataaatgaaatgctagcagatattatttgatatatgggcagtgcaatccttgtataaattactgacaaatgctgtaaatttgaaggcccctaagttggttcgtgggatctctgctgcaatcgtgttgcctaaaattattatcagaaggctcttatttgtgtgatctcattgtccatactacggaaaaaacagggaatatatagaagctctgagctcttggaagataaatttatgcattgacactgtttctctatttatagcgtctctcaaccctcacccaaccaccatctccatcgccaatgcatgggtctgggggcttttctgcgatcagcacctccttataaggacgacgtgatccactgctagccaaagaagcagcagatgaagtgttaaggccttcgtcttcacaccatcgctgatacttcaagcgacatccaagaaaagcattagatgggtggtgggggaaggaggagaggaggccaacgccgggagacaaagggtggttactgacgacattggaagaaggaccggcgtgaggctatagggtggaggagtagaggcatcgacctaagggaggccaaggggcatgagcggaagggacatctagctaaccttacattcagttgttggacatctaactattacactgtataacgcgtgcatatacatgtatccttatacaccctcgaaaaactatggcatcaaatctcaagatcaacaaaattatcataagcacctccatcgacagacatatcacttactggaagatgtcatcaacttttaaaataaatctggaaaatacaatcacccgtgcctaattgaggttaaacggtatgcaaattccacaagagtgttacgcccctagccaccggctcgagttcgccgagacgtgagcaaccagtgccgactccgagacgacgctttcagactgccagctgatgg

SEQ ID NO: 220954 - DNA, 1988 bp, Zea Mays
cacaattccatcccggccatggcagtctcctccccgccgcctcctcgattgcacctctccctccatcttcgaaagcctatccagaactcgccgcctagcggcaaaaaggcacgccccgctccgacagccgagacgctccgccgccggttcctccgccggggcgtctcgccgacccccaagatcctccacaccctccgcaagaaggaggcgcttaaggccctccgccgcgcaaggaaggacacggccgcagccgctactgcgtcacgcaatccgtgcgacgaggaggagacccgcttccgtgcggccgccgcggagtaccacgcgctcgcgggacggccatgggacgccggcacccgcggcatggcgcccccgcgcggtttggacggggaggagggcgggctcgagggcctgagggagatgctcgcggcgaggaggggcgacgggttccgttggctactggatgacgacatcgaggctgaggcagcggagaggaagcaacagaggcgtccgggcgccggctgggatgtggggaccgaggacgaggagaggaggattcagttgctagtcagcagcctgaagatcgaatatctggtgtcgagaagggcttggctgggttacaaccaaattgcgggccaccatggaacaaaaagaggttaaacggagattacctaagttttcgtgattggaggcttactagagtgatgaaaagggctgacatcatatatagtgaagataatctactgagaatactagatgggcttgaggcacgaggaaactggaggcaggctttatctattattgagtgggtgtacaatgaaaatagctataggcatcggaaaagcaggtttgtgtatacaaaattactctcaatccttgggaaatcattaagagcaactgaagcacttcacattttcaccatcatgcggggagatgctcaaatataccctgatatgcctgcataccattgtattgctgttactcttggtcgagctggtcttctgaaggagttaatcaagattattgagtatatgagacagaagccctcaaaactagtaatgaagatgcggcgcaaggattgggatccttcattggagcctgatgtacttgtttataactcggtgctcaatgcatgtgttctgtcacagcagtggaaaggtgtattttgggtgttccagcaaatgagaattggtggtttaccacctacaggagcaacatatgggttggccatggaagttatgttgaaagccaagaagtatgactttgtccagaagttctatgagaagatgcagaaaaatggcgtaccaccaagagcaataacttacaaagtgcttgtaagatctttttgggagcaggataaaattaatgaagctgttgaagcagtcaatgacatggaacaaagaggagttgttggagcagcaagtgtttactatgaattagcttgctgtctctgcaataatggaaggtggagagatgctatgttacaggttgagaagctgaaacagcttcccctcacgaaaccactggagtacgcatttactggaatgatcttagcctcatttaatggtggatatatctatgattgcatctcaatatttgaattaatgaaggaccactgcatgccaaatattgggactgtgaatgtcatgttaaaagtttatggacattgtgatatgtttgggaaggcaaaggacttgtttgaaaccaccaaggcttgtttcttaaattctcagacatatatccacgagcattcgtcattcaaagcagacacatatacatacaactctatgcttgaagcatctgcctctgcccaacagtgggaatacttcgaatatgtgtatagagagatggctctgtctcatcactgtctagatcaaagcaaatattcatggttgctcatcaaggcatgcagagctggaaaggttcgtgtccgtgctttgccacagaaataaaaaaaactgtatgaaacatagatacggaactacaaacat

SEQ ID NO: 220955 - DNA, 1916 bp, Zea Mays
cacaaatgcacaattccatcccggccatggcagtctcctccccgccgcctcctcgattgcacctctccctccatcttcgaaagcctatccagaactcgccgcctagcggcaaaaaggcacgccccgctccgacagccgagacgctccgccgccggttcctccgccggggcgtctcgccgacccccaagatcctccacaccctccgcaagaaggaggcgcttaaggccctccgccgcgcaaggaaggacacggccgcagccgctactgcgtcacgcaatccgtgcgacgaggaggagacccgcttccgtgcggccgccgcggagtaccacgcgctcgcgggacggccatgggacgccggcacccgcggcatggcgcccccgcgcggtttggacggggaggagggcgggctcgagggcctgagggagatgctcgcggcgaggaggggcgacgggttccgttggctactggatgacgacatcgaggctgaggcagcggagaggaagcaacagaggcgtccgggcgccggctgggatgtggggaccgaggacgaggagaggaggattcagttgctagtcagcaggttaaacggagattacctaagttttcgtgattggaggcttactagagtgatgaaaagggctgacatcatatatagtgaagataatctactgagaatactagatgggcttgaggcacgaggaaactggaggcaggctttatctattattgagtgggtgtacaatgaaaatagctataggcatcggaaaagcaggtttgtgtatacaaaattactctcaatccttgggaaatcattaagagcaactgaagcacttcacattttcaccatcatgcggggagatgctcaaatataccctgatatgcctgcataccattgtattgctgttactcttggtcgagctggtcttctgaaggagttaatcaagattattgagtatatgagacagaagccctcaaaactagtaatgaagatgcggcgcaaggattgggatccttcattggagcctgatgtacttgtttataactcggtgctcaatgcatgtgttctgtcacagcagtggaaaggtgtattttgggtgttccagcaaatgagaattggtggtttaccacctacaggagcaacatatgggttggccatggaagttatgttgaaagccaagaagtatgactttgtccagaagttctatgagaagatgcagaaaaatggcgtaccaccaagagcaataacttacaaagtgcttgtaagatctttttgggagcaggataaaattaatgaagctgttgaagcagtcaatgacatggaacaaagaggagttgttggagcagcaagtgtttactatgaattagcttgctgtctctgcaataatggaaggtggagagatgctatgttacaggttgagaagctgaaacagcttcccctcacgaaaccactggagtacgcatttactggaatgatcttagcctcatttaatggtggatatatctatgattgcatctcaatatttgaattaatgaaggaccactgcatgccaaatattgggactgtgaatgtcatgttaaaagtttatggacattgtgatatgtttgggaaggcaaaggacttgtttgaaaccaccaaggcttgtttcttaaattctcagacatatatccacgagcattcgtcattcaaagcagacacatatacatacaactctatgcttgaagcatctgcctctgcccaacagtgggaatacttcgaatatgtgtatagagagatggctctgtctcatcactgtctagatcaaagcaaatattcatggttgctcatcaaggcatgcagagctggaaaggttcgtgtccgtgctttgccacagaaataaaaaaaactgtatgaaacatagatacggaactacaaacat

SEQ ID NO: 220956 - DNA, 984 bp, Zea Mays
ctcagattctccccacagccagattctcaacacagtcagatttttagaaaagctggtcaaaaaaaagctgaaccaaagtggcacaacaaccgcagccaggacggacggttgaccaaagcgcggcaggataccgtccacgcggggcgccccacgatgccgtaggcggtaggccggtgggaccgttcacacttcatccgtcagactgtcacgaggcacgacctccgtcgtccaccccaacccaccctgggtccctggccatataaaaccctcgccggtgcggtgacgtctcgtcatctcggcccacaacctcagctagtcagctccgccgcttttgctttctctctccaggctctcggcttcgtccacaagctacagccgcgcgctcctccttgacccggcctgaccccgctagttcgccgcctgccgtctgccgccccagcatggccgccgcgtcgtccgccacctccgtccacgacttcaccgtcaaggattcgagcggcaaggacgttgacctcagcgtctacagggggaaggttcttctcatcgttaacgtcgcatcccaatgtggcttaaccaactccaactacactcagcaggcccagctctatgagaagtacaagaaccaaggctttgaaatcctcgctttcccgtgcaaccagtttggtgggcaggagcctggtaccaacgaggagattgcccagtttgcctgcacacgcttcaaggctgactaccccatctttgacaaggttgatgtcaatggtaacaatgctgcgcccatctacaagtttctgaaatctagcaagggtggccttttcggcgacagcatcaagtggaacttttccaagttcttggttgacaaggaggggcgtgttgtggatcgctatgctccaaccacttcacctctgagcattgaggctataaacataaatcttcaatcaagatgacgacgaactgacgcaaaggcgaaggagagagcgacgagag

SEQ ID NO: 220957 - DNA, 2009 bp, Zea Mays
tcttgttccgctgccagtaccatgtgacaacaatgggacaggcagccacggccctgagctgctgagggagaagaaggaccagtttgaccttgtgatcagcaacgtccacatgccggacatggacggcttcaagctcctcgagcttgtgggcctcgagatggaccttccggggattacctctgcacaaaaccccattccaattgatatggttttgttactcgattatgctttggtcccagcccgccatcagtcagatttacctctgaaatgtggcatccaaatgttatgttttctgacatcatgcataatatttgaggaaatgccagtctatcctgatgggcgggtttgcatctctattcttcatccacccagtgaagatccaaacggttatgagctcgcaaagagaaaattaccttgtagtctcattgtttcagtttatggtccaatttacaatggcttcactgtaaatgggaaaacaactcgggattattatattgtttttggtttggatttggaatggtttggggtccacaacgatgatgcgtcagagctgttccaagggttggatgatttccattcccctgctgtcaatttgactaggctcgccgtctccgctctgcccaactggcaccaagcagccaatggaacttgagcatccaatggatgatttccattcccctgctgccaattctccaaactgctttgacccttcaactcaatccgcatgtacccagtaaatgttcaatctgaatttggatcattgctagcaggattctttgcttgctcttctacttctgaaaattcgcaaaatggatagataattccagttaattttaatccattacagcctgttgtggcagcaaacagcgaccgggtgcggaagccggaagggagaggcgcttggttgacccggaacggacggcaagacaccgccgggggttcactgcaaccgcacgcgtggtggccggtgtgggaaggagcccactgctcaagcagcgacgacttccgcaacttctcaggccaagttgtagggagggagggcagcaaagaaagcaagcaagaaagaagccgattccactggtggttaaggttttggattaaaggagagaggtgcagagaaaaaaaggttgcaactccctgggccaagcagtagcgcagcaagttcagcaccaatggcagccatatgaaatataaggcaaagcagataaaaagcttaattttttttcaagaaggtaaaggcaatgacagaaaagtgaggagggtcagaggtgtacagatatggatgagggctgaaaagaggagcaggaaggcatgccccatctgtgctacaagggtcggaatggacttgataggacatttgactatgcaacacggaagttatttcaagatatccttttttaactatgctgccgttgctgatcatttgcatttttacatttttcacattatactacagttgaagatacataggtgtcatggtcgggcgcacgtcacggtcatgttgaattgtaacttttctctggttcttgagccagcaacatgaccggtttaatggtgtttttgagaattctgttgattccttctaaatgttaaaattatgttcactaccaggttattagcttttgtactgcacttccacacacatacatattttttcttttttcttataccttccatgtcgtctggtccagaacttgtacactgtggggttaattatggatatggatctatgaaatattattagcatgaaaatatacatggcgtgtatggaacaaaatggactctaatgctttttcttgtgatgtaggatgcttttggcgctgagaggaggaaagctataagatgctaaatctctccattgcatacggaaaaacgtaggaagatttttgttaaggaagcaaaagatacactgaaactctggtatagcaatagaaagaaggttctggcttggcaagtgaaacagaaacagctagcacatgagaagtgtgaattttatactttgctttggc

SEQ ID NO: 220958 - DNA, 2002 bp, Zea Mays
tcgagaacctcttgttccgctgccagtaccatgtgacaacaatgggacaggcagccacggccctgagctgctgagggagaagaaggaccagtttgaccttgtgatcagcaacgtccacatgccggacatggacggcttcaagctcctcgagcttgtgggcctcgagatggaccttccggggattacctctgcacaaaaccccattccaattgatatggttttgttactcgattatgctttggtcccagcccgccatcagtcagatttacctctgaaatgtggcatccaaatgttatgttttctgacatcatgcataatatttgaggaaatgccagtctatcctgatgggcgggtttgcatctctattcttcatccacccagtgaagatccaaacggttatgagctcgcaaagagaaaattaccttgtagtctcattgtttcagtttatggtccaatttacaatggcttcactgtaaatgggaaaacaactcgggattattatattgtttttggtttggatttggaatggtttggggtccacaacgatgatgcgtcagagctgttccaagggttggatgatttccattcccctgctgtcaatttgactaggctcgccgtctccgctctgcccaactggcaccaagcagccaatggaacttgagcatccaatggatgatttccattcccctgctgccaattctccaaactgctttgacccttcaactcaatccgcatgtacccagtaaatgttcaatctgaatttggatcattgctagcaggattctttgcttgctcttctacttctgaaaattcgcaaaatggatagataattccagttaattttaatccattacagcctgttgtggcagcaaacagcgaccgggtgcggaagccggaagggagaggcgcttggttgacccggaacggacggcaagacaccgccgggggttcactgcaaccgcacgcgtggtggccggtgtgggaaggagcccactgctcaagcagcgacgacttccgcaacttctcaggccaagttgtagggagggagggcagcaaagaaagcaagcaagaaagaagccgattccactggtggttaaggttttggattaaaggagagaggttgcaactccctgggccaagcagtagcgcagcaagttcagcaccaatggcagccatatgaaatataaggcaaagcagataaaaagcttaattttttttcaagaaggtaaaggcaatgacagaaaagtgaggagggtcagaggtgtacagatatggatgagggctgaaaagaggagcaggaaggcatgccccatctgtgctacaagggtcggaatggacttgataggacatttgactatgcaacacggaagttatttcaagatatccttttttaactatgctgccgttgctgatcatttgcatttttacatttttcacattatactacagttgaagatacataggtgtcatggtcgggcgcacgtcacggtcatgttgaattgtaacttttctctggttcttgagccagcaacatgaccggtttaatggtgtttttgagaattctgttgattccttctaaatgttaaaattatgttcactaccaggttattagcttttgtactgcacttccacacacatacatattttttcttttttcttataccttccatgtcgtctggtccagaacttgtacactgtggggttaattatggatatggatctatgaaatattattagcatgaaaatatacatggcgtgtatggaacaaaatggactctaatgctttttcttgtgatgtaggatgcttttggcgctgagaggaggaaagctataagatgctaaatctctccattgcatacggaaaaacgtaggaagatttttgttaaggaagcaaaagatacactgaaactctggtatagcaatagaaagaaggttctggcttggcaagtgaaacagaaacagctagcacatgagaagtgtgaattttatactttgctttggc

SEQ ID NO: 220959 - DNA, 2651 bp, Zea Mays
ccacacaccctcccccgtgacgccctctcccatgacgctttgtgcgcgtgagtctgcgactgccgacagtcgtcgccgtactggagcccaatctgctggctccccctcgacctcaccaccatgcccccatcggaccccgtcgcgccgtgcgtggcggcgccggtgatggacgcggcgttgctagccgtcatcgtcccgcctcgacgttcgatccgtgctcaccacggttggtgctcgcacgcaatgtggcgtggcgaggttactgcgggcgtcgcggaggtggagggggaaggggaggacgagggcacgggcaagagagcgcatcgcggtggacggtctcgagggaccttgggtgatccgggtgcttggtttcttggttctgcggctttcgctgctgttggatttgccgagtcggagccaccggagatgaccgtcgacgagctgaagctgcaggcaagggccagcggcggccacggcctaaggaccagttccccgtcggcatgcgcgtgctcgccgtcgacgacgacccgacctgcctcaagtgacaacaatgggacaggcagccacggccctgagctgctgagggagaagaaggaccagtttgaccttgtgatcagcaacgtccacatgccggacatggacggcttcaagctcctcgagcttgtgggcctcgagatggaccttccggggattacctctgcacaaaaccccattccaattgatatggttttgttactcgattatgctttggtcccagcccgccatcagtcagatttacctctgaaatgtggcatccaaatgttatgttttctgacatcatgcataatatttgaggaaatgccagtctatcctgatgggcgggtttgcatctctattcttcatccacccagtgaagatccaaacggttatgagctcgcaaagagaaaattaccttgtagtctcattgtttcagtttatggtccaatttacaatggcttcactgtaaatgggaaaacaactcgggattattatattgtttttggtttggatttggaatggtttggggtccacaacgatgatgcgtcagagctgttccaagggttggatgatttccattcccctgctgtcaatttgactaggctcgccgtctccgctctgcccaactggcaccaagcagccaatggaacttgagcatccaatggatgatttccattcccctgctgccaattctccaaactgctttgacccttcaactcaatccgcatgtacccagtaaatgttcaatctgaatttggatcattgctagcaggattctttgcttgctcttctacttctgaaaattcgcaaaatggatagataattccagttaattttaatccattacagcctgttgtggcagcaaacagcgaccgggtgcggaagccggaagggagaggcgcttggttgacccggaacggacggcaagacaccgccgggggttcactgcaaccgcacgcgtggtggccggtgtgggaaggagcccactgctcaagcagcgacgacttccgcaacttctcaggccaagttgtagggagggagggcagcaaagaaagcaagcaagaaagaagccgattccactggtggttaaggttttggattaaaggagagaggtgcagagaaaaaaaggcaatcttactcttaatctctgtgtccacatcacttccgatcatgctgtgatcgacagaagtacgggtgccatggataagtgcctcctcctactcaccaaagtaataaggagcagctgctgcaggttgcaactccctgggccaagcagtagcgcagcaagttcagcaccaatggcagccatatgaaatataaggcaaagcagataaaaagcttaattttttttcaagaaggtaaaggcaatgacagaaaagtgaggagggtcagaggtgtacagatatggatgagggctgaaaagaggagcaggaaggcatgccccatctgtgctacaagggtcggaatggacttgataggacatttgactatgcaacacggaagttatttcaagatatccttttttaactatgctgccgttgctgatcatttgcatttttacatttttcacattatactacagttgaagatacataggtgtcatggtcgggcgcacgtcacggtcatgttgaattgtaacttttctctggttcttgagccagcaacatgaccggtttaatggtgtttttgagaattctgttgattccttctaaatgttaaaattatgttcactaccaggttattagcttttgtactgcacttccacacacatacatattttttcttttttcttataccttccatgtcgtctggtccagaacttgtacactgtggggttaattatggatatggatctatgaaatattattagcatgaaaatatacatggcgtgtatggaacaaaatggactctaatgctttttcttgtgatgtaggatgcttttggcgctgagaggaggaaagctataagatgctaaatctctccattgcatacggaaaaacgtaggaagatttttgttaaggaagcaaaagatacactgaaactctggtatagcaatagaaagaaggttctggcttggcaagtgaaacagaaacagctagcacatgagaagtgtgaattttatactttgctttggc

SEQ ID NO: 220960 - DNA, 1983 bp, Zea Mays
ccctaatcgagcgcgaaaggaacggaacggcgcagccgcggcggcggcggcggctcatgtaagctccccaccagcgaccagtggacacgtatatccatctcccctcgcacagtcgcaactcgcacgcatccgtcctcggcctcgttccgtccgccagcaatgccgctggcgctcgcgcaactgcaggacttgcgggaccgcatctccgaccgcctccgcccatggagccgctccgcgcagttctgggtccgcgccgcggacatctacaccagctacaaggtgtgccagctgcgcgcggggttcgtgaaggacgaggacgagctagagaccatgtgggagcggcagcacgagctcggcgcggagaagatgtactccctctgctccgagctcggcggtctcttcctcaaggctgctcaaattctgggaaaacctgacctggcaccgatggcttgggtgaagagacttgttacgctgtgtgatcaagccccatccacgccatttgatgtggttagagatgttgtggagaaacagttggggaagaacttcgatgacatgtttgaattcttcgatgtcgagcctgttgggtctgcttctattgcacaggtgcatcgagcaaggcttaaattatcaaagacagacgttgctgtcaaggttcaacatccaggagccgaacaactgatgatggttgatattcggaatatgcaagcaatggccttgtttttgcagaagcatgacctcaactttgatctattctctgccaccaaagagatggaaaaacagatatgttatgagtttgactttgtgcgtgaagcaagagcaatggaaagaatacgagaatttctacgtgtcactaataagaaacctccggttatggtgcctcgtgtgattcctgggatggttagcagagaagttttgataatggaatttatcaaggggaccccaataatgaatcttggcaatgaaatggctaaaaggggcatagatcctggtggtaagattgcagcaatggcaaagcaatccacacccaggaaacatccttatctgcaaggacacagaggtggctttacttgattatggacaagtgaaagaaatgccagaagatttacggctggcttatgcaaatcttgtagttgcaatggccgatgatgatttctcgagggctgaggaaagtttcagggagctgggtatccgaacatgggccataactgataacaaactagaagaattgtttcagttatccctgcgaatgttcgatacaagattaccaccaggtgtaactgttatgtcaccttttgccgatgattcttcgcttaacaaaattggagtggagagcttcccggaggagctattttcagtgcttcgaacaatccagcttttgcgagggttgactgtgggcatgggccttacattctcgtgcgcccagcattggagaccgatagctgaggaggcgttgttaaaagctggaagacaaagcgcttcaaaatcaagaaaacagaagaggagttttctgaggagattgttttggtgaagtaggcatttagccgcatagcgaacatcaaaggacatggtatacgaacattctgtgatgaaacggaagtagccaaaagctcgagccttcgatttttagacagtacatctgtccatattcgtttaccttgggtgcgtgttattttatatatttgctcattcctttatcactatgtgttttttgggattcagtatatagttgggattgtatcggaagctgacatgtacacaagtgacatggaccaattcaaaggaaatcatcgtggtatgtgggggtttgttctgtggactttttttgtttctgatgtgaggggttgcagcaccactggtttgaagccgccatgcaaagaattcttttcccccaaaaaactgagccctcgtatatttttagcttacctagacgaaaatcggaccaatccttgtggtctgtttatcccagtcactgcaccattctta

SEQ ID NO: 220961 - DNA, 2362 bp, Zea Mays
ccctaatcgagcgcgaaaggaacggaacggcgcagccgcggcggcggcggcggctcatgtaagctccccaccagcgaccagtggacacgtatatccatctcccctcgcacagtcgcaactcgcacgcatccgtcctcggcctcgttccgtccgccagcaatgccgctggcgctcgcgcaactgcaggacttgcgggaccgcatctccgaccgcctccgcccatggagccgctccgcgcagttctgggtccgcgccgcggacatctacaccagctacaaggtgtgccagctgcgcgcggggttcgtgaaggacgaggacgagctagagaccatgtgggagcggcagcacgagctcggcgcggagaagatgtactccctctgctccgagctcggcggtctcttcctcaaggctgctcaaattctgggaaaacctgacctggcaccgatggcttgggtgaagagacttgttacgctgtgtgatcaagccccatccacgccatttgatgtggttagagatgttgtggagaaacagttggggaagaacttcgatgacatgtttgaattcttcgatgtcgagcctgttgggtctgcttctattgcacaggtgcatcgagcaaggcttaaattatcaaagacagacgttgctgtcaaggagccgaacaactgatgatggttgatattcggaatatgcaagcaatggccttgtttttgcagaagcatgacctcaactttgatctattctctgccaccaaagagatggaaaaacagatatgttatgagtttgactttgtgcgtgaagcaagagcaatggaaagaatacgagaatttctacgtgtcactaataagaaacctccggttatggtgcctcgtgtgattcctgggatggttagcagagaagttttgataatggaatttatcaaggggaccccaataatgaatcttggcaatgaaatggctaaaaggggcatagatcctggtggtaagattgcagcaatggcaaagcagtaagctccttcgtctcaaaagagtacgattctcatttgcttagtttacagaaccttgtgctagttctaaggatcaatgttattggatgaatataaatatatgataaaatttcatgccactcagtttagtcactattgacagaccttgaaaagcaattagttttttttatcaaacatgcaggagagcagcaaagttatcaaactgcgtctggtgcagtgttgtgagttctctgattcaccaggtcagaggttcgaagcaacctcttcgcatttgcgggaagatgacttaccttggttcatcccttctctagaccccactcatgtgaagattttgtcagatcttactcttgcatatggtcaaatgatcttgaaggatggctttttccatgcagatccacacccaggaaacatccttatctgcaaggacacagaggtggctttacttgattatggacaagtgaaagaaatgccagaagatttacggctggcttatgcaaatcttgtagttgcaatggccgatgatgatttctcgagggctgaggaaagtttcagggagctgggtatccgaacatgggccataactgataacaaactagaagaattgtttcagttatccctgcgaatgttcgatacaagattaccaccaggtgtaactgttatgtcaccttttgccgatgattcttcgcttaacaaaattggagtggagagcttcccggaggagctattttcagtgcttcgaacaatccagcttttgcgagggttgactgtgggcatgggccttacattctcgtgcgcccagcattggagaccgatagctgaggaggcgttgttaaaagctggaagacaaagcgcttcaaaatcaagaaaacagaagaggagttttctgaggagattgttttggtgaagtaggcatttagccgcatagcgaacatcaaaggacatggtatacgaacattctgtgatgaaacggaagtagccaaaagctcgagccttcgatttttagacagtacatctgtccatattcgtttaccttgggtgcgtgttattttatatatttgctcattcctttatcactatgtgttttttgggattcagtatatagttgggattgtatcggaagctgacatgtacacaagtgacatggaccaattcaaaggaaatcatcgtggtatgtgggggtttgttctgtggactttttttgtttctgatgtgaggggttgcagcaccactggtttgaagccgccatgcaaagaattcttttcccccaaaaaactgagccctcgtatatttttagcttacctagacgaaaatcggaccaatccttgtggtctgtttatcccagtcactgcaccattctta

SEQ ID NO: 220962 - DNA, 1083 bp, Zea Mays
ttatcaaactgcgtctggtgcagtgttgtgagttctctgattcaccaggaagattttgtcagatcttactcttgcatatggtcaaatgatcttgaaggatggctttttccatgcagatccacacccaggaaacatccttatctgcaaggacacagaggtggctttacttgattatggacaagtgaaagaaatgccagaagatttacggctggcttatgcaaatcttgtagttgcaatggccgatgatgatttctcgagggctgaggaaagtttcagggagctgggtatccgaacatgggccataactgataacaaactagaagaattgtttcagttatccctgcgaatgttcgatacaagattaccaccaggtgtaactgttatgtcaccttttgccgatgattcttcgcttaacaaaattggagtggagagcttcccggaggagctattttcagtgcttcgaacaatccagcttttgcgagggttgactgtgggcatgggccttacattctcgtgcgcccagcattggagaccgatagctgaggaggcgttgttaaaagctggaagacaaagcgcttcaaaatcaagaaaacagaagaggagttttctgaggagattgttttggtgaagtaggcatttagccgcatagcgaacatcaaaggacatggtatacgaacattctgtgatgaaacggaagtagccaaaagctcgagccttcgatttttagacagtacatctgtccatattcgtttaccttgggtgcgtgttattttatatatttgctcattcctttatcactatgtgttttttgggattcagtatatagttgggattgtatcggaagctgacatgtacacaagtgacatggaccaattcaaaggaaatcatcgtggtatgtgggggtttgttctgtggactttttttgtttctgatgtgaggggttgcagcaccactggtttgaagccgccatgcaaagaattcttttcccccaaaaaactgagccctcgtatatttttagcttacctagacgaaaatcggaccaatccttgtggtctgtttatcccagtcactgcaccattctta

SEQ ID NO: 220963 - DNA, 1045 bp, Zea Mays
gttgtgagttctctgattcaccagatcttactcttgcatatggtcaaatgatcttgaaggatggctttttccatgcagatccacacccaggaaacatccttatctgcaaggacacagaggtggctttacttgattatggacaagtgaaagaaatgccagaagatttacggctggcttatgcaaatcttgtagttgcaatggccgatgatgatttctcgagggctgaggaaagtttcagggagctgggtatccgaacatgggccataactgataacaaactagaagaattgtttcagttatccctgcgaatgttcgatacaagattaccaccaggtgtaactgttatgtcaccttttgccgatgattcttcgcttaacaaaattggagtggagagcttcccggaggagctattttcagtgcttcgaacaatccagcttttgcgagggttgactgtgggcatgggccttacattctcgtgcgcccagcattggagaccgatagctgaggaggcgttgttaaaagctggaagacaaagcgcttcaaaatcaagaaaacagaagaggagttttctgaggagattgttttggtgaagtaggcatttagccgcatagcgaacatcaaaggacatggtatacgaacattctgtgatgaaacggaagtagccaaaagctcgagccttcgatttttagacagtacatctgtccatattcgtttaccttgggtgcgtgttattttatatatttgctcattcctttatcactatgtgttttttgggattcagtatatagttgggattgtatcggaagctgacatgtacacaagtgacatggaccaattcaaaggaaatcatcgtggtatgtgggggtttgttctgtggactttttttgtttctgatgtgaggggttgcagcaccactggtttgaagccgccatgcaaagaattcttttcccccaaaaaactgagccctcgtatatttttagcttacctagacgaaaatcggaccaatccttgtggtctgtttatcccagtcactgcaccattctta

SEQ ID NO: 220964 - DNA, 1004 bp, Zea Mays
tactagaaacgtatttccttagacgacgacaaggcccagatgagcagaagcttttggaagccgccatggcgtatgtctcgggcaaccccatcatgacggatgatgaattcgatcaactaaagctgagactaaaggtctacagtgacttgactgttgactacttgaagatgttgctcctaaatgttcccgcagctgttgtagctctggcactattcttctttttggatgatttcacgggatttgaaatcacatatcttcttgagttgccggagcctttcagtttcatcttcacatggttcgccgcactgcctttaatattttgggtagcgcaggcgatcactaatgtcatagtgaaggacttcctgatcttgaagggtccgtgtccaaactgcgggaatgaaaacctctccttcttcggtaccatactgtcagtgcctagcggtggctcaaaaaacagcgtgaaatgtgcaagttgtggcactgagttggagtacgactcttcaacccgattgatcacactcccagaaccggctgaggctaaataagtgatggcgtggtttcggtgagtcatcatcctgctaatccatcaattaattaatgcatgatggtagaccaaagctacagtgttcttactgcatggatgttcctagatttcgctagcaggaaagacggcccggccggcccgcagattcttgatcgacgacagtacgaagcaagactgttcttggatcgggtggcaatcgtggagtgatgtatgtttgctgtgctagtctgtgtgtatatatatttgaacaagtttagacacctgtattatatagatctaatgaaatgggtatatgtatgtgcatagagtgtacaaagaaaaatttaataagccgagttattgtatgttttttctcctcctatatattgctgttacctagtcggctactacaaacaatgagggataaacaagcaaataaacaacgatttctcgatggaaacccacattttttgtgtgtgtg

SEQ ID NO: 220965 - DNA, 1445 bp, Zea Mays
gaaaaagtatctctctctcccgcgcgcgcgggtgagccggggaccctcctacgtctcgccaccctgctggtatagcccgccggtcgtccacgccatggccacccaatatgcgcggctctccctgccatgccgcctgccctcgccgctccctccgccggtgccgacgacgacccgccggctgccgcgcgccgcggcggcggcggcgtccacctccccgcggtgcccacgcgtcgggggcgcggcggccacgcgcgcccgcggcccgtgccggcctcgcgcctccgagggcgaagtgcagcagcaggaggcggaagcggaccaggtggtggacagcaacatgctgccctactgcagcatcaaccgcaaggagaagaagagcatcggggagatggagcaggagttcctccaggcgatgcaggccttctactacgaaggcaaggcgatcatgtcgaacgaggagttcgacaacctcaaggaggagctcatgtgggaagggagcagcgtcgtgatgctaagcccagatgagcagaagcttttggaagccgccatggcgtatgtctcgggcaaccccatcatgacggatgatgaattcgatcaactaaagctgagactaaagaaagaaggaagcgacattgtacaggaaggtccaagatgcagcctacggagtcgaaaggtctacagtgacttgactgttgactacttgaagatgttgctcctaaatgttcccgcagctgttgtagctctggcactattcttctttttggatgatttcacgggatttgaaatcacatatcttcttgagttgccggagcctttcagtttcatcttcacatggttcgccgcactgcctttaatattttgggtagcgcaggcgatcactaatgtcatagtgaaggacttcctgatcttgaagggtccgtgtccaaactgcgggaatgaaaacctctccttcttcggtaccatactgtcagtgcctagcggtggctcaaaaaacagcgtgaaatgtgcaagttgtggcactgagttggagtacgactcttcaacccgattgatcacactcccagaaccggctgaggctaaataagtgatggcgtggtttcgcaggaaagacggcccggccggcccgcagattcttgatcgacgacagtacgaagcaagactgttcttggatcgggtggcaatcgtggagtgatgtatgtttgctgtgctagtctgtgtgtatatatatttgaacaagtttagacacctgtattatatagatctaatgaaatgggtatatgtatgtgcatagagtgtacaaagaaaaatttaataagccgagttattgtatgttttttctcctcctatatattgctgttacctagtcggctactacaaacaatgagggataaacaagcaaataaacaacgatttctcgatggaaacccacattttttgtgtgtgtg

SEQ ID NO: 220966 - DNA, 691 bp, Zea Mays
aacatggttccttggtgttgcgggtgtgctccagccccaagtgtccgagtctttccggcgaagggtttcggacagagaagatggcgacggcggcggcagggttggctccggcaaaggaggtggtggagaagaaggtggaactcctgaaggagatacgggcgcacgaggtggcgatcgcggagctagacaacctgaatccctcccgagtcagcctcttcccctctgtctccctcccttgcttgcggtttgtgtcaggcggtgtaccagaaagctggcaacatcttcttccgtaagagcgtcaaatcggtgatcacaacggagcagaagcaacttgaccaagccaaggctcggctgagcaagctgaaccaagcttgatgggcagcacgctacaaatgttgaccttgaacaaaatagagcatgcagatttgaatggacttctcgttgctcattaattctgcagttgggcgttgtggacataatccatgtgtaatgctactttctttttcatgagatgtatggctagtgtggtcgtgaagtttggttaagccttttgagcccgattcagtgttaaaaatctagaatttcaactaaaggagtacatgagctgaatagatttctaaaaatctatggatttctctagtttaatctcaaatctcttcttaccctacgtcttttagatttctgtcatcca

SEQ ID NO: 220967 - DNA, 680 bp, Zea Mays
aacatggttccttggtgttgcgggtgtgctccagccccaagtgtccgagtctttccggcgaagggtttcggacagagaagatggcgacggcggcggcagggttggctccggcaaaggaggtggtggagaagaaggtggaactcctgaaggagatacgggcgcacgaggtggcgatcgcggagctagacaacctgaatccctcccgagtcagcctcttcccctctgtctccctcccttgcttgcggcggtgtaccagaaagctggcaacatcttcttccgtaagagcgtcaaatcggtgatcacaacggagcagaagcaacttgaccaagccaaggctcggctgagcaagctgaaccaagcttgatgggcagcacgctacaaatgttgaccttgaacaaaatagagcatgcagatttgaatggacttctcgttgctcattaattctgcagttgggcgttgtggacataatccatgtgtaatgctactttctttttcatgagatgtatggctagtgtggtcgtgaagtttggttaagccttttgagcccgattcagtgttaaaaatctagaatttcaactaaaggagtacatgagctgaatagatttctaaaaatctatggatttctctagtttaatctcaaatctcttcttaccctacgtcttttagatttctgtcatcca

SEQ ID NO: 220968 - DNA, 633 bp, Zea Mays
ctagatgggcctcccatgtgactagtagctgactggatgggcctcaacatggttccttggtgttgcgggtgtgctccagccccaagtgtccgagtctttccggcgaagggtttcggacagagaagatggcgacggcggcggcagggttggctccggcaaaggaggtggtggagaagaaggtggaactcctgaaggaggcggtgtaccagaaagctggcaacatcttcttccgtaagagcgtcaaatcggtgatcacaacggagcagaagcaacttgaccaagccaaggctcggctgagcaagctgaaccaagcttgatgggcagcacgctacaaatgttgaccttgaacaaaatagagcatgcagatttgaatggacttctcgttgctcattaattctgcagttgggcgttgtggacataatccatgtgtaatgctactttctttttcatgagatgtatggctagtgtggtcgtgaagtttggttaagccttttgagcccgattcagtgttaaaaatctagaatttcaactaaaggagtacatgagctgaatagatttctaaaaatctatggatttctctagtttaatctcaaatctcttcttaccctacgtcttttagatttctgtcatcca

SEQ ID NO: 220969 - DNA, 2004 bp, Zea Mays
agccgctagggctgcattcatccacctcgtgcttatcgcctaccccaactccgactcctgctcgtctcgtcgctcgccgctcgccgcctcgtccagctctctccgcccctccggactagcctagcccctcccgctcaccgcgtcgtctccagaatctggcctacgaccgttgacggctggtgccccctccggcgatcggtggtcatggtccgtccttgctcaccccgttcggatccgctatgcgcgagcctccccttccctaatcacgcgcccccctgccccagcgatccgcagctgccgccccctgtcccaccgatccgcggctgccgcctcctccttcccctaatcacgccccccggtcccgttgatccatagttgtcgcctcccccaacccctaatcacgcgcgtctcgctcccgccgatccgcggatcggctctgctccaaccctcctccgtccctgagatgcaagcgagcaccacgggggatttctcccttgaggtgttgcctgagaggtgctgctgaccgagtagcatcattgaagagttactgtcgagcacttggattatgtgatcgatgtgcagagaagtggttccaagggcacaagtgtgccaacacggtgcaacttcacaccattgaggaagtctaggatttgctcaccttggatgaagctacagtggaagtcattgaaccaacagaggaactgatgatggttgtcgtatccctgtctaatgcggcatggtccggatctgacacaatatcaaccatgagattacaggtcgtcgaccactattgtttggagtccaagaattgacaacactaattacagtttaggttgctaatggccaagttattacctgctcacaccaccttccagcagctcaatggaccatcggtatagcccgatgagagtggattggacaaacatgtggatggttatttcttaccaggaaaatactatctaccttcagggtatcaggtcttccttactagtgggaatggtggtggaattattgttactatctgaaacatcattatccacatctaactctagcatagcagctgttgcagtggattccagagtgcaagctgtactcgacagttatcctagcattttcatcgatccagtgggactcctaccaacccgcccgtgtgatcattcaatttcattgatccccggtgcccagctgttccacataaggccataccgttaccctccaaccctcaaagatgaaattgaaactcaagttaaggaaatgctatcccagggggtgatacgaaagagcagcagcccctttgcatctccaattctcttgtcaaaaagaaagaccactcatggcgattctgtgtagattaccgttatttgaatgccacgacggtgaagagtaaataccctatgctgatattcgatcagttctttgtgctcaggcactaggcatgtagaggtattttttgttgttattttctctttatgtggatgtggttacaaggctgttgacaaaatattactactccatcgtcctccctctcacccataagatatttgatatattactttgtccagtcgatgcagcttacaaggctgttgacaaaataatccaggtttgttggcacacttttaatctttcttgtacgggtacactacttctaacaatggaatatgaatgttgttttttgcgcaaaagttgcctggcttttagcatcgtttgatgggtgaggacacacatcgcctccaaatactagaacgctagggatatttgttctctcaaataaagctttacctgttatattatataatacttccgtaagaagagctgttagtggctggagtgaatagaatttggttggtcagtgcctccaagttgttttataggactttcatatttggtcggtgccagattgggtgaataagctctctatgaggtttctgaaagttgacaggaaaacagttgatcttgtcggtaatgagaaactgaaggccagtgcatctgttaagcaccttgctc

SEQ ID NO: 220970 - DNA, 2829 bp, Zea Mays
ctgagaacttggagctcaagaaactagattcacaagacccaaacccattgattcgtgctttggctgttaggacaatgggttgtatccgcgtggacaaaatcacagagtatctctgtgatccacttcaaagatgcctcaaggatgacgatccgtatgtacggaagactgcagctatttgcgttgctaaactttatgatataaacgctgagctagtagaggacagaggatttctggaggcccttaaggacttaatatctgacaataatcctatggttgttgcaaatgctgttgctgctctggcagagattcaagatagtagtgttcagccaatctttgaaatcaccagccatacactgtcaaagcttctgacagctttgaatgaatgcacagagtggggccaagttttcattttggattctttgtcaagatataaagcagcagatgccagggaagctgaaaacatagtggaacgagttacaccccgtctccaacatgcaaattgtgcggttgttctttctgctgtcaagataatccttctacaaatggagctcattacgagcacggatgtagtcaggaatctctgcaagaaaatggctccccctcttgttactcttttgtcagcagagcctgaaattcagtatgtagccttgaggaacattaatctgatagttcaaaagaggcctacaatactcgctcatgagattaaggttttcttttgcaagtacaatgaccctatatatgttaagatggaaaagctggagattatgataaagcttgcctcagatcgaaatatagatcaggtgctcttggaattcaaggagtatgccacagaggttgatgttgattttgtgcggaaagctgttcgtgcgattgggagatgtgcaattaaattggagagagctgctgaaaggtgcatcagcgttttgctcgagctgattaagataaaagttaattatgttgttcaggaagctataattgttatcaaagacatcttcagacgctaccctaatacgtatgagtctatcattgctacactttgtgaaagtctggacactttagatgaaccagaggctaaggcatccatgatttggataattggagaatatgctgaaagaattgacaatgcagatgaacttcttgagagcttcttggaaacattccctgaagaaccagcattagttcaactgcagctgctaaccgctactgttaaattgtttcttaagaagccaacagaggggccacaacagatgattcaggctgttctcaataatgcaacagttgaaacagataatcctgatttgagggacagagcttacatatattggcgacttctgtctactgatcctgaggctgcgaaagatgttgttttggcggagaaacctgtgatcagtgatgactccaaccagcttgactcatcacttcttgatgagctgctagcaaacatttctaccctttcatcagtttatcataagcccccagaatcatttgtcagccgtgttaaggctgctcctagggccgatgatgaagagtttgctgatacagctgaaacagggtactcggagtccccatcccagggtgttgatggggcatcaccttcatctagtgctggtacttcttctaatgtacccgtgaagcagctggcggttgcatccccacctgcaatgccagaccttttaggtgatttgatgggtatagataatgctattgttcctgttgatgaacctgcagcaccttccggccctccactacctgtcttactgccttcgactacaggtcaaggactgcaaattagtgcacaactaacacggcgtgatggccagatatactatgacatatcttttgagaatggcacccaaggtgtcctagatggatttatgattcagtttaacaagaacacatttggtcttgctgctggtgaagcacttcaggttactccactgcaaccaggccaatcaacaaggacacttttacaaatgaccccgttccagaatatcagccctggtgcaccaaactcgctactacaggttgctgtgaaaaataatcagcagccagtgtggtacttcaatgacaaaattccgctgcatgttttctttggtgaagatggaaaaatggaacgagctggttttcttgaggcctggaaatctttgcctgatgacaatgaatttacaaaagaattcccgggctctgtcatcagcagcatagatgctactgttgagcgcctcgtagcatcaaatgtgttcttcatagccaagcggaaaaatgcgaacatggatgttctgtatctctccgcgaagatgccccgtggaatccccttccttatagaggttacagccgtggttggtgttcctggtgtgaagtgtgcagtcaaaacaccaaatagggagatggttcctctcttctttgaagctatggaggctctcaccaagtgacgacaaacttaatggatctggatcggtggttctacaaaaaaaataccagtcgatgagctgctataggtgtttggacgtggcattttatttttcacggaagctggtgtgaattgtagtttttttggtattagattacagtatttaaactgctagtttcctggttccaaagttttttcaccagaaatactggaggtgttcatgccttgcatgatttgtacatcttaccatgttgtatgaagcgatgaaattgtaggtgacgaaaaagtagaataagcatagattaactggtacgattgtggattgttattaatttccctgcaacccaatcactattttaatggtgatgtatctatatttttcaaatggaccacaattctatctaattactacatcaaaccta

SEQ ID NO: 220971 - DNA, 2981 bp, Zea Mays
caaacggatttttccagccaaagttaaattaaaaacgggaaaaaaccacacgcctgcatctttctctctctcgtctctagacgtgcggtgcagcagctgtattcgccgcaacctcctcccatcccttgcgccagcggattccttggctgcgcggaattctcctagcctcccgagcctccccagctcgagaagggagctcacggtgacgcggcgcgaagggccgggtcagatcttggccgttggccccgaggcggcggtttcgcgtggggtccagcagagcccggcccgcgcgggagccgctctgattcgccgggggacgccgcggggaatgctctacctcaagctgccggcgggggatctagggttccgtccgggggcgccgaggcggggatccggcggcggcggggcctgagggtggcgcgggcgtcggaggcggccgccatggagcaggacccggagcgcgcctgccttcggagcttcgagctccacgagagcgagtcgagcctttacgttctaggaactaattctgacagaacactttggagactactcaagatcgatagatcagagccgtcagagcttgtgatagacgagtgttctactgtatatactgaaagtgaacatcctgacttgttgaagggtcttgatgacgagcacaggtcaactggcggagtaaaatttgttacaaagttttatggcataattggttttatcaaattccttgggccatattacatgttgattattactgagcagaaaaaaatcggggaaatctttggtcatccagtgtatcaggtgaccaggacttcaatggttgaattagcaaattctaagacaagatctacttttcaaaacttcaaggacgagaacagatacaggaagatcttgaatgcacttgatcttaggaaggatttctttttcagttactcataccacattatgagaagtcttcagaagaacttggctgatccacaggatggatggaccttatacgagactatctttgtgtggaatgagtatctgacacggcggatccgtaattgtctcagaaatactttgtggactgttgcattggtccatggtttctttaagcaggataaattctcaatatctggcaaggatattatgttcacactcatcgctagacggtcgaggcattatgctggaaccagatatttaaagaggggggtgaatgagaagggaagagtagcaaatgatgttgagactgagcaaattgtctatgaagctgtgcctggacctactgaagtaagttctgttgtgcagaataggggctcaattccactattctggtcacaggagacatcaaaattgaatcttaaacctgatataatatgtaagttgaaaaccttactatgacgcacccatcattttcatcaactccacaagtaaaagttccccattttgtcagtgcatgagatgcagaataattatgaagctacagagcttcattttgaaaatcttagagcaagatatggaaaccctatcattatcttaaacttgattaagacacgtgagaggcgagagtctatactccgccgagaatttgataaggcgatcaagataataaacaagagcctgtcagaagagaatcatctgaggttcttacattgggatcttcatcaaaactctcaaggaaaacctacaaatgtactcgacgtccttctaaaagtggcatttcgggctctgaatttaactgagttcttctattgtcaagtcgcaccaaattctgagacttctgcacaatgccccaccctattgaatggtcttgatcaatatttatgtgatgacaacaatagtgacgacacagaatgcactgagattgttggtgatgtatcccaagaggatatctcaggcagctctgattcctctggtaatgcaaccacagaagataaatttgagaatagtggactgccaccaccaaaaccaccaaaattccaaaaaggtgttttgaggacaaactgtatagattgcttggatcgtacaaatgttgctcagtatgcacatggtttagctgctcttggacatcaattgcatgcgcttggttttatagaatctccagaactaggtttagaagctcccttggcccatcatttgatgcacttttatgagatgatgggtgacacacttgctgtacagtatagcggttctgctgctcataacaaggtattctctgcaaagagaggtcacttgaagctttttattcagtcacaagagttctttaggacacttcagcggcactacagcaacacctgtatagatgctaacaaacaggctgctataaacttgtttttgggatacttccagccacagcaggaaaaacctgcactgtgggagttagaatcatctgctgggaagcataacaataatctttttgatggccacccaaggtaagtcaagaatatatttagtgacatagtatatcagttcttaaatattttcatcatcatcatcaacatcaaagccttttagtcccaagcaagctagggtatgctagagttgaaagctaaccaaaaccataggtcaagtttcaagcacatagatagctgttttccatgcactcctattcaaggctaaagctttgggtgcattgcatcctgtcaagtctccttttaccgcattttcccatatcaacttcagttttcccgttcgaacactagtcaaaacaatgttcttaattattttcatgttttgaggtaattgcaagaacgccattaagctgtgatgcattcattgtacttggaagtgtttaatattaacctttatgtccataaacgtagggctgcatagtggctatacgtgatccattaaaagcttcatatttgtgcattctattgtttgtttaatttcgtttgacctgttttgtccactcatagtattttttatttttttaatatcttctctatctacccacctatacctaataataaagaatgaagagtttcttccagcctgcatttttt

SEQ ID NO: 220972 - DNA, 2902 bp, Zea Mays
caaacggatttttccagccaaagttaaattaaaaacgggaaaaaaccacacgcctgcatctttctctctctcgtctctagacgtgcggtgcagcagctgtattcgccgcaacctcctcccatcccttgcgccagcggattccttggctgcgcggaattctcctagcctcccgagcctccccagctcgagaagggagctcacggtgacgcggcgcgaagggccgggtcagatcttggccgttggccccgaggcggcggtttcgcgtggggtccagcagagcccggcccgcgcgggagccgctctgattcgccgggggacgccgcggggaatgctctacctcaagctgccggcgggggatctagggttccgtccgggggcgccgaggcggggatccggcggcggcggggcctgagggtggcgcgggcgtcggaggcggccgccatggagcaggacccggagcgcgcctgccttcggagcttcgagctccacgagagcgaagcctttacgttctaggaactaattctgacagaacactttggagactactcaagatcgatagatcagagccgtcagagcttgtgatagacgagtgttctactgtatatactgaaagtgaacatcctgacttgttgaagggtcttgatgacgagcacaggtcaactggcggagtaaaatttgttacaaagttttatggcataattggttttatcaaattccttgggccatattacatgttgattattactgagcagaaaaaaatcggggaaatctttggtcatccagtgtatcaggtgaccaggacttcaatggttgaattagcaaattctaagacaagatctacttttcaaaacttcaaggacgagaacagatacaggaagatcttgaatgcacttgatcttaggaaggatttctttttcagttactcataccacattatgagaagtcttcagaagaacttggctgatccacaggatggatggaccttatacgagactatctttgtgtggaatgagtatctgacacggcggatccgtaattgtctcagaaatactttgtggactgttgcattggtccatggtttctttaagcaggataaattctcaatatctggcaaggatattatgttcacactcatcgctagacggtcgaggcattatgctggaaccagatatttaaagaggggggtgaatgagaagggaagagtagcaaatgatgttgagactgagcaaattgtctatgaagctgtgcctggacctactgaagtaagttctgttgtgcagaataggggctcaattccactattctggtcacaggagacatcaaaattgaatcttaaacctgatataatattgcatgagatgcagaataattatgaagctacagagcttcattttgaaaatcttagagcaagatatggaaaccctatcattatcttaaacttgattaagacacgtgagaggcgagagtctatactccgccgagaatttgataaggcgatcaagataataaacaagagcctgtcagaagagaatcatctgaggttcttacattgggatcttcatcaaaactctcaaggaaaacctacaaatgtactcgacgtccttctaaaagtggcatttcgggctctgaatttaactgagttcttctattgtcaagtcgcaccaaattctgagacttctgcacaatgccccaccctattgaatggtcttgatcaatatttatgtgatgacaacaatagtgacgacacagaatgcactgagattgttggtgatgtatcccaagaggatatctcaggcagctctgattcctctggtaatgcaaccacagaagataaatttgagaatagtggactgccaccaccaaaaccaccaaaattccaaaaaggtgttttgaggacaaactgtatagattgcttggatcgtacaaatgttgctcagtatgcacatggtttagctgctcttggacatcaattgcatgcgcttggttttatagaatctccagaactaggtttagaagctcccttggcccatcatttgatgcacttttatgagatgatgggtgacacacttgctgtacagtatagcggttctgctgctcataacaaggtattctctgcaaagagaggtcacttgaagctttttattcagtcacaagagttctttaggacacttcagcggcactacagcaacacctgtatagatgctaacaaacaggctgctataaacttgtttttgggatacttccagccacagcaggaaaaacctgcactgtgggagttagaatcatctgctgggaagcataacaataatctttttgatggccacccaaggtaagtcaagaatatatttagtgacatagtatatcagttcttaaatattttcatcatcatcatcaacatcaaagccttttagtcccaagcaagctagggtatgctagagttgaaagctaaccaaaaccataggtcaagtttcaagcacatagatagctgttttccatgcactcctattcaaggctaaagctttgggtgcattgcatcctgtcaagtctccttttaccgcattttcccatatcaacttcagttttcccgttcgaacactagtcaaaacaatgttcttaattattttcatgttttgaggtaattgcaagaacgccattaagctgtgatgcattcattgtacttggaagtgtttaatattaacctttatgtccataaacgtagggctgcatagtggctatacgtgatccattaaaagcttcatatttgtgcattctattgtttgtttaatttcgtttgacctgttttgtccactcatagtattttttatttttttaatatcttctctatctacccacctatacctaataataaagaatgaagagtttcttccagcctgcatttttt

SEQ ID NO: 220973 - DNA, 3130 bp, Zea Mays
caaacggatttttccagccaaagttaaattaaaaacgggaaaaaaccacacgcctgcatctttctctctctcgtctctagacgtgcggtgcagcagctgtattcgccgcaacctcctcccatcccttgcgccagcggattccttggctgcgcggaattctcctagcctcccgagcctccccagctcgagaagggagctcacggtgacgcggcgcgaagggccgggtcagatcttggccgttggccccgaggcggcggtttcgcgtggggtccagcagagcccggcccgcgcgggagccgctctgattcgccgggggacgccgcggggaatgctctacctcaagctgccggcgggggatctagggttccgtccgggggcgccgaggcggggatccggcggcggcggggcctgagggtggcgcgggcgtcggaggcggccgccatggagcaggacccggagcgcgcctgccttcggagcttcgagctccacgagagcgagtcgagcctttacgttctaggaactaattctgacagaacactttggagactactcaagatcgatagatcagagccgtcagagcttgtgatagacgagtgttctactgtatatactgaaagtgaacatcctgacttgttgaagggtcttgatgacgagcacaggtcaactggcggagtaaaatttgttacaaagttttatggcataattggttttatcaaattccttgggccatattacatgttgattattactgagcagaaaaaaatcggggaaatctttggtcatccagtgtatcaggtgaccaggacttcaatggttgaattagcaaattctaagacaagatctacttttcaaaacttcaaggacgagaacagatacaggaagatcttgaatgcacttgatcttaggaaggatttctttttcagttactcataccacattatgagaagtcttcagaagaacttggctgatccacaggatggatggaccttatacgagactatctttgtgtggaatgagtatctgacacggcggatccgtaattgtctcagaaatactttgtggactgttgcattggtccatggtttctttaagcaggataaattctcaatatctggcaaggatattatgttcacactcatcgctagacggtcgaggcattatgctggaaccagatatttaaagaggggggtgaatgagaagggaagagtagcaaatgatgttgagactgagcaaattgtctatgaagctgtgcctggacctactgaagtaagttctgttgtgcagaataggggctcaattccactattctggtcacaggagacatcaaaattgaatcttaaacctgatataatattgcatgagatgcagaataattatgaagctacagagcttcattttgaaaatcttagagcaagatatggaaaccctatcattatcttaaacttgattaagacacgtgagaggcgagagtctatactccgccgagaatttgataaggcgatcaagataataaacaagagcctgtcagaagagaatcatctgaggttcttacattgggatcttcatcaaaactctcaaggaaaacctacaaatgtactcgacgtccttctaaaagtggcatttcgggctctgaatttaactgagttcttctattgtcaagtcgcaccaaattctgagacttctgcacaatgccccaccctattgaatggtcttgatcaatatttatgtgatgacaacaatagtgacgacacagaatgcactgagattgttggtgatgtatcccaagaggatatctcaggcagctctgattcctctggtaatgcaaccacagaagataaatttgagaatagtggactgccaccaccaaaaccaccaaaattccaaaaaggtgttttgaggacaaactgtatagattgcttggatcgtacaaatgttgctcagtatgcacatggtttagctgctcttggacatcaattgcatgcgcttggttttatagaatctccagaactaggtttagaagctcccttggcccatcatttgatgcacttttatgagatgatgggtgacacacttgctgtacagtatagcggttctgctgctcataacaaggtattctctgcaaagagaggtcacttgaagctttttattcagtcacaagagttctttaggacacttcagcggcactacagcaacacctgtatagatgctaacaaacaggctgctataaacttgtttttgggatacttccagccacagcaggaaaaacctgcactgtgggagttagaatcatctgctgggaagcataacaataatctttttgatggccacccaagtacattgaaaagagtaaaatcagatggcaccattcttcatgaaagtaatgcttctatatctggctctggtcgttgccataatgaacagttaagtgcatcgcagcctgatgtccagaatgggtttcaattcccaacttcagaatccgattcacttcatgaaaatgacatttcatcagcttgtggaagtggagtagcacacctaaggtatactcctacagcctctgacgtgcttcatgtcccaagagctaaagttgaatattgccatgattctggtgattcaaactttttggatcttgaatggctttccacttcaggcaactcaagtgatgaaaggtctattgcaactagcacgccagatgcaaacctatcaaatgagaatgtcattagtggcataactcctgatatcatggaaaaccatcttgctgaaatgcagtatcagaagttacctcggaattttgtgcagtgggttaatcacggtgataccttttggtactaagatcgcaattactggaattcaatatgtcgccagcttcccagggtgggcattaacacggatctgagtagtagattatagagtgatatggatgctgcggcaaggcatttctcccgtgatatactccgcaccatccccaaagtcctttattggtccacgtgtttttacaatggctgtcgccccgacggaggacggtcgcagggcgaccacgtgcagctcccgcgcccgcgtcccatcctggctgagcgcacccgccgcgactattctcacttctcagtgcattgcgtcatttcaaaatccaaaa

SEQ ID NO: 220974 - DNA, 1724 bp, Zea Mays
cgccagcccccattgttccgctccgcaccacggaagacgaagcgcagcagccacgccccgaaaaaggcagaagaaacgcggtgcctcgagccatcagatgccccaccccaccccaccccaccgtgttgatctaggagttggagtcggacggcgctgggagtcgccgagtcggggcatggcatccatagccatacatctcctcgcggagcctggggcggagctgtcaccaccatgcccaatcctatcgcaccaaggaggactctgcctcgtgctcctcgtagtcttcgtacccacccctccacgcttcccctttccttgcacggtcccgatccctagccctgcccctctcctccagcgccgctcgccagctctctgcccccgccgcgcccagagatgcagatcccccaccgccgttaccgctgggtgaaggagtgggtctcgcaagaactggtcgtcgccggaggcccctgcgtgctgtacaagtgggtgcgagaggacagactagcagctttgaaggctaaggacaagaagcatggggcagaatctgcaactcctgaacccaactctgaggttctcttcctgtgcagctacgaaggatgtgggaagacattttttgatgcaggggctcttaggaagcatgctcacgtccatggggagaggcaatatatctgtcactatgagaactgtggcaaggagaaaagaattttgtgtgcccacatgaaggttgtgggaaggctttttcgttggattttaatttaaaggcacacatgaaaacacattctgcagataactatcatgtgtgccagtacccagaatgtggccgaagatttacacaagaatcaaaactaagagctcatatcagggcacaacatgagaaagctgtttgcctgcagaatccaggtgcttcggctatgaaccatagtgcaattggagaacagcatcagccccctaagccagcaaaggtctcagcaacgcctccagctccctcagctgagcgcccttacgtctgcccctacgatggttgcgacaaggcatacatccacgagtacaagctgaacctccatttgaaaaaggagcatcccaaccactaccaggatggtggtccacaaggcgctgccccttcaaagcgcagcatctcgaagagttcccataggagcagaccggacatcactgctagaatgccaccagccaaggtctccaagcgcaaaggagggtacgcagcgccatcgccagctgtgaacctccctgaggagcaccttcccgaggagcagcagtggccaaggaaagtgatgtacgaggatgacagcgaggagaccgaggaagaagaggggggcaacaatgtcgaggatagatggaactacaacagagttgctagtagcgatgacgaggaaaccgaagacgaacaatgagcttctagcaggcgtccatctgttctgtagttgtgcatataccataaattttaaactttgagggttatagcttttgcatacatgtaaaattttaaaataaggcggacttgttgtagacagcataggttgtaggtggtctgccccttctcaatcagacatgccatgagttcagaaaggataatggatcattgttctcgtttcgcttgtttttgtgtttgtgtttgtgccttttggttcgttatcacagatgagttattactgtaaccctgatttcagtgtttggcaatcaatctcgtcagccttacatttgtaaga

SEQ ID NO: 220975 - DNA, 870 bp, Zea Mays
gattaacgattctggtggggagggaaagggaacgggagcgggaggggaatccaattgcgatggcctccgactcgggcgatttcggtggggagaacaagtcgttggaaacggcgaggcggctgctggaggagaccttcacgagtgaggcagaggcggaggcgctaccgagcttgccctcggggttctacgacgccttcgtcctgaggggaatccgcgtcgtccaggccctccagcccggcacactcctctgccacttcaacgtgccctccagactactcgggctcaccccttgagatgaacatctcctaccttgatgctgcttttgctgatgaagagattgatatcgaggcgaaggttcttcgcgctggcaaggcagtaggggttgccgttgtggaactgaagaagaaatctggcaaaatcatcgcccaagctcgctactccaaatatcttggtgttagtaaactctgaatcatgatgctgcctcccatatatacggggatatggtagcagcaagcaagcagggtgtggtttggttcgacagcaagtgttgttactactctacattatatcttggtgttagtaaactctgaatcatgatgctgtattactgttactcaaccatcatctcagctacttattattcttgtgttatgagtcttcctcggattgcattaaactaaactacagtatacagcaaatacttgtatatatgtatgagcctgagcttcaggcattgcatgtggatgtgtggctttgtctggaactttttcttgtacataaaacaaaagacatggctgataaacatgtgtacctagctagttcttgcattgtgctaaagctaaaacaataggctagtttcatgtgtattta

SEQ ID NO: 220976 - DNA, 484 bp, Zea Mays
gtcgcagcgccgctacgagggggaggggatcgaactcgaaggagaatttccattcgaccccatccacttctcacctcaatctcgcgagaagcgaagccggaggaggagggtgcgaggagatcgcgagcagccggagccggagccggagccggaggcctagtagatgaagacgttcgatccgtggccggtcttcttccgccgggagtggaagcgcaattggcccttcctcacggggttcgccatcaccggcttcatcatcactaagatgacggccaacttcaccgaggaggacctcaagaactccaagttcgtccaggagcacaagaagcgctgaccaaccagtaatctatgacatggacgccggatggcactggcagagggatggtgtacggtgagtggcttcaatctatcgctgatgcaatctgccattggtgctggcgtgctgtaggtgttgtccgaattgcctgtctggacagccagttat

SEQ ID NO: 220977 - DNA, 3874 bp, Zea Mays
tccccaccgagtctaagaatctccagcaaccgtccctctcgtgacgcccgcgatccccagcggcggcgtcgacaatgtatgcttgctcaggcgatcagagaggataaacacggaagcgccgccgtcctccgctatttccaggccagctagcctgggggcgcggcgctctccattctccagccgtcgtcacgggacgcaacgtgacaaaggaaactggccggcgttgcgacaaagcccagctcctgtcgtgtggcgacatgtgatcgaatcgagtgcgcgagagcctgggactgagagggccgggcagggttcttctgcgcgcgcggcgttaggccacttctcgtcgcagaaactatgtattgtagttgtaggtatagtttatataaattaatataatagaaatagaaaccatgtgtgtgtgtggttttcagcaccgtggctcttagcttctcgtgtcctggccgtaagcattccgtgcgatgcctccgctgtccggccgtcgtggtctcgtcacgcacgcacacgtacacacacctcgcttgatatgatgcccgtgtgctctcaggtctcaaacaacgctgtccgtctctccggcgcggaggggataaaagtctcggcgtgaactcctggccagtcttttgctgctgccatatccgcgcgcactgccggccggccagccagccagccagcgcgcgcgtgtcgcggcggagctagagggctaggtagcagagtggtggccagtgccgcgggttgcgttgggatggcggcgcttgtggcgctgacgctggcgctggcgctgacggcggcagtgacagcgacggcgaaggagtgcaccaacatcccgacggagctgtcgtcgcacacggtgcgggcgcggctgcaggcggcgccgggcggagcggcggagtggcggtggcgcgagctgttccacgagcacctcaaccccaccgacgaggccgcgtggatggacctcatgccgccgcctggcgccgcggctgcggcgcaacaccagcagcaccaccgccaggaggagctcgactgggtgatgctctaccggtcgctcaagggccagcagcagcagcagccggtggggggcggcaccgccgcagccgggagtacgccgttcctggaggaggtgtccctgcacgacgtgcgcctggaccccgacggcgacgtggcgtacgggcgcgcgcagcagacgaacctcgagtacctgctgctgctggacgtggaccgcctcgtctggagcttccgctcccaggcggggctgccggcgcccggaaccccctacggcggctgggagaagcctgacagcgagctcaggggccacttcgtcggtcactacctgagcgcgacggccaagatgtgggcgagcacgcacaacggcacgctcgccggcaggatgtcggcggtggtggacgcgctcgacgagtgccagcgcgccggcggcacgggctacctctccgccttccccgccgagttcttcgaccgcttcgaggccatcaagcccgtctgggcgccctactacaccatccacaagatcatgcagggcctcctcgaccagcacgtggtggccggcaacggcaaggcgctgcggatgttggtcgccatggccgactacttcgccggccgggtcaggaacgtcatccagaggtacagcatcgagcgccactggacgtcgctcaacgaggagaccggagggatgaacgacgtgctctaccagctctacaccatcacgcacgaccagaggcatctggtgctggcccatctattcgacaagccatgcttcctgggtttgcttgcggtgcaggctgacagcctttcgaatttccatgccaacacccatattccggttgtaattggcgggcagatgagatatgaagttacaggtgatcctctttataaggaaattgcgacgttcttcatggacacagtgaactcctctcacgcatacgcgactggtggtacatctgtcagtgaattctggtccaatccaaagcgattagctgaagctctgaccactgagactgaggagtcctgcacaacttacaatatgctcaaggtttcgcgccatctgttcagatggacgaaggagatcgcgtacgcggactactacgagcgagcgctgatcaacggcgtgctgagcatccagaggggcagggaccccggagtgatgatctacatgctgccccagggccccgggagatccaaggcgaagagctaccatggctggggaactcagtacgaatcgttctggtgctgctatggcactgggatagaatcgttctccaagctgggagattccatttacttcgaggagagaggtgagaggccggcactgtatgttgttcagttcataccgagcacgttcagctggagaactgcaggccttactgtcgcacagcagctgatgcccctcagctcgtcggatcagtaccttcaggtctcgttctccgtatctgccaagacgacaaacggtcagtttgcgacgttgaacgtgagaataccatcgtggacatctttgaatggcgcaaaggcaacactgaatggcaagcatctggaattagcatctccagggacatttctcactatcagcaagcagtggggcagcggtgatcagttgtcactccagttacctatccacctaaggactgaagcaataaaagatgaccggccggagtacgcgtctatacaagcagtcctgttcgggccgttcctcctcgccggcctcaccaccggagactgggacgccaagaccggcgccgccgacgccgcagcctccgactggatcacccccgtccctgtggagtccaactcccagctggtgacgctggcgcaggagtccggcggcgaggccttcgtcctctccgccctgaacgggtccttgacgatgctgcagcggcccaaagacggcggcggcaccgaggccgccgtgcacgcgacgttcaggctcgtcccgcagggaggcgccggcgcgggcgccgccgcgatgctcgagccgctggacatgccggggatggtggtcacggacaggctcacggtggccgcggagaagagctcgggcgccgcgttcaacgtcgtgccggggctcgccggtgcgcccggctcggtgtcgctcgagctcgcgtccaggccggggtgcttcttggtcggcggcggcgagaaggtgcaggtgggctgtgccggtggtgcccagcagaagcgcggcgacggcgcctggttccggcggtcggccagcttcgcgcggggcgagccgctgcggcggtaccaccccatgagcttcgctgccaggggcgtgaggaggagcttcctcctggagccattgttcaccttgagggacgagttctacaccgtctacttcaaccttgtagcgtgacagacgggagatgacgacgagacctgcaggtcgaggactcgaggttgatgttgcttcggcctctggtaaccaaggggggaaaatgttgagttggaggtggagtgtcggacagttatgtttagagaaaagagaatgattttcccatattcaccgaatgatccgcggccgcctatttctgcttcaaccattcatcatcgtcgccataattctaaccacttcttgggtccctcctccagcttgctgcgtccaagcacagtttatttgccagtttctaaatctatactatatttaaagcaccagtttcaacggtcgtcatgcgtcatttttttacaaataactcatcacagttatttcaaattaatctgttgcacgtctatagatatcaaacgatgcccgacacgggctagatgcacgcgggccataactatggcacagacacgtcatgccggcctgctaactgtgtcgggtcagcccgttagcccgttgatccatttaatt

SEQ ID NO: 220978 - DNA, 3654 bp, Zea Mays
cctgtcgtgtggcgacatgtgatcgaatcgagtgcgcgagagcctgggactgagagggccgggcagggttcttctgcgcgcgcggcgttaggccacttctcgtcgcagaaactatgtattgtagttgtaggtatagtttatataaattaatataatagaaatagaaaccatgtgtgtgtgtggttttcagcaccgtggctcttagcttctcgtgtcctggccgtaagcattccgtgcgatgcctccgctgtccggccgtcgtggtctcgtcacgcacgcacacgtacacacacctcgcttgatatgatgcccgtgtgctctcaggtctcaaacaacgctgtccgtctctccggcgcggaggggataaaagtctcggcgtgaactcctggccagtcttttgctgctgccatatccgcgcgcactgccggccggccagccagccagccagcgcgcgcgtgtcgcggcggagctagagggctaggtagcagagtggtggccagtgccgcgggttgcgttgggatggcggcgcttgtggcgctgacgctggcgctggcgctgacggcggcagtgacagcgacggcgaaggagtgcaccaacatcccgacggagctgtcgtcgcacacggtgcgggcgcggctgcaggcggcgccgggcggagcggcggagtggcggtggcgcgagctgttccacgagcacctcaaccccaccgacgaggccgcgtggatggacctcatgccgccgcctggcgccgcggctgcggcgcaacaccagcagcaccaccgccaggaggagctcgactgggtgatgctctaccggtcgctcaagggccagcagcagcagcagccggtggggggcggcaccgccgcagccgggagtacgccgttcctggaggaggtgtccctgcacgacgtgcgcctggaccccgacggcgacgtggcgtacgggcgcgcgcagcagacgaacctcgagtacctgctgctgctggacgtggaccgcctcgtctggagcttccgctcccaggcggggctgccggcgcccggaaccccctacggcggctgggagaagcctgacagcgagctcaggggccacttcgtcggtcactacctgagcgcgacggccaagatgtgggcgagcacgcacaacggcacgctcgccggcaggatgtcggcggtggtggacgcgctcgacgagtgccagcgcgccggcggcacgggctacctctccgccttccccgccgagttcttcgaccgcttcgaggccatcaagcccgtctgggcgccctactacaccatccacaagatcatgcagggcctcctcgaccagcacgtggtggccggcaacggcaaggcgctgcggatgttggtcgccatggccgactacttcgccggccgggtcaggaacgtcatccagaggtacagcatcgagcgccactggacgtcgctcaacgaggagaccggagggatgaacgacgtgctctaccagctctacaccatcacgcacgaccagaggcatctggtgctggcccatctattcgacaagccatgcttcctgggtttgcttgcggtgcaggctgacagcctttcgaatttccatgccaacacccatattccggttgtaattggcgggcagatgagatatgaagttacaggtgatcctctttataaggaaattgcgacgttcttcatggacacagtgaactcctctcacgcatacgcgactggtggtacatctgtcagtgaattctggtccaatccaaagcgattagctgaagctctgaccactgagactgaggagtcctgcacaacttacaatatgctcaaggtttcgcgccatctgttcagatggacgaaggagatcgcgtacgcggactactacgagcgagcgctgatcaacggcgtgctgagcatccagaggggcagggaccccggagtgatgatctacatgctgccccagggccccgggagatccaaggcgaagagctaccatggctggggaactcagtacgaatcgttctggtgctgctatggcactgggatagaatcgttctccaagctgggagattccatttacttcgaggagagaggtgagaggccggcactgtatgttgttcagttcataccgagcacgttcagctggagaactgcaggccttactgtcgcacagcagctgatgcccctcagctcgtcggatcagtaccttcaggtctcgttctccgtatctgccaagacgacaaacggtcagtttgcgacgttgaacgtgagaataccatcgtggacatctttgaatggcgcaaaggcaacactgaatggcaagcatctggaattagcatctccagggacatttctcactatcagcaagcagtggggcagcggtgatcagttgtcactccagttacctatccacctaaggactgaagcaataaaagtgtaactgaaaccaccttcagatgaccggccggagtacgcgtctatacaagcagtcctgttcgggccgttcctcctcgccggcctcaccaccggagactgggacgccaagaccggcgccgccgacgccgcagcctccgactggatcacccccgtccctgtggagtccaactcccagctggtgacgctggcgcaggagtccggcggcgaggccttcgtcctctccgccctgaacgggtccttgacgatgctgcagcggcccaaagacggcggcggcaccgaggccgccgtgcacgcgacgttcaggctcgtcccgcagggaggcgccggcgcgggcgccgccgcgatgctcgagccgctggacatgccggggatggtggtcacggacaggctcacggtggccgcggagaagagctcgggcgccgcgttcaacgtcgtgccggggctcgccggtgcgcccggctcggtgtcgctcgagctcgcgtccaggccggggtgcttcttggtcggcggcggcgagaaggtgcaggtgggctgtgccggtggtgcccagcagaagcgcggcgacggcgcctggttccggcggtcggccagcttcgcgcggggcgagccgctgcggcggtaccaccccatgagcttcgctgccaggggcgtgaggaggagcttcctcctggagccattgttcaccttgagggacgagttctacaccgtctacttcaaccttgtagcgtgacagacgggagatgacgacgagacctgcaggtcgaggactcgaggttgatgttgcttcggcctctggtaaccaaggggggaaaatgttgagttggaggtggagtgtcggacagttatgtttagagaaaagagaatgattttcccatattcaccgaatgatccgcggccgcctatttctgcttcaaccattcatcatcgtcgccataattctaaccacttcttgggtccctcctccagcttgctgcgtccaagcacagtttatttgccagtttctaaatctatactatatttaaagcaccagtttcaacggtcgtcatgcgtcatttttttacaaataactcatcacagttatttcaaattaatctgttgcacgtctatagatatcaaacgatgcccgacacgggctagatgcacgcgggccataactatggcacagacacgtcatgccggcctgctaactgtgtcgggtcagcccgttagcccgttgatccatttaatt

SEQ ID NO: 220979 - DNA, 3526 bp, Zea Mays
ggccacttctcgtcgcagaaactatgtattgtagttgtaggtatagtttatataaattaatataatagaaatagaaaccatgtgtgtgtgtggttttcagcaccgtggctcttagcttctcgtgtcctggccgtaagcattccgtgcgatgcctccgctgtccggccgtcgtggtctcgtcacgcacgcacacgtacacacacctcgcttgatatgatgcccgtgtgctctcaggtctcaaacaacgctgtccgtctctccggcgcggaggggataaaagtctcggcgtgaactcctggccagtcttttgctgctgccatatccgcgcgcactgccggccggccagccagccagccagcgcgcgcgtgtcgcggcggagctagagggctaggtagcagagtggtggccagtgccgcgggttgcgttgggatggcggcgcttgtggcgctgacgctggcgctggcgctgacggcggcagtgacagcgacggcgaaggagtgcaccaacatcccgacggagctgtcgtcgcacacggtgcgggcgcggctgcaggcggcgccgggcggagcggcggagtggcggtggcgcgagctgttccacgagcacctcaaccccaccgacgaggccgcgtggatggacctcatgccgccgcctggcgccgcggctgcggcgcaacaccagcagcaccaccgccaggaggagctcgactgggtgatgctctaccggtcgctcaagggccagcagcagcagcagccggtggggggcggcaccgccgcagccgggagtacgccgttcctggaggaggtgtccctgcacgacgtgcgcctggaccccgacggcgacgtggcgtacgggcgcgcgcagcagacgaacctcgagtacctgctgctgctggacgtggaccgcctcgtctggagcttccgctcccaggcggggctgccggcgcccggaaccccctacggcggctgggagaagcctgacagcgagctcaggggccacttcgtcggtcactacctgagcgcgacggccaagatgtgggcgagcacgcacaacggcacgctcgccggcaggatgtcggcggtggtggacgcgctcgacgagtgccagcgcgccggcggcacgggctacctctccgccttccccgccgagttcttcgaccgcttcgaggccatcaagcccgtctgggcgccctactacaccatccacaagatcatgcagggcctcctcgaccagcacgtggtggccggcaacggcaaggcgctgcggatgttggtcgccatggccgactacttcgccggccgggtcaggaacgtcatccagaggtacagcatcgagcgccactggacgtcgctcaacgaggagaccggagggatgaacgacgtgctctaccagctctacaccatcacgcacgaccagaggcatctggtgctggcccatctattcgacaagccatgcttcctgggtttgcttgcggtgcaggctgacagcctttcgaatttccatgccaacacccatattccggttgtaattggcgggcagatgagatatgaagttacaggaaattgcgacgttcttcatggacacagtgaactcctctcacgcatacgcgactggtggtacatctgtcagtgaattctggtccaatccaaagcgattagctgaagctctgaccactgagactgaggagtcctgcacaacttacaatatgctcaaggtttcgcgccatctgttcagatggacgaaggagatcgcgtacgcggactactacgagcgagcgctgatcaacggcgtgctgagcatccagaggggcagggaccccggagtgatgatctacatgctgccccagggccccgggagatccaaggcgaagagctaccatggctggggaactcagtacgaatcgttctggtgctgctatggcactgggatagaatcgttctccaagctgggagattccatttacttcgaggagagaggtgagaggccggcactgtatgttgttcagttcataccgagcacgttcagctggagaactgcaggccttactgtcgcacagcagctgatgcccctcagctcgtcggatcagtaccttcaggtctcgttctccgtatctgccaagacgacaaacggtcagtttgcgacgttgaacgtgagaataccatcgtggacatctttgaatggcgcaaaggcaacactgaatggcaagcatctggaattagcatctccagggacatttctcactatcagcaagcagtggggcagcggtgatcagttgtcactccagttacctatccacctaaggactgaagcaataaaagatgaccggccggagtacgcgtctatacaagcagtcctgttcgggccgttcctcctcgccggcctcaccaccggagactgggacgccaagaccggcgccgccgacgccgcagcctccgactggatcacccccgtccctgtggagtccaactcccagctggtgacgctggcgcaggagtccggcggcgaggccttcgtcctctccgccctgaacgggtccttgacgatgctgcagcggcccaaagacggcggcggcaccgaggccgccgtgcacgcgacgttcaggctcgtcccgcagggaggcgccggcgcgggcgccgccgcgatgctcgagccgctggacatgccggggatggtggtcacggacaggctcacggtggccgcggagaagagctcgggcgccgcgttcaacgtcgtgccggggctcgccggtgcgcccggctcggtgtcgctcgagctcgcgtccaggccggggtgcttcttggtcggcggcggcgagaaggtgcaggtgggctgtgccggtggtgcccagcagaagcgcggcgacggcgcctggttccggcggtcggccagcttcgcgcggggcgagccgctgcggcggtaccaccccatgagcttcgctgccaggggcgtgaggaggagcttcctcctggagccattgttcaccttgagggacgagttctacaccgtctacttcaaccttgtagcgtgacagacgggagatgacgacgagacctgcaggtcgaggactcgaggttgatgttgcttcggcctctggtaaccaaggggggaaaatgttgagttggaggtggagtgtcggacagttatgtttagagaaaagagaatgattttcccatattcaccgaatgatccgcggccgcctatttctgcttcaaccattcatcatcgtcgccataattctaaccacttcttgggtccctcctccagcttgctgcgtccaagcacagtttatttgccagtttctaaatctatactatatttaaagcaccagtttcaacggtcgtcatgcgtcatttttttacaaataactcatcacagttatttcaaattaatctgttgcacgtctatagatatcaaacgatgcccgacacgggctagatgcacgcgggccataactatggcacagacacgtcatgccggcctgctaactgtgtcgggtcagcccgttagcccgttgatccatttaatt

SEQ ID NO: 220980 - DNA, 2194 bp, Zea Mays
aagaaataggagatctggtggagatgcttttataccttaagctaccgacgacgaattatactaagtgcatgccatatgataatcataatccggtggaatctgtttatggatttgcccatagccgaagcaccgagtgcccagaaagatctacagaagcaaataaaatcatgtgtttaatcattgacacattggttctcttggtgaattcttgtaagattggcaatttgcagaatgtacagcaggagctggcaaggaatgttctgtctttgttgtacaaaatctggaagaaaactcaacccttaagatcatcgactgattgcaacaagtggaagaataaacttcagagtaaagaatatgatatatccaaatctattttcaggctttcaactggtcttgcctttccagcctggccagagcctgatgtggtcaggaaaagtgtttttggcgaaacagtgtccgactttgaaacttttgtcctagcctactgggaaaagttgcccaatttgtacaggaggaaacaagccactaaaatggatagtcttgtgttcgtcgcactgcataatgcttttaatcttgggacaacacctgattctatcattgaatcattattacagggtcttgtttcttgccccgctatcgcttctgatgagcttgacataaattcatttctccatgaggttcatgattcactgggtgattctgtaaagtacaggcaagacattagagtcatgagaacacgagatccaaatgaccaaacctcaaggggatgtgtgacagaggagcattttttcgatgatggaacggtcttcacggatgaagatgcattcatcgaaaaatgtaagcacgccttcaagaacggttattcgatcgccttgcgtggcatggagtttcggtctgagaaggttgctgctatagcttctgcactggctgatctatttgggcagccttctgtaggagccaacatatacttctcgcccgcaggatctcaaggcctggcccgacactacgacgatcactgtgtacttgtttggcagctactcggtagcaagaaatggacggtttggcctaatccgaagccactgttgcctagactgtatgaacctttcgaccctttagatggcaatttagatgagagcagtgggagagtggaggtcttacatgaaggggacatgatgtacatccccagaggttatgttcatgaggctcgcactgatgtcagtggatcagaggtgaacgattgctcactccatttgacccttgctattgaggtcgaggcaccctttgagtgggaaggttttgctcatatcgcccttcattgctgggcagagaagcagcagcttagaggttcccaatctgtcgagttcgaggggaaagcaggagcttccttatccgctattgtgcttcatgtagccatcaggttgctctccgacagtgagcctgttttcaggaaggcgtgcatggtcgcagcaaaggcagcgacgtcgtccagttcctgtacatccacaacgactcacctggaggctcttcgaagcagccagaggtcaactttcgacgagatactgaggaagatcgatcagagctgcagcatcaaggaagcgctggagcgcatcgtgtcggcggtgagagagagagacgacggagccttccagtggatgagctggctccggcacctgccgcagcaaggaacagctgcaggctacatcatcgacttctgcaatgtcttgggcgccctcgaggcgctcgtggaggcgttcgactctgaccctggccaggccctggatggcctcacggccttcaagtcagggttttgccggcgcgtcgcgtacgaggacgcgtgcgaggcctttgggactttgctcgagatgtacagaatggctaggacccagtacatgagggggatgctggcgttgcacggtgcaggtgcacacgtgagctgaggctgagccgtggagaattcgccgtgacagagaaaggttttgcttttctggtggtggttgcgtggctaggctagtcttttctcctagcgaggaaaacctgacatgtatgtgctggacacttgtacggttgtgccatgtatcgttcgatggctgcttttgactgctggtaagattatccattggcatcgatctgtgacttgttccgttgttcgacaatcagttttcaattcagcagcactctggcttggccctttcca

SEQ ID NO: 220981 - DNA, 3800 bp, Zea Mays
gattttaaggataaactctagaagaaactagtggtcaaagactggttcagtttgtggactcttatgatccacctatcaaggggttgcatgaagatcttaattttgtgagcccaagaattggagaggtcctggaagctgttggcccaattatatttctttcaactgatacaaaaaagttaaggaacgaaggtttcctcagtccatttcatccacgttatccagacatcctaacaaattctgcccatccaatgagggcccaagacttggctaatgtcacatcataccgtgagtgggttcttctaggatatcttgtttgtcctgatgaactacttagggtgaccagtatagatgttgccatggttgttctgaaagagaacttaatacttcctctgttcagagatgagtacatcttacttcatgaaaattatcaactttatgttcttccaaaagttctagaatcgaagagaatggctaaatctggccgaactaagcaaaaggaagctgatctggagtacaatgttgcaaagcaggttgagagaatgttaacggaagtgcatgagcaagcactggtgtcatgtgatgctatgcatcgtgagaggagaattcttcttaagcaggaaattggaaggatggttttatttttcactgatcaacctagcctcctagcacctaatattcagatggttttttctgctcttgctttgtctcaatgcgaggtgatttggtacttccaacatgtggggattgcatcatcaaaatctactcggttgaaaactgttgacattgatgcgacagacccaactattggtttcttactagatggaataggcaaactttgttgcctggttcgtaaatacatagcagcaataaaaggttatgccttatcatatttgttatccagtgctggaagaatacggttcttacttggtactccaggaatggttgctcttgacctagatgcgacactgaaaggcctttttcagcaagtcctccattgtctggagaacattccaaaacctcagggggaaagtgttcctgacattaccgctgacttggctgatttgcgtaagcactggctgtcaatcttgatgatagtcacatcttcacgatcctcgataaacattaagcacttggagaaggctactgtgtctactgggaaggagggtttggtgtcagaaggcaatgctgcatataattggtcaagatgtgttgatgaacttgagagccaactctccaaacatggaagccttaaaaaactctacttttatcatcagcatcttaccacggtcttcagaaatacaatgtttggcccagaaggtcgtccacagcattgttgtgcttggcttggagccgcttgcagttttccagaatgtgcttctgcaattattcctgaagaggttaacaaaattggcagagattctatctcttatgtggagtcccttatcgagtctatcatgggtgggttggaaggtttgataaatattctagattcagaaggtggatttggctcattagagatgcagctttccccagagcaagcagctcttcgcttaaataacacaagagcaaagggtgtttcaagcttgttaactccaggatatgagagctatcctgataacagttcatcaattaagatgctggaagctgctatgcaaaggctgacaagtttgtgttctgttctaaatgacatggagcctattggtgttctcaaccatgtttttgttctacgcgagtacatgagagactgcatcataggaaatttcaggagaagatttcatagtatgattagaactgagaactgcattcagcgaccatcaatcatagaatctcttctaagaagacatctgggcatcatccatctagcagagcagcatattagtatggaccttactgaaggcatacgtgaagtgctgctagctgagagttatactggtccatttcccaatcttcaaatgtttgagactccagtggggacacaaggaggggggtctgccgttgagatgatatgcaactggtatattgagaatgtagtaaaggacgcttctcgcattggagttgcttttgatgcaatccaaaattgcttcaggagctcacagcctattggtggtggatgtttggctgaatcatttacagataaaagagaaatgaaatcacttgttcgtctttttggtggctatggaatagataaaatggataagatgctaagggagcatacgtctgcgcttttaaactgtatcgattcagcattgaggtcaaatcgtgatgccttagagggcctagctggaactgtaaattccggcgataggattgaaagggatgtgaacctgaaacaaattattgacctcgaaacactggctgacctctgtattcaagcagggcaggcaataactttccgtcggctgttggttgaggccgtcggagcagtccttgaagagaaagtgcctctgatatattctctgctcaaaggattagccttgcagttgccagacgaggtacctgataaaaatgagataattagattgagaaaggttgcgagcagtgttggtgttggcgacaaacatgatgctgagtgggtacactctattctggcagacgctggtgcagctaatgataattcttggatcctacttccatacctttgtgctgcattcatggtgtccaacatttggaacggtgctgtttatgatgtcaatataggtggactcagtaacaatttgcactgcctagcaaggtatggactgactctatgtttgatgtcaaaaatcgttagttgtgggtatgtaagtgctgtgattgtatttgtgcaggtgtgtaagtgctgtgattgggggaagcgaatacactcgggtcgaaagggagcagcgaataaattctctttcaaatgtgcatacagatgagctgcaagaggccgagttaccgagccgtgtctcagcagaagcaaatatcaaatcttgtatgcagatctacgtcaaactgtctgcagggatcgtcctggattcatggaacgacacaagcaggcagcacatcgtcccgaagctgacattcctggaccagctctgcgagctgtccccgtacgtgccaaggagcaccttagaagctcacatcccatacaccatcctgcgctcgatataccaccagctgtacggaggctctctgctggcctcggaaccggcggagcagtccccaaggcagtcgcctctcatctctctggcacacgcgtccccgtccgcaaggcagatgcagaaccgaccagagacaacacccaggtcccacaccttcgacccaggctactacagctcgtcggggtcccagcacgacgatggctacgacgcggataggaggaccggacggctgctgcggagcttgaggcgctctggaccgctcgacttcggtgcgagcagaaaggcgaagaagttcgtcgagggctccagctccgggagcagccatggagctggctcgctgcagaggttcgcagtgtccagatctggccctctatcgtacagatagggccgcatgtaatgtaaactctagagagcagtagatcttcctatgcgtgctggtttacgtagctagcagtagcaacagcagcagctagttgtgctgtaagtaaaacccattaattgcttaatttgtgttgactgtcgttaggcaagtgatttgaattagctgttgctcgtttggtttgtgtatcaacaatacaattgttcgttgatttttcttgatagcaaagtaaagtaaaccaaccttctcttgaaagaaagaaatagagagaaagattagacggaggccgattaagcaga

SEQ ID NO: 220982 - DNA, 4553 bp, Zea Mays
acgacgaatccggcactcgcaaccaccgcatccgtcctcgtctggtccggttgcctactcccctcccactgccccgctgctgctgcctccccgcgcaatggcgccgagatccccgcgctgagcgagcctcccgggggtcgacctccgaaccggcgctgccgtcccgcagtgcacttgaagaccaggcagctgttctctactcaaggaagagatggcccatgtttcgttcaaaagcaaagatgtggacagcggcatgtcccggtggtctgaatacctaagtgttgaagagccaattccttccgcaatggcaacctggaggaacatgagcgctgatgcgccgcaaggctcttctgctggtagccacaaacatcttcagatggagccggtggttcagctgtccaaggttgcggaaggcttgctggccaaaatgtaccggctgaacagcatcctggactatccagatccaaacacgcacacattctcggatgcattttggaaagctggtgtctttccaaatttccccaaaatttgcatcacgatgtcaaaaaaatttccggaacatcctaacaagctgcagctagaaagggtagataagtttggtcttgatgctttaaacgagaatgctgaaggttacatgcacaatcttgagcagtggatcctgttgcttcttgatttgctggcatttcgtgaacaagctttgcgacttattttggatttgagcagcacggtcataacattgctgccacaccaaaactctttaattcttcatgcttttatggatctgttttgttcatttgtccgagtgaatcttttctctgacaagatgccaagaaagatgatcctccaggtttataacatcttgcacataatgctaaagggtggtcgtgattgtgagttttatcaccgactggttcagtttgtggactcttatgatccacctatcaaggggttgcatgaagatcttaattttgtgagcccaagaattggagaggtcctggaagctgttggcccaattatatttctttcaactgatacaaaaaagttaaggaacgaaggtttcctcagtccatttcatccacgttatccagacatcctaacaaattctgcccatccaatgagggcccaagacttggctaatgtcacatcataccgtgagtgggttcttctaggatatcttgtttgtcctgatgaactacttagggtgaccagtatagatgttgccatggttgttctgaaagagaacttaatacttcctctgttcagagatgagtacatcttacttcatgaaaattatcaactttatgttcttccaaaagttctagaatcgaagagaatggctaaatctggccgaactaagcaaaaggaagctgatctggagtacaatgttgcaaagcaggttgagagaatgttaacggaagtgcatgagcaagcactggtgtcatgtgatgctatgcatcgtgagaggagaattcttcttaagcaggaaattggaaggatggttttatttttcactgatcaacctagcctcctagcacctaatattcagatggttttttctgctcttgctttgtctcaatgcgaggtgatttggtacttccaacatgtggggattgcatcatcaaaatctactcggttgaaaactgttgacattgatgcgacagacccaactattggtttcttactagatggaataggcaaactttgttgcctggttcgtaaatacatagcagtgctggaagaatacggttcttacttggtactccaggaatggttgctcttgacctagatgcgacactgaaaggcctttttcagcaagtcctccattgtctggagaacattccaaaacctcagggggaaagtgttcctgacattaccgctgacttggctgatttgcgtaagcactggctgtcaatcttgatgatagtcacatcttcacgatcctcgataaacattaagcacttggagaaggctactgtgtctactgggaaggagggtttggtgtcagaaggcaatgctgcatataattggtcaagatgtgttgatgaacttgagagccaactctccaaacatggaagccttaaaaaactctacttttatcatcagcatcttaccacggtcttcagaaatacaatgtttggcccagaaggtcgtccacagcattgttgtgcttggcttggagccgcttgcagttttccagaatgtgcttctgcaattattcctgaagaggttaacaaaattggcagagattctatctcttatgtggagtcccttatcgagtctatcatgggtgggttggaaggtttgataaatattctagattcagaaggtggatttggctcattagagatgcagctttccccagagcaagcagctcttcgcttaaataacacaagagcaaagggtgtttcaagcttgttaactccaggatatgagagctatcctgataacagttcatcaattaagatgctggaagctgctatgcaaaggctgacaagtttgtgttctgttctaaatgacatggagcctattggtgttctcaaccatgtttttgttctacgcgagtacatgagagactgcatcataggaaatttcaggagaagatttcatagtatgattagaactgagaactgcattcagcgaccatcaatcatagaatctcttctaagaagacatctgggcatcatccatctagcagagcagcatattagtatggaccttactgaaggcatacgtgaagtgctgctagctgagagttatactggtccatttcccaatcttcaaatgtttgagactccagtggggacacaaggaggggggtctgccgttgagatgatatgcaactggtatattgagaatgtagtaaaggacgcttctcgcattggagttgcttttgatgcaatccaaaattgcttcaggagctcacagcctattggtggtggatgtttggctgaatcatttacagataaaagagaaatgaaatcacttgttcgtctttttggtggctatggaatagataaaatggataagatgctaagggagcatacgtctgcgcttttaaactgtatcgattcagcattgaggtcaaatcgtgatgccttagagggcctagctggaactgtaaattccggcgataggattgaaagggatgtgaacctgaaacaaattattgacctcgaaacactggctgacctctgtattcaagcagggcaggcaataactttccgtcggctgttggttgaggccgtcggagcagtccttgaagagaaagtgcctctgatatattctctgctcaaaggattagccttgcagttgccagacgaggtacctgataaaaatgagataattagattgagaaaggttgcgagcagtgttggtgttggcgacaaacatgatgctgagtgggtacactctattctggcagacgctggtgcagctaatgataattcttggatcctacttccatacctttgtgctgcattcatggtgtccaacatttggaacggtgctgtttatgatgtcaatataggtggactcagtaacaatttgcactgcctagcaaggtgtgtaagtgctgtgattgggggaagcgaatacactcgggtcgaaagggagcagcgaataaattctctttcaaatgtgcatacagatgagctgcaagaggccgagttaccgagccgtgtctcagcagaagcaaatatcaaatcttgtatgcagatctacgtcaaactgtctgcagggatcgtcctggattcatggaacgacacaagcaggcagcacatcgtcccgaagctgacattcctggaccagctctgcgagctgtccccgtacgtgccaaggagcaccttagaagctcacatcccatacaccatcctgcgctcgatataccaccagctgtacggaggctctctgctggcctcggaaccggcggagcagtccccaaggcagtcgcctctcatctctctggcacacgcgtccccgtccgcaaggcagatgcagaaccgaccagagacaacacccaggtcccacaccttcgacccaggctactacagctcgtcggggtcccagcacgacgatggctacgacgcggataggaggaccggacggctgctgcggagcttgaggcgctctggaccgctcgacttcggtgcgagcagaaaggcgaagaagttcgtcgagggctccagctccgggagcagccatggagctggctcgctgcagaggttcgcagtgtccagatctggccctctatcgtacagatagggccgcatgtaatgtaaactctagagagcagtagatcttcctatgcgtgctggtttacgtagctagcagtagcaacagcagcagctagttgtgctgtaagtaaaacccattaattgcttaatttgtgttgactgtcgttaggcaagtgatttgaattagctgttgctcgtttggtttgtgtatcaacaatacaattgttcgttgatttttcttgatagcaaagtaaagtaaaccaaccttctcttgaaagaaagaaatagagagaaagattagacggaggccgattaagcaga

SEQ ID NO: 220983 - DNA, 4715 bp, Zea Mays
acgacgaatccggcactcgcaaccaccgcatccgtcctcgtctggtccggttgcctactcccctcccactgccccgctgctgctgcctccccgcgcaatggcgccgagatccccgcgctgagcgagcctcccgggggtcgacctccgaaccggcgctgccgtcccgcagtgcacttgaagaccaggcagctgttctctactcaaggaagagatggcccatgtttcgttcaaaagcaaagatgtggacagcggcatgtcccggtggtctgaatacctaagtgttgaagagccaattccttccgcaatggcaacctggaggaacatgagcgctgatgcgccgcaaggctcttctgctggtagccacaaacatcttcagatggagccggtggttcagctgtccaaggttgcggaaggcttgctggccaaaatgtaccggctgaacagcatcctggactatccagatccaaacacgcacacattctcggatgcattttggaaagctggtgtctttccaaatttccccaaaatttgcatcacgatgtcaaaaaaatttccggaacatcctaacaagctgcagctagaaagggtagataagtttggtcttgatgctttaaacgagaatgctgaaggttacatgcacaatcttgagcagtggatcctgttgcttcttgatttgctggcatttcgtgaacaagctttgcgacttattttggatttgagcagcacggtcataacattgctgccacaccaaaactctttaattcttcatgcttttatggatctgttttgttcatttgtccgagtgaatcttttctctgacaagatgccaagaaagatgatcctccaggtttataacatcttgcacataatgctaaagggtggtcgtgattgtgagttttatcaccgactggttcagtttgtggactcttatgatccacctatcaaggggttgcatgaagatcttaattttgtgagcccaagaattggagaggtcctggaagctgttggcccaattatatttctttcaactgatacaaaaaagttaaggaacgaaggtttcctcagtccatttcatccacgttatccagacatcctaacaaattctgcccatccaatgagggcccaagacttggctaatgtcacatcataccgtgagtgggttcttctaggatatcttgtttgtcctgatgaactacttagggtgaccagtatagatgttgccatggttgttctgaaagagaacttaatacttcctctgttcagagatgagtacatcttacttcatgaaaattatcaactttatgttcttccaaaagttctagaatcgaagagaatggctaaatctggccgaactaagcaaaaggaagctgatctggagtacaatgttgcaaagcaggttgagagaatgttaacggaagtgcatgagcaagcactggtgtcatgtgatgctatgcatcgtgagaggagaattcttcttaagcaggaaattggaaggatggttttatttttcactgatcaacctagcctcctagcacctaatattcagatggttttttctgctcttgctttgtctcaatgcgaggtgatttggtacttccaacatgtggggattgcatcatcaaaatctactcggttgaaaactgttgacattgtgagttactccgcaattattttttccttggattcaataagtcgttgttccagtattctattgctttctaaaagcagaggtttcttgtcatctcaaaaaagaaatgttgttcccttccatactaattgttgactgaactttcaggatgcgacagacccaactattggtttcttactagatggaataggcaaactttgttgcctgcaataaaaggttatgccttatcatatttgttatccagtgctggaagaatacggttcttacttggtactccaggaatggttgctcttgacctagatgcgacactgaaaggcctttttcagcaagtcctccattgtctggagaacattccaaaacctcagggggaaagtgttcctgacattaccgctgacttggctgatttgcgtaagcactggctgtcaatcttgatgatagtcacatcttcacgatcctcgataaacattaagcacttggagaaggctactgtgtctactgggaaggagggtttggtgtcagaaggcaatgctgcatataattggtcaagatgtgttgatgaacttgagagccaactctccaaacatggaagccttaaaaaactctacttttatcatcagcatcttaccacggtcttcagaaatacaatgtttggcccagaaggtcgtccacagcattgttgtgcttggcttggagccgcttgcagttttccagaatgtgcttctgcaattattcctgaagaggttaacaaaattggcagagattctatctcttatgtggagtcccttatcgagtctatcatgggtgggttggaaggtttgataaatattctagattcagaaggtggatttggctcattagagatgcagctttccccagagcaagcagctcttcgcttaaataacacaagagcaaagggtgtttcaagcttgttaactccaggatatgagagctatcctgataacagttcatcaattaagatgctggaagctgctatgcaaaggctgacaagtttgtgttctgttctaaatgacatggagcctattggtgttctcaaccatgtttttgttctacgcgagtacatgagagactgcatcataggaaatttcaggagaagatttcatagtatgattagaactgagaactgcattcagcgaccatcaatcatagaatctcttctaagaagacatctgggcatcatccatctagcagagcagcatattagtatggaccttactgaaggcatacgtgaagtgctgctagctgagagttatactggtccatttcccaatcttcaaatgtttgagactccagtggggacacaaggaggggggtctgccgttgagatgatatgcaactggtatattgagaatgtagtaaaggacgcttctcgcattggagttgcttttgatgcaatccaaaattgcttcaggagctcacagcctattggtggtggatgtttggctgaatcatttacagataaaagagaaatgaaatcacttgttcgtctttttggtggctatggaatagataaaatggataagatgctaagggagcatacgtctgcgcttttaaactgtatcgattcagcattgaggtcaaatcgtgatgccttagagggcctagctggaactgtaaattccggcgataggattgaaagggatgtgaacctgaaacaaattattgacctcgaaacactggctgacctctgtattcaagcagggcaggcaataactttccgtcggctgttggttgaggccgtcggagcagtccttgaagagaaagtgcctctgatatattctctgctcaaaggattagccttgcagttgccagacgaggtacctgataaaaatgagataattagattgagaaaggttgcgagcagtgttggtgttggcgacaaacatgatgctgagtgggtacactctattctggcagacgctggtgcagctaatgataattcttggatcctacttccatacctttgtgctgcattcatggtgtccaacatttggaacggtgctgtttatgatgtcaatataggtggactcagtaacaatttgcactgcctagcaaggtgtgtaagtgctgtgattgggggaagcgaatacactcgggtcgaaagggagcagcgaataaattctctttcaaatgtgcatacagatgagctgcaagaggccgagttaccgagccgtgtctcagcagaagcaaatatcaaatcttgtatgcagatctacgtcaaactgtctgcagggatcgtcctggattcatggaacgacacaagcaggcagcacatcgtcccgaagctgacattcctggaccagctctgcgagctgtccccgtacgtgccaaggagcaccttagaagctcacatcccatacaccatcctgcgctcgatataccaccagctgtacggaggctctctgctggcctcggaaccggcggagcagtccccaaggcagtcgcctctcatctctctggcacacgcgtccccgtccgcaaggcagatgcagaaccgaccagagacaacacccaggtcccacaccttcgacccaggctactacagctcgtcggggtcccagcacgacgatggctacgacgcggataggaggaccggacggctgctgcggagcttgaggcgctctggaccgctcgacttcggtgcgagcagaaaggcgaagaagttcgtcgagggctccagctccgggagcagccatggagctggctcgctgcagaggttcgcagtgtccagatctggccctctatcgtacagatagggccgcatgtaatgtaaactctagagagcagtagatcttcctatgcgtgctggtttacgtagctagcagtagcaacagcagcagctagttgtgctgtaagtaaaacccattaattgcttaatttgtgttgactgtcgttaggcaagtgatttgaattagctgttgctcgtttggtttgtgtatcaacaatacaattgttcgttgatttttcttgatagcaaagtaaagtaaaccaaccttctcttgaaagaaagaaatagagagaaagattagacggaggccgattaagcaga

SEQ ID NO: 220984 - DNA, 4656 bp, Zea Mays
acgacgaatccggcactcgcaaccaccgcatccgtcctcgtctggtccggttgcctactcccctcccactgccccgctgctgctgcctccccgcgcaatggcgccgagatccccgcgctgagcgagcctcccgggggtcgacctccgaaccggcgctgccgtcccgcagtgcacttgaagaccaggcagctgttctctactcaaggaagagatggcccatgtttcgttcaaaagcaaagatgtggacagcggcatgtcccggtggtctgaatacctaagtgttgaagagccaattccttccgcaatggcaacctggaggaacatgagcgctgatgcgccgcaaggctcttctgctggtagccacaaacatcttcagatggagccggtggttcagctgtccaaggttgcggaaggcttgctggccaaaatgtaccggctgaacagcatcctggactatccagatccaaacacgcacacattctcggatgcattttggaaagctggtgtctttccaaatttccccaaaatttgcatcacgatgtcaaaaaaatttccggaacatcctaacaagctgcagctagaaagggtagataagtttggtcttgatgctttaaacgagaatgctgaaggttacatgcacaatcttgagcagtggatcctgttgcttcttgatttgctggcatttcgtgaacaagctttgcgacttattttggatttgagcagcacggtcataacattgctgccacaccaaaactctttaattcttcatgcttttatggatctgttttgttcatttgtccgagtgaatcttttctctgacaagatgccaagaaagatgatcctccaggtttataacatcttgcacataatgctaaagggtggtcgtgattgtgagttttatcaccgactggttcagtttgtggactcttatgatccacctatcaaggggttgcatgaagatcttaattttgtgagcccaagaattggagaggtcctggaagctgttggcccaattatatttctttcaactgatacaaaaaagttaaggaacgaaggtttcctcagtccatttcatccacgttatccagacatcctaacaaattctgcccatccaatgagggcccaagacttggctaatgtcacatcataccgtgagtgggttcttctaggatatcttgtttgtcctgatgaactacttagggtgaccagtatagatgttgccatggttgttctgaaagagaacttaatacttcctctgttcagagatgagtacatcttacttcatgaaaattatcaactttatgttcttccaaaagttctagaatcgaagagaatggctaaatctggccgaactaagcaaaaggaagctgatctggagtacaatgttgcaaagcaggttgagagaatgttaacggaagtgcatgagcaagcactggtgtcatgtgatgctatgcatcgtgagaggagaattcttcttaagcaggaaattggaaggatggttttatttttcactgatcaacctagcctcctagcacctaatattcagatggttttttctgctcttgctttgtctcaatgcgaggtgatttggtacttccaacatgtggggattgcatcatcaaaatctactcggttgaaaactgttgacattgatgcgacagacccaactattggtttcttactagatggaataggcaaactttgttgcctggttcgtaaatacatagcagcaataaaaggttatgccttatcatatttgttatccagtgctggaagaatacggttcttacttggtactccaggaatggttgctcttgacctagatgcgacactgaaaggcctttttcagcaagtcctccattgtctggagaacattccaaaacctcagggggaaagtgttcctgacattaccgctgacttggctgatttgcgtaagcactggctgtcaatcttgatgatagtcacatcttcacgatcctcgataaacattaagcacttggagaaggctactgtgtctactgggaaggagggtttggtgtcagaaggcaatgctgcatataattggtcaagatgtgttgatgaacttgagagccaactctccaaacatggaagccttaaaaaactctacttttatcatcagcatcttaccacggtcttcagaaatacaatgtttggcccagaaggtcgtccacagcattgttgtgcttggcttggagccgcttgcagttttccagaatgtgcttctgcaattattcctgaagaggttaacaaaattggcagagattctatctcttatgtggagtcccttatcgagtctatcatgggtgggttggaaggtttgataaatattctagattcagaaggtggatttggctcattagagatgcagagcaagcagctcttcgcttaaataacacaagagcaaagggtgtttcaagcttgttaactccaggatatgagagctatcctgataacagttcatcaattaagatgctggaagctgctatgcaaaggctgacaagtttgtgttctgttctaaatgacatggagcctattggtgttctcaaccatgtttttgttctacgcgagtacatgagagactgcatcataggaaatttcaggagaagatttcatagtatgattagaactgagaactgcattcagcgaccatcaatcatagaatctcttctaagaagacatctgggcatcatccatctagcagagcagcatattagtatggaccttactgaaggcatacgtgaagtgctgctagctgagagttatactggtccatttcccaatcttcaaatgtttgagactccagtggggacacaaggaggggggtctgccgttgagatgatatgcaactggtatattgagaatgtagtaaaggacgcttctcgcattggagttgcttttgatgcaatccaaaattgcttcaggagctcacagcctattggtggtggatgtttggctgaatcatttacagataaaagagaaatgaaatcacttgttcgtctttttggtggctatggaatagataaaatggataagatgctaagggagcatacgtctgcgcttttaaactgtatcgattcagcattgaggtcaaatcgtgatgccttagagggcctagctggaactgtaaattccggcgataggattgaaagggatgtgaacctgaaacaaattattgacctcgaaacactggctgacctctgtattcaagcagggcaggcaataactttccgtcggctgttggttgaggccgtcggagcagtccttgaagagaaagtgcctctgatatattctctgctcaaaggattagccttgcagttgccagacgaggtacctgataaaaatgagataattagattgagaaaggttgcgagcagtgttggtgttggcgacaaacatgatgctgagtgggtacactctattctggcagacgctggtgcagctaatgataattcttggatcctacttccatacctttgtgctgcattcatggtgtccaacatttggaacggtgctgtttatgatgtcaatataggtggactcagtaacaatttgcactgcctagcaaggtatggactgactctatgtttgatgtcaaaaatcgttagttgtgggtatgtaagtgctgtgattgtatttgtgcaggtgtgtaagtgctgtgattgggggaagcgaatacactcgggtcgaaagggagcagcgaataaattctctttcaaatgtgcatacagatgagctgcaagaggccgagttaccgagccgtgtctcagcagaagcaaatatcaaatcttgtatgcagatctacgtcaaactgtctgcagggatcgtcctggattcatggaacgacacaagcaggcagcacatcgtcccgaagctgacattcctggaccagctctgcgagctgtccccgtacgtgccaaggagcaccttagaagctcacatcccatacaccatcctgcgctcgatataccaccagctgtacggaggctctctgctggcctcggaaccggcggagcagtccccaaggcagtcgcctctcatctctctggcacacgcgtccccgtccgcaaggcagatgcagaaccgaccagagacaacacccaggtcccacaccttcgacccaggctactacagctcgtcggggtcccagcacgacgatggctacgacgcggataggaggaccggacggctgctgcggagcttgaggcgctctggaccgctcgacttcggtgcgagcagaaaggcgaagaagttcgtcgagggctccagctccgggagcagccatggagctggctcgctgcagaggttcgcagtgtccagatctggccctctatcgtacagatagggccgcatgtaatgtaaactctagagagcagtagatcttcctatgcgtgctggtttacgtagctagcagtagcaacagcagcagctagttgtgctgtaagtaaaacccattaattgcttaatttgtgttgactgtcgttaggcaagtgatttgaattagctgttgctcgtttggtttgtgtatcaacaatacaattgttcgttgatttttcttgatagcaaagtaaagtaaaccaaccttctcttgaaagaaagaaatagagagaaagattagacggaggccgattaagcaga

SEQ ID NO: 220985 - DNA, 4558 bp, Zea Mays
acgacgaatccggcactcgcaaccaccgcatccgtcctcgtctggtccggttgcctactcccctcccactgccccgctgctgctgcctccccgcgcaatggcgccgagatccccgcgctgagcgagcctcccgggggtcgacctccgaaccggcgctgccgtcccgcagtgcacttgaagaccaggcagctgttctctactcaaggaagagatggcccatgtttcgttcaaaagcaaagatgtggacagcggcatgtcccggtggtctgaatacctaagtgttgaagagccaattccttccgcaatggcaacctggaggaacatgagcgctgatgcgccgcaaggctcttctgctggtagccacaaacatcttcagatggagccggtggttcagctgtccaaggttgcggaaggcttgctggccaaaatgtaccggctgaacagcatcctggactatccagatccaaacacgcacacattctcggatgcattttggaaagctggtgtctttccaaatttccccaaaatttgcatcacgatgtcaaaaaaatttccggaacatcctaacaagctgcagctagaaagggtagataagtttggtcttgatgctttaaacgagaatgctgaaggttacatgcacaatcttgagcagtggatcctgttgcttcttgatttgctggcatttcgtgaacaagctttgcgacttattttggatttgagcagcacggtcataacattgctgccacaccaaaactctttaattcttcatgcttttatggatctgttttgttcatttgtccgagtgaatcttttctctgacaagatgccaagaaagatgatcctccaggtttataacatcttgcacataatgctaaagggtggtcgtgattgtgagttttatcaccgactggttcagtttgtggactcttatgatccacctatcaaggggttgcatgaagatcttaattttgtgagcccaagaattggagaggtcctggaagctgttggcccaattatatttctttcaactgatacaaaaaagttaaggaacgaaggtttcctcagtccatttcatccacgttatccagacatcctaacaaattctgcccatccaatggttgttctgaaagagaacttaatacttcctctgttcagagatgagtacatcttacttcatgaaaattatcaactttatgttcttccaaaagttctagaatcgaagagaatggctaaatctggccgaactaagcaaaaggaagctgatctggagtacaatgttgcaaagcaggttgagagaatgttaacggaagtgcatgagcaagcactggtgtcatgtgatgctatgcatcgtgagaggagaattcttcttaagcaggaaattggaaggatggttttatttttcactgatcaacctagcctcctagcacctaatattcagatggttttttctgctcttgctttgtctcaatgcgaggtgatttggtacttccaacatgtggggattgcatcatcaaaatctactcggttgaaaactgttgacattgatgcgacagacccaactattggtttcttactagatggaataggcaaactttgttgcctggttcgtaaatacatagcagcaataaaaggttatgccttatcatatttgttatccagtgctggaagaatacggttcttacttggtactccaggaatggttgctcttgacctagatgcgacactgaaaggcctttttcagcaagtcctccattgtctggagaacattccaaaacctcagggggaaagtgttcctgacattaccgctgacttggctgatttgcgtaagcactggctgtcaatcttgatgatagtcacatcttcacgatcctcgataaacattaagcacttggagaaggctactgtgtctactgggaaggagggtttggtgtcagaaggcaatgctgcatataattggtcaagatgtgttgatgaacttgagagccaactctccaaacatggaagccttaaaaaactctacttttatcatcagcatcttaccacggtcttcagaaatacaatgtttggcccagaaggtcgtccacagcattgttgtgcttggcttggagccgcttgcagttttccagaatgtgcttctgcaattattcctgaagaggttaacaaaattggcagagattctatctcttatgtggagtcccttatcgagtctatcatgggtgggttggaaggtttgataaatattctagattcagaaggtggatttggctcattagagatgcagctttccccagagcaagcagctcttcgcttaaataacacaagagcaaagggtgtttcaagcttgttaactccaggatatgagagctatcctgataacagttcatcaattaagatgctggaagctgctatgcaaaggctgacaagtttgtgttctgttctaaatgacatggagcctattggtgttctcaaccatgtttttgttctacgcgagtacatgagagactgcatcataggaaatttcaggagaagatttcatagtatgattagaactgagaactgcattcagcgaccatcaatcatagaatctcttctaagaagacatctgggcatcatccatctagcagagcagcatattagtatggaccttactgaaggcatacgtgaagtgctgctagctgagagttatactggtccatttcccaatcttcaaatgtttgagactccagtggggacacaaggaggggggtctgccgttgagatgatatgcaactggtatattgagaatgtagtaaaggacgcttctcgcattggagttgcttttgatgcaatccaaaattgcttcaggagctcacagcctattggtggtggatgtttggctgaatcatttacagataaaagagaaatgaaatcacttgttcgtctttttggtggctatggaatagataaaatggataagatgctaagggagcatacgtctgcgcttttaaactgtatcgattcagcattgaggtcaaatcgtgatgccttagagggcctagctggaactgtaaattccggcgataggattgaaagggatgtgaacctgaaacaaattattgacctcgaaacactggctgacctctgtattcaagcagggcaggcaataactttccgtcggctgttggttgaggccgtcggagcagtccttgaagagaaagtgcctctgatatattctctgctcaaaggattagccttgcagttgccagacgaggtacctgataaaaatgagataattagattgagaaaggttgcgagcagtgttggtgttggcgacaaacatgatgctgagtgggtacactctattctggcagacgctggtgcagctaatgataattcttggatcctacttccatacctttgtgctgcattcatggtgtccaacatttggaacggtgctgtttatgatgtcaatataggtggactcagtaacaatttgcactgcctagcaaggtatggactgactctatgtttgatgtcaaaaatcgttagttgtgggtatgtaagtgctgtgattgtatttgtgcaggtgtgtaagtgctgtgattgggggaagcgaatacactcgggtcgaaagggagcagcgaataaattctctttcaaatgtgcatacagatgagctgcaagaggccgagttaccgagccgtgtctcagcagaagcaaatatcaaatcttgtatgcagatctacgtcaaactgtctgcagggatcgtcctggattcatggaacgacacaagcaggcagcacatcgtcccgaagctgacattcctggaccagctctgcgagctgtccccgtacgtgccaaggagcaccttagaagctcacatcccatacaccatcctgcgctcgatataccaccagctgtacggaggctctctgctggcctcggaaccggcggagcagtccccaaggcagtcgcctctcatctctctggcacacgcgtccccgtccgcaaggcagatgcagaaccgaccagagacaacacccaggtcccacaccttcgacccaggctactacagctcgtcggggtcccagcacgacgatggctacgacgcggataggaggaccggacggctgctgcggagcttgaggcgctctggaccgctcgacttcggtgcgagcagaaaggcgaagaagttcgtcgagggctccagctccgggagcagccatggagctggctcgctgcagaggttcgcagtgtccagatctggccctctatcgtacagatagggccgcatgtaatgtaaactctagagagcagtagatcttcctatgcgtgctggtttacgtagctagcagtagcaacagcagcagctagttgtgctgtaagtaaaacccattaattgcttaatttgtgttgactgtcgttaggcaagtgatttgaattagctgttgctcgtttggtttgtgtatcaacaatacaattgttcgttgatttttcttgatagcaaagtaaagtaaaccaaccttctcttgaaagaaagaaatagagagaaagattagacggaggccgattaagcaga

SEQ ID NO: 220986 - DNA, 4689 bp, Zea Mays
cttgccagtaaattgcgtaggcgtaacgacgaatccggcactcgcaaccaccgcatccgtcctcgtctggtccggttgcctactcccctcccactgccccgctgctgctgcctccccgcgcaatggcgccgagatccccgcgctgagcgagcctcccgggggtcgacctccgaaccggcgctgccgtcccgcagtgcacttgaagaccaggcagctgttctctactcaaggaagagatggcccatgtttcgttcaaaagcaaagatgtggacagcggcatgtcccggtggtctgaatacctaagtgttgaagagccaattccttccgcaatggcaacctggaggaacatgagcgctgatgcgccgcaaggctcttctgctggtagccacaaacatcttcagatggagccggtggttcagctgtccaaggttgcggaaggcttgctggccaaaatgtaccggctgaacagcatcctggactatccagatccaaacacgcacacattctcggatgcattttggaaagctggtgtctttccaaatttccccaaaatttgcatcacgatgtcaaaaaaatttccggaacatcctaacaagctgcagctagaaagggtagataagtttggtcttgatgctttaaacgagaatgctgaaggttacatgcacaatcttgagcagtggatcctgttgcttcttgatttgctggcatttcgtgaacaagctttgcgacttattttggatttgagcagcacggtcataacattgctgccacaccaaaactctttaattcttcatgcttttatggatctgttttgttcatttgtccgagtgaatcttttctctgacaagatgccaagaaagatgatcctccaggtttataacatcttgcacataatgctaaagggtggtcgtgattgtgagttttatcaccgactggttcagtttgtggactcttatgatccacctatcaaggggttgcatgaagatcttaattttgtgagcccaagaattggagaggtcctggaagctgttggcccaattatatttctttcaactgatacaaaaaagttaaggaacgaaggtttcctcagtccatttcatccacgttatccagacatcctaacaaattctgcccatccaatgggcccaagacttggctaatgtcacatcataccgtgagtgggttcttctaggatatcttgtttgtcctgatgaactacttagggtgaccagtatagatgttgccatggttgttctgaaagagaacttaatacttcctctgttcagagatgagtacatcttacttcatgaaaattatcaactttatgttcttccaaaagttctagaatcgaagagaatggctaaatctggccgaactaagcaaaaggaagctgatctggagtacaatgttgcaaagcaggttgagagaatgttaacggaagtgcatgagcaagcactggtgtcatgtgatgctatgcatcgtgagaggagaattcttcttaagcaggaaattggaaggatggttttatttttcactgatcaacctagcctcctagcacctaatattcagatggttttttctgctcttgctttgtctcaatgcgaggtgatttggtacttccaacatgtggggattgcatcatcaaaatctactcggttgaaaactgttgacattgatgcgacagacccaactattggtttcttactagatggaataggcaaactttgttgcctggttcgtaaatacatagcagcaataaaaggttatgccttatcatatttgttatccagtgctggaagaatacggttcttacttggtactccaggaatggttgctcttgacctagatgcgacactgaaaggcctttttcagcaagtcctccattgtctggagaacattccaaaacctcagggggaaagtgttcctgacattaccgctgacttggctgatttgcgtaagcactggctgtcaatcttgatgatagtcacatcttcacgatcctcgataaacattaagcacttggagaaggctactgtgtctactgggaaggagggtttggtgtcagaaggcaatgctgcatataattggtcaagatgtgttgatgaacttgagagccaactctccaaacatggaagccttaaaaaactctacttttatcatcagcatcttaccacggtcttcagaaatacaatgtttggcccagaaggtcgtccacagcattgttgtgcttggcttggagccgcttgcagttttccagaatgtgcttctgcaattattcctgaagaggttaacaaaattggcagagattctatctcttatgtggagtcccttatcgagtctatcatgggtgggttggaaggtttgataaatattctagattcagaaggtggatttggctcattagagatgcagctttccccagagcaagcagctcttcgcttaaataacacaagagcaaagggtgtttcaagcttgttaactccaggatatgagagctatcctgataacagttcatcaattaagatgctggaagctgctatgcaaaggctgacaagtttgtgttctgttctaaatgacatggagcctattggtgttctcaaccatgtttttgttctacgcgagtacatgagagactgcatcataggaaatttcaggagaagatttcatagtatgattagaactgagaactgcattcagcgaccatcaatcatagaatctcttctaagaagacatctgggcatcatccatctagcagagcagcatattagtatggaccttactgaaggcatacgtgaagtgctgctagctgagagttatactggtccatttcccaatcttcaaatgtttgagactccagtggggacacaaggaggggggtctgccgttgagatgatatgcaactggtatattgagaatgtagtaaaggacgcttctcgcattggagttgcttttgatgcaatccaaaattgcttcaggagctcacagcctattggtggtggatgtttggctgaatcatttacagataaaagagaaatgaaatcacttgttcgtctttttggtggctatggaatagataaaatggataagatgctaagggagcatacgtctgcgcttttaaactgtatcgattcagcattgaggtcaaatcgtgatgccttagagggcctagctggaactgtaaattccggcgataggattgaaagggatgtgaacctgaaacaaattattgacctcgaaacactggctgacctctgtattcaagcagggcaggcaataactttccgtcggctgttggttgaggccgtcggagcagtccttgaagagaaagtgcctctgatatattctctgctcaaaggattagccttgcagttgccagacgaggtacctgataaaaatgagataattagattgagaaaggttgcgagcagtgttggtgttggcgacaaacatgatgctgagtgggtacactctattctggcagacgctggtgcagctaatgataattcttggatcctacttccatacctttgtgctgcattcatggtgtccaacatttggaacggtgctgtttatgatgtcaatataggtggactcagtaacaatttgcactgcctagcaaggtatggactgactctatgtttgatgtcaaaaatcgttagttgtgggtatgtaagtgctgtgattgtatttgtgcaggtgtgtaagtgctgtgattgggggaagcgaatacactcgggtcgaaagggagcagcgaataaattctctttcaaatgtgcatacagatgagctgcaagaggccgagttaccgagccgtgtctcagcagaagcaaatatcaaatcttgtatgcagatctacgtcaaactgtctgcagggatcgtcctggattcatggaacgacacaagcaggcagcacatcgtcccgaagctgacattcctggaccagctctgcgagctgtccccgtacgtgccaaggagcaccttagaagctcacatcccatacaccatcctgcgctcgatataccaccagctgtacggaggctctctgctggcctcggaaccggcggagcagtccccaaggcagtcgcctctcatctctctggcacacgcgtccccgtccgcaaggcagatgcagaaccgaccagagacaacacccaggtcccacaccttcgacccaggctactacagctcgtcggggtcccagcacgacgatggctacgacgcggataggaggaccggacggctgctgcggagcttgaggcgctctggaccgctcgacttcggtgcgagcagaaaggcgaagaagttcgtcgagggctccagctccgggagcagccatggagctggctcgctgcagaggttcgcagtgtccagatctggccctctatcgtacagatagggccgcatgtaatgtaaactctagagagcagtagatcttcctatgcgtgctggtttacgtagctagcagtagcaacagcagcagctagttgtgctgtaagtaaaacccattaattgcttaatttgtgttgactgtcgttaggcaagtgatttgaattagctgttgctcgtttggtttgtgtatcaacaatacaattgttcgttgatttttcttgatagcaaagtaaagtaaaccaaccttctcttgaaagaaagaaatagagagaaagattagacggaggccgattaagcaga

SEQ ID NO: 220987 - DNA, 4663 bp, Zea Mays
gcagaagtgggccccgccgcgcagcgtcacgagagagggggtggggcgcttgccagtaaattgcgtaggcgtaacgacgaatccggcactcgcaaccaccgcatccgtcctcgtctggtccggttgcctactcccctcccactgccccgctgctgctgcctccccgcgcaatggcgccgagatccccgcgctgagcgagcctcccgggggtcgacctccgaaccggcgctgccgtcccgcagtgcacttgaagaccaggcagctgttctctactcaaggaagagatggcccatgtttcgttcaaaagcaaagatgtggacagcggcatgtcccggtggtctgaatacctaagtgttgaagagccaattccttccgcaatggcaacctggaggaacatgagcgctgatgcgccgcaaggctcttctgctggtagccacaaacatcttcagatggagccggtggttcagctgtccaaggttgcggaaggcttgctggccaaaatgtaccggctgaacagcatcctggactatccagatccaaacacgcacacattctcggatgcattttggaaagctggtgtctttccaaatttccccaaaatttgcatcacgatgtcaaaaaaatttccggaacatcctaacaagctgcagctagaaagggtagataagtttggtcttgatgctttaaacgagaatgctgaaggttacatgcacaatcttgagcagtggatcctgttgcttcttgatttgctggcatttcgtgaacaagctttgcgacttattttggatttgagcagcacggtcataacattgctgccacaccaaaactctttaattcttcatgcttttatggatctgttttgttcatttgtccgagtgaatcttttctctgacaagatgccaagaaagatgatcctccaggtttataacatcttgcacataatgctaaagggtggtcgtgattgtgagttttatcaccgactggttcagtttgtggactcttatgatccacctatcaaggggttgcatgaagatcttaattttgtgagcccaagaattggagaggtcctggaagctgttggcccaattatatttctttcaactgatacaaaaaagttaaggaacgaaggtttcctcagtccatttcatccacgttatccagacatcctaacaaattctgcccatccaatgagggcccaagacttggctaatgtcacatcataccgtgagtgggttcttctaggatatcttgtttgtcctgatgaactacttagggtgaccagtatagatgttgccatggttgttctgaaagagaacttaatacttcctctgttcagagatgagtacatcttacttcatgaaaattatcaactttatgttcttccaaaagttctagaatcgaagagaatggctaaatctggccgaactaagcaaaaggaagctgatctggagtacaatgttgcaaagcaggttgagagaatgttaacggaagtgcatgagcaagcactggtgtcatgtgatgctatgcatcgtgagaggagaattcttcttaagcaggaaattggaaggatggttttatttttcactgatcaacctagcctcctagcacctaatattcagatggttttttctgctcttgctttgtctcaatgcgaggtgatttggtacttccaacatgtggggattgcatcatcaaaatctactcggttgaaaactgttgacattgatgcgacagacccaactattggtttcttactagatggaataggcaaactttgttgcctggttcgtaaatacatagcagcaataaaaggttatgccttatcatatttgttatccagtgctggaagaatacggttcttacttggtactccaggaatggttgctcttgacctagatgcgacactgaaaggcctttttcagcaagtcctccattgtctggagaacattccaaaacctcagggggaaagtgttcctgacattaccgctgacttggctgatttgcgtaagcactggctgtcaatcttgatgatagtcacatcttcacgatcctcgataaacattaagcacttggagaaggctactgtgtctactgggaaggagggtttggtgtcagaaggcaatgctgcatataattggtcaagatgtgttgatgaacttgagagccaactctccaaacatggaagccttaaaaaactctacttttatcatcagcatcttaccacggtcttcagaaatacaatgtttggcccagaaggtcgtccacagcattgttgtgcttggcttggagccgcttgcagttttccagaatgtgcttctgcaattattcctgaagaggttaacaaaattggcagagattctatctcttatgtggagtcccttatcgagtctatcatgggtgggttggaaggtttgataaatattctagattcagaaggtggatttggctcattagagatgcagctttccccagagcaagcagctcttcgcttaaataacacaagagcaaagggtgtttcaagcttgttaactccaggatatgagagctatcctgataacagttcatcaattaagatgctggaagctgctatgcaaaggctgacaagtttgtgttctgttctaaatgacatggagcctattggtgttctcaaccatgtttttgttctacgcgagtacatgagagactgcatcataggaaatttcaggagaagatttcatagtatgattagaactgagaactgcattcagcgaccatcaatcatagaatctcttctaagaagacatctgggcatcatccatctagcagagcagcatattagtatggaccttactgaaggcatacgtgaagtgctgctagctgagagttatactggtccatttcccaatcttcaaatgtttgagactccagtggggacacaaggaggggggtctgccgttgagatgatatgcaactggtatattgagaatgtagtaaaggacgcttctcgcattggagttgcttttgatgcaatccaaaattgcttcaggagctcacagcctattggtggtggatgtttggctgaatcatttacagataaaagagaaatgaaatcacttgttcgtctttttggtggctatggaatagataaaatggataagatgctaagggagcatacgtctgcgcttttaaactgtatcgattcagcattgaggtcaaatcgtgatgccttagagggcctagctggaactgtaaattccggcgataggattgaaagggatgtgaacctgaaacaaattattgacctcgaaacactggctgacctctgtattcaagcagggcaggcaataactttccgtcggctgttggttgaggccgtcggagcagtccttgaagagaaagtgcctctgatatattctctgctcaaaggattagccttgcagttgccagacgaggtacctgataaaaatgagataattagattgagaaaggttgcgagcagtgttggtgttggcgacaaacatgatgctgagtgggtacactctattctggcagacgctggtgcagctaatgataattcttggatcctacttccatacctttgtgctgcattcatggtgtccaacatttggaacggtgctgtttatgatgtcaatataggtggactcagtaacaatttgcactgcctagcaaggtgtgtaagtgctgtgattgggggaagcgaatacactcgggtcgaaagggagcagcgaataaattctctttcaaatgtgcatacagatgagctgcaagaggccgagttaccgagccgtgtctcagcagaagcaaatatcaaatcttgtatgcagatctacgtcaaactgtctgcagggatcgtcctggattcatggaacgacacaagcaggcagcacatcgtcccgaagctgacattcctggaccagctctgcgagctgtccccgtacgtgccaaggagcaccttagaagctcacatcccatacaccatcctgcgctcgatataccaccagctgtacggaggctctctgctggcctcggaaccggcggagcagtccccaaggcagtcgcctctcatctctctggcacacgcgtccccgtccgcaaggcagatgcagaaccgaccagagacaacacccaggtcccacaccttcgacccaggctactacagctcgtcggggtcccagcacgacgatggctacgacgcggataggaggaccggacggctgctgcggagcttgaggcgctctggaccgctcgacttcggtgcgagcagaaaggcgaagaagttcgtcgagggctccagctccgggagcagccatggagctggctcgctgcagaggttcgcagtgtccagatctggccctctatcgtacagatagggccgcatgtaatgtaaactctagagagcagtagatcttcctatgcgtgctggtttacgtagctagcagtagcaacagcagcagctagttgtgctgtaagtaaaacccattaattgcttaatttgtgttgactgtcgttaggcaagtgatttgaattagctgttgctcgtttggtttgtgtatcaacaatacaattgttcgttgatttttcttgatagcaaagtaaagtaaaccaaccttctcttgaaagaaagaaatagagagaaagattagacggaggccgattaagcaga

SEQ ID NO: 220988 - DNA, 1246 bp, Zea Mays
actcaaacccgtaggtttttatccacgtgccgccgcaccggccaaccccgcgcccctcgaccgtctccgtcgccgcgccacccgcaccgggacccagtatggccgcctccggcgcatatccgggcacggcgttcaagatactcctctcctgccccgacggcctccctcgctcccgcgtttcggtgaagtttggtcggtcattcgacaggattccccatcctgatgcagccttggaggaatctataagtgaggtgtgggaccaaagccttcagcggaacccatatctatacagcggtacaaagtttcgggtatgtatttttagctctaccttggtatgctcgtttttttctgctccgttgatacttgaagtcctgaagatgctacaatttactggtaaacacgtatttaactaaagaaaactggaagcttcttgcatgttaagtgatttggtgcatgctttatagaaagacaatctctctgtatatgtatctgttctactgcattcaccagcaggtagtagaatgtaaatactgacaacaatcaagaatttcagtatggaggaaatgccttgcactacaaagatgactcagatcatgatcttgagtactgtgtctcacttcatttgggtctcacagactacaggacatttgtgggaacaaatctcaatccattgtgggaattttttttggttccatctgaagatgattctgtacattgccaacacttgtcagatgcactgggaaatggtgctatagttgaaacatctgacaaaaagattattgtattgcaaaggagctacaatgtggcggactatccaggatactatgttttccctggaggacactcggagccgcaagaaattggaatcatgggtcatcaaactgatgaagaagactttgctagtctcactgaacgagtttcacaagaaatgtttgacggagtcatccgtgaagtggttgaggaaactggagttcctgctagctccctaactgatcctgtcttcattggagtttcccgccgagaagttaacgttaggccgactgcgttcttttttacaaaatgtaacattgattccagtggcgtaagcgagctttattctagagctcaagatggctatgaatctactaaactctacacagtatccgttgaagagctacaaggaatgaggcagcggatgcctggatgccacaacggtggtattgctctgtatgagttgatgaggaatgctgcaaaaaaaaaaaagttt

SEQ ID NO: 220989 - DNA, 1453 bp, Zea Mays
ctaaataggccctcaaatattatgaagtttcggtgaagtttggtcggtcattcgacaggattccccatcctgatgcagccttggaggaatctataagtgaggtgtgggaccaaagccttcagcggaacccatatctatacagcggtacaaagtttcggtatggaggaaatgccttgcactacaaagatgactcagatcatgatcttgagtactgtgtctcacttcatttgggtctcacagactacaggacatttgtgggaacaaatctcaatccattgtgggaattttttttggttccatctgaagatgattctgtacattgccaacacttgtcagatgcactgggaaatggtgctatagttgaaacatctgacaaaaagattattgtattgcaaaggagctacaatgtggcggactatccaggatactatgttttccctggaggacactcggagccgcaagaaattggaatcatgggtcatcaaactgatgaagaagactttgctagtctcactgaacgagtttcacaagaaatgtttgacggagtcatccgtgaagtggttgaggaaactggagttcctgctagctccctaactgatcctgtcttcattggagtttcccgccgagaagttaacgttaggccgactgcgttcttttttacaaaatgtaacattgattccagtggcgtaagcgagctttattctagagctcaagatggctatgaatctactaaactctacacagtatccgttgaagagctacaaggaatgaggcagcggatgcctggatgccacaacggtggtattgctctgtatgagttgatgaggaatgctgcaaaaaaaagtgaagatgtcattgatgaatagttctgatggtgttattacaccacaaacaagtgtggaggtattcgcatctcgtacaaacacccgtgcagaacactgcatgtgacatccatcagattgctgttctttgcagtagatatgtgccatttccatgtttgttgagcctgacataggtctccttagaccgctgcataagtgcccacaaagagcatgaagcttaaagtttcctctgaatactaccggaataaatttcatctccggatgtaccaccaaaggaggcacaccagagcggcatcatgatgctaatctacatggtgagatgacccgtggattgtaatgttctttcaggattgaatttcctgggcaagtgatgcctgaatctgtcagctgttcttctgttggtttctgctgtagcggtgtactaggagtatgtaggaaccgaaggtgaagcttacattactttgctctgagaacgtttatatacttgttacctttggtatggatatactagttcgtgctagggtatggattctacatatttcatcttgacttttatcgcttcacacaattgccatcttggtgaattcgagtatagcctgtggatgtttctt

SEQ ID NO: 220990 - DNA, 1278 bp, Zea Mays
attcattgtacactaattctgtgtactagtctccatgtctggagctagtagagtttgctgtggaatgttagaaggaaatgcatatagaaaaactcccagaaggaaaataacgaataaggaaggcaatattgttgacaaagatgttcacatctaggaaggaaaatgcaaatctgaactttattgagccattaaagaactcttcttggacacataaaaaacttttcatgtcctgtctctcctgatagatcaacacccaaagagaagccacaaaagagagacaggagtgaaggaaagaagcaaaagggtggctcttcaggagctggatctggttttctcgtgccccttcaactttcggatgatttagtaaaatttatcggcactggtgagagcatgttatcacgatctgatgtcgtgaagaaaatgtgggattacataaaagggaacaacctgcaggatccttctgaccggaggaaaataatctgcgatgagaagctgaaggacctatttggagtggaaacattcaccggctttactgtttcgaagctgcttgcccctcattttaccaagacgaagtagcaacctgccatccacatcttctaaaaccaaaaaggcttggtaattttgtttttgcagaatgtgtaatcatggaacagttaggagctatgtgggtggtgtgaatttttttttgtttacctatgggagtcgatggcactttttcgaacattaccagtaaagtaggctccttcctcaatgtctaatggaagttatcaactggtcactaaccatttcgcgctctccaaaaatgtagggacataaaattatctgtgcggtgtggcttctagtgcgttcttcccgagttcatggtccaccatttttcatgctcagggttgaggatgacattgctcggtctcctcagatgaccctagtggtcatggaaccgtaaagacaaggggggagcactagcgcttgtcgcctagggtttcagggttctccacttgccagtgaatctttcatcctttttagctcctgatatggatgaagtttgtagcactagcgcaaccgccttttgctgttccttcccactcacttggtaccggttgttcagaggacgccagtttatatttgtatggaccacctaaactgaagctgttttgtcatgtgggtggcatggcgaagtgggtcgatatcgcgacggttctgtaacgcgatcttgcgctgtttccaactgctggtgccatttgcctgtcagttcaaagttaaattgtgttcagattctgg

SEQ ID NO: 220991 - DNA, 351 bp, Zea Mays
caaagatgttcacatctaggaaggaaaatgcaaatctgaactttattgagccattaaagaactcttcttggacacataaaaaacttttcatgtcctgtctctcctgatagatcaacacccaaagagaagccacaaaagagagacaggagtgaaggaaagaagcaaaagggtggctcttcaggagctggatctggttttctcgtgccccttcaactttcggatgatttagtaaaatttatcggcactggtgagagcatgttatcacgatctgatgtcgtgaagaaaatgtgggattacataaaagggaacaacctgcagaattatttggagtttatagtcattgagactgat

SEQ ID NO: 220992 - DNA, 1109 bp, Zea Mays
ctcttcttggacacataaaaaacttttcatgtcctgtctctcctgatagatcaacacccaaagagaagccacaaaagagagacaggagtgaaggaaagaagcaaaagggtggctcttcaggagctggatctggttttctcgtgccccttcaactttcggatgatttagtaaaatttatcggcactggtgagagcatgttatcacgatctgatgtcgtgaagaaaatgtgggattacataaaagggaacaacctgcaggcccttttatttcagtcgccttccagaaataggctgtatgcctatccactatggccaatagccagagttctaaattgcagcagcaaccagccaattactgtcagtaactggaaaaattctagggcacttttgacatgttatgttggacttcttgaaaaccgtcgtgaaagaaaataagagaacataatgcagtgagatgtctcctggctcccagcaaaaggatccttctgaccggaggaaaataatctgcgatgagaagctgaaggacctatttggagtggaaacattcaccggctttactgtttcgaagctgcttgcccctcattttaccaagacgaagtagcaacctgccatccacatcttctaaaaccaaaaaggcttgggacataaaattatctgtgcggtgtggcttctagtgcgttcttcccgagttcatggtccaccatttttcatgctcagggttgaggatgacattgctcggtctcctcagatgaccctagtggtcatggaaccgtaaagacaaggggggagcactagcgcttgtcgcctagggtttcagggttctccacttgccagtgaatctttcatcctttttagctcctgatatggatgaagtttgtagcactagcgcaaccgccttttgctgttccttcccactcacttggtaccggttgttcagaggacgccagtttatatttgtatggaccacctaaactgaagctgttttgtcatgtgggtggcatggcgaagtgggtcgatatcgcgacggttctgtaacgcgatcttgcgctgtttccaactgctggtgccatttgcctgtcagttcaaagttaaattgtgttcagattctgg

SEQ ID NO: 220993 - DNA, 2218 bp, Zea Mays
ccagttgcttgcctggtctctccaactcaccctttttcaccttcggcagtctggctccatccgtctcctgcactgaccttttcctccacgtttccggcaactgcaagcaaccactgatccagcccgttctgtgtcccggcgaatggtgacgaaccaggacgcggatgcggcagcgccaggggcaggggcaacggtagatccgatgcggctagcatcgcggtggcgatcccggccagagtggaactgcgcgtcggcggagctggaggctgagccgtccgagctcaacaccgtcaacagctcgggactcttctccgtcgtctctaccgacaagttatcggtaaaatacctcggcagccatccattgggttcacgagcgagagcttcaagatgaggcgacaaccgggctgggagacaaacagttgtggataccatggtgacgacggccatctttatcggggtcaagggaaaggtgaatcatttgggccaaaattcacatctggtgacataattggtgctggcatcaactacttgtcacaagaatttttcttcacgaaaaatggtactctggttggagccattccaaaagaaattaaaggcccactatatcctaccattgcagttcatagttacggtgaagagtaagcttttacttttttagttgtttaggcgacatataattgctatatggtgtaagttgtgattcaccccaggtcttccaaccttagttgcagaaacatctggcagacttggataataatacctgctccaaaatgcaatttactcatttgtttttttgcgtgttatatgatggttttcctttctagcacgacatataaagtcacaagttgtacgcctcaatagtaacacaagttaatcactccctgtttaattcttagacataactttatttgtaggttctcatataaagatatatagcgagtcaactgttgaatcaatgattaatgttgcaatgtaaagtcttacttaaagaacttatatagattttttatacagttgactgtaaactttggaaaagaaccattctgttttgacgttgagggttatattcttgaggacaaaatgaggcagcaatcagtgtctgataaattgaacttggagccagacatcagccattggattgtccgttcatatctcctacattatggataccaagatacattaaatgcttttgatatggcaaatgcaaccgatcgccccaccagtcgccaaaatggtaatgcagaacctcccgaaatgtatggtcttagccatagaaaacttttgcgtcagcttatcatgagtggagatattgactctacattcaaaagacttcgggagtggtatccgcaagtgataaaggatgagcaatcggttatttgcttcctacttcgttctcaaagattcatagaatatatcagggctgaacaactggaggttgccgtgaaatatggtcgtgctaacctggcaagcttcttcacccacaaagcttttgaggggctgctgaaagatagtgtggccctacttgcgtatgagaagcctacagaatcatgcttgggatacctgatggactcttcccagcgtgaatttgtggcggacgcggtgaacgcggctgtcctgtcgacgaaccccactgtgaaggaccctgagagctgcctttactcgtgtctcgagaggctactaaagcagctcacagtatgtagctttgagcgacgtgcattcaacaactaccaaggagatgcattcttactccacaaagaagtgcagaattatgaaaggtctaggcgctcataggcatcgggtttgatgcgcatctcagaagtaaactcagatgctagactcccaagtctcaactgctctttgaagggacgaaggttcagaaccaagtggtcgaccatgctaagcacaaatccttccccttgatgcagcacccctactttcggaagggtggatacaagatttcacagacagaggtcaggctttcggaaggtgtcttatcctccctgtaatcagaaaactacgtttcagtctccctagttttttttgttggttggctaatatgctgtttgacattgacattgtggatgctaaaaagtaaagatgctttaatgtatgcccacctttgagaacatctgcatcatagttgaaaaacatctaagtcctaggctcctagttgaaaagcatctaggtctaggtctctagttgagttttagtggttaat

SEQ ID NO: 220994 - DNA, 2347 bp, Zea Mays
ccagttgcttgcctggtctctccaactcaccctttttcaccttcggcagtctggctccatccgtctcctgcactgaccttttcctccacgtttccggcaactgcaagcaaccactgatccagcccgttctgtgtcccggcgaatggtgacgaaccaggacgcggatgcggcagcgccaggggcaggggcaacggtagatccgatgcggctagcatcgcggtggcgatcccggccagagtggaactgcgcgtcggcggagctggaggctgagccgtccgagctcaacaccgtcaacagctcgggactcttctccgtcgtctctaccgacaagttatcggtaaaatacctcggcagccatcaccacggccacgacgtcggtgtcgtgcaggccgaccgtcccgcgccgacgcgccgagccgtgtactacttcgagatgggcgtcaggaatgctggatacaaggggcagacatccattgggttcacgagcgagagcttcaagatgaggcgacaaccgggctgggagacaaacagttgtggataccatggtgacgacggccatctttatcggggtcaagggaaaggtgaatcatttgggccaaaattcacatctggtgacataattggtgctggcatcaactacttgtcacaagaatttttcttcacgaaaaatggtactctggttggagccattccaaaagaaattaaaggcccactatatcctaccattgcagttcatagttacggtgaagagtaagcttttacttttttagttgtttaggcgacatataattgctatatggtgtaagttgtgattcaccccaggtcttccaaccttagttgcagaaacatctggcagacttggataataatacctgctccaaaatgcaatttactcatttgtttttttgcgtgttatatgatggttttcctttctagcacgacatataaagtcacaagttgtacgcctcaatagtaacacaagttaatcactccctgtttaattcttagacataactttatttgtaggttctcatataaagatatatagcgagtcaactgttgaatcaatgattaatgttgcaatgtaaagtcttacttaaagaacttatatagattttttatacagtaagtaatttatacctataccttttcattttctatatcctcattgtggggtctgatctctaggctaccccaagttgtttaggactaaaagtctgttcttacaggttgactgtaaactttggaaaagaaccattctgttttgacgttgagggttatattcttgaggacaaaatgaggcagcaatcagtgtctgataaattgaacttggagccagacatcagccattggattgtccgttcatatctcctacattatggataccaagatacattaaatgcttttgatatggcaaatgcaaccgatcgccccaccagtcgccaaaatggtaatgcagaacctcccgaaatgtatggtcttagccatagaaaacttttgcgtcagcttatcatgagtggagatattgactctacattcaaaagacttcgggagtggtatccgcaagtgataaaggatgagcaatcggttatttgcttcctacttcgttctcaaagattcatagaatatatcagggatagtgtggccctacttgcgtatgagaagcctacagaatcatgcttgggatacctgatggactcttcccagcgtgaatttgtggcggacgcggtgaacgcggctgtcctgtcgacgaaccccactgtgaaggaccctgagagctgcctttactcgtgtctcgagaggctactaaagcagctcacagtatgtagctttgagcgacgtgcattcaacaactaccaaggagatgcattcttactccacaaagaagtgcagaattatgaaaggtctaggcgctcataggcatcgggtttgatgcgcatctcagaagtaaactcagatgctagactcccaagtctcaactgctctttgaagggacgaaggttcagaaccaagtggtcgaccatgctaagcacaaatccttccccttgatgcagcacccctactttcggaagggtggatacaagatttcacagacagaggtcaggctttcggaaggtgtcttatcctccctgtaatcagaaaactacgtttcagtctccctagttttttttgttggttggctaatatgctgtttgacattgacattgtggatgctaaaaagtaaagatgctttaatgtatgcccacctttgagaacatctgcatcatagttgaaaaacatctaagtcctaggctcctagttgaaaagcatctaggtctaggtctctagttgagttttagtggttaat

SEQ ID NO: 220995 - DNA, 2378 bp, Zea Mays
ccagttgcttgcctggtctctccaactcaccctttttcaccttcggcagtctggctccatccgtctcctgcactgaccttttcctccacgtttccggcaactgcaagcaaccactgatccagcccgttctgtgtcccggcgaatggtgacgaaccaggacgcggatgcggcagcgccaggggcaggggcaacggtagatccgatgcggctagcatcgcggtggcgatcccggccagagtggaactgcgcgtcggcggagctggaggctgagccgtccgagctcaacaccgtcaacagctcgggactcttctccgtcgtctctaccgacaagttatcggtaaaatacctcggcagccatcaccacggccacgacgtcggtgtcgtgcaggccgaccgtcccgcgccgacgcgccgagccgtgtactacttcgagatgggcgtcaggaatgctggatacaaggggcagacatccattgggttcacgagcgagagcttcaagatgaggcgacaaccgggctgggagacaaacagttgtggataccatggtgacgacggccatctttatcggggtcaagggaaaggtgaatcatttgggccaaaattcacatctggtgacataattggtgctggcatcaactacttgtcacaagaatttttcttcacgaaaaatggtactctggttggagccattccaaaagaaattaaaggcccactatatcctaccattgcagttcatagttacggtgaagagtaagcttttacttttttagttgtttaggcgacatataattgctatatggtgtaagttgtgattcaccccaggtcttccaaccttagttgcagaaacatctggcagacttggataataatacctgctccaaaatgcaatttactcatttgtttttttgcgtgttatatgatggttttcctttctagcacgacatataaagtcacaagttgtacgcctcaatagtaacacaagttaatcactccctgtttaattcttagacataactttatttgtaggttctcatataaagatatatagcgagtcaactgttgaatcaatgattaatgttgcaatgtaaagtcttacttaaagaacttatatagattttttatacagtaagtaatttatacctataccttttcattttctatatcctcattgtggggtctgatctctaggctaccccaagttgtttaggactaaaagtctgttcttacaggttgactgtaaactttggaaaagaaccattctgttttgacgttgagggttatattcttgaggacaaaatgaggcagcaatcagtgtctgataaattgaacttggagccagacatcagccattggattgtccgttcatatctcctacattatggataccaagatacattaaatgcttttgatatggcaaatgcaaccgatcgccccaccagtcgccaaaatgcttatcatgagtggagatattgactctacattcaaaagacttcgggagtggtatccgcaagtgataaaggatgagcaatcggttatttgcttcctacttcgttctcaaagattcatagaatatatcagggctgaacaactggaggttgccgtgaaatatggtcgtgctaacctggcaagcttcttcacccacaaagcttttgaggggctgctgaaagatagtgtggccctacttgcgtatgagaagcctacagaatcatgcttgggatacctgatggactcttcccagcgtgaatttgtggcggacgcggtgaacgcggctgtcctgtcgacgaaccccactgtgaaggaccctgagagctgcctttactcgtgtctcgagaggctactaaagcagctcacagtatgtagctttgagcgacgtgcattcaacaactaccaaggagatgcattcttactccacaaagaagtgcagaattatgaaaggtctaggcgctcataggcatcgggtttgatgcgcatctcagaagtaaactcagatgctagactcccaagtctcaactgctctttgaagggacgaaggttcagaaccaagtggtcgaccatgctaagcacaaatccttccccttgatgcagcacccctactttcggaagggtggatacaagatttcacagacagaggtcaggctttcggaaggtgtcttatcctccctgtaatcagaaaactacgtttcagtctccctagttttttttgttggttggctaatatgctgtttgacattgacattgtggatgctaaaaagtaaagatgctttaatgtatgcccacctttgagaacatctgcatcatagttgaaaaacatctaagtcctaggctcctagttgaaaagcatctaggtctaggtctctagttgagttttagtggttaat

SEQ ID NO: 220996 - DNA, 2381 bp, Zea Mays
cgcgacggttccttgatcgatcgatcaccaattgacgcccaggagcccagcctcgcctgctccttgccgaaccgagccaccaatcagtcactcacgctgcacccccggcccggccccgcgtacaccctctcccaagtcccaccgctcgcgcgccggcgatcaggcagggggctcccaggttgtactgcggtgatggctacgtcgtcgacactgggccagacgcagcggtacgcggcgggggcactgctggcgctcgcgctccgccaggcgcagacgcaccagaccgtcctccttggctcccacggcctcgacgacgagccccaccccgacgcggccaccgcagtcgaacccgacgcccgtgacctctggacccacgagtcccgcggcctcctccgccccgtcctcaggtttcttgagatcgacccgaaggcctgggtcggggtggagaagacggccgcgtcgtctgatcccaagcaccacattggcgcgttccttcgcaaagtgttcgaggacgaagacgacgacgagaaggcccggtcagagcgatccgatcacgagctggcgctcgccaaggccgtggacgcgatggcgatgggcctggagagcggcggtgtcggatcggtggctgaggcgctcagaccggagagccacggctccgacgacgacgacggcgacccggcgctggcggcgtcgacgcgcaccaaggactaccggaagatggcggtgctgtacatgctcctctccgcgtgcgtcgcggacgtgaacatggccgaggagggcatggggtccccgcgcgtcaccaagggttacgacgcccgccaccgcgtcgcgctccggctgctggccacctggctcgacgttacctggaacaagatggaagctgtcgagataatggttgcttgctctgctatggctgcagcaagggaggaggaacagtcacgtgagaattcgtcaccgaacagcagatgggagaactggaagcgtggcggcatcatcggcgcagctgcactgacaggaggaacattgatggcaatatctgggggcttagcagccccggcaattgctgcagggttcactgctctagtcccaacattgcatacacttgtgcctctaataggtgctagtggttttgctgctatagctaccgctgctggtcacactgctggctctgtagcagttgcagcatcgtttggagctgctggagctgggttgactgggacaaaaatggccacaagaattggaaacgtaaaagaatttgagttcaagactatcggccagaaccatagccagggtcgcctagcagttggcatctttgtttctggatttgccttctccgaggacgattattcaaagccttgggaaggatggaaaactaacttagagaggtatgttctgcagtgggagtctaagcatgtaattggcgtcagcacagcaatacaggattggctggcatcaagggtagcgatcgagctgatgagggaaggtgcgatgcagacggtgttaaatggcatcatttcagcatttgcgtggcctgctaccttggtatctgccgcggacttcatcgacagcaaatggtctgttgctattgacaggtcagacaaagctgggaaaatgcttgctgatgttctgctcaagggactgcaaggaagcaggcctgtcactctagtcgggttctcgctgggggctcgtgtggttttcaagtgcttgcaggagttagcgcagctgggaaataatgtggggatcgttgagagggcggtgctcatcggtgcgccggtctcagttcaaggtgagatgtgggagcctgccaggaagatggtcgccggaaggtttgtgaatgtttactccaccaacgactggatcctcggcgtcactttccgcgctaggtttggccggcatccaggacgtgcatgtccctggagtagagaacgtcgacgttaccgagctcgttgtcgggcactcttcgtacttgtcgcttctccagaagattctagaccatcttgagctaaacacctactaccctgtgttctatccctgcacgcccaggacaaaataaggagcgccgtgaaatgcccgtgcagggggttacatgctgtgtttcagagtttgcacagctcgcagctagcctgaatttagcggtacactagtaaataaagggatgttatgctggagtgcctccagaaaatgtcgtggtgtcatctgcatttttttttggcagataatacaaatatggaccgaacaagacatagaattttatgtggaaaacatttgcagcaaaaaaatctagatcatctaccgacagcctttcatggaatacaataatttgtctgtcttcctgtggacttataaaatgtatatatagcgcagacgaacttcagttggat

SEQ ID NO: 220997 - DNA, 894 bp, Zea Mays
cgcagaagccacggccctccaccccctccacctcggtgatgagcggcgcctccacttccgtcatcgctccaccttgagggctcctttggttgcccgggatcccgggagtatccaggtcgattccctgggtctgaaatccacaggccgaatcgtcccagggaaaaataaaaagttgtttggtgacccacgctccccgatctgatccgcgggggaggacagtgctttggtccccggcctcccagggtcgggaagggcttccccgcgtcccctcccgtgcaagccgtcgcctcctcctctcgctcgtgaagcctcctctccctcgcgcacggtaccgccacccaccgcctccacctctccctcgcactcgcgcacccaccgtcgcccgccacccccgctcttcctcactccctcctctgcctcgcgcaaagcgcaccgctaccacaggcggtaggaccgcacaacttgccccagatccagaacagtctcctatctcctcaactcacgcatgacgacctcctcagctcccccatccgcatctcgcgaagagaacagaagctggtgagcgatccagaattcggtcgtgaactgaaggagacaagggatggaactcttgagcactaaacacaagttggtcgaaggaaaatcatgatgagcaaagtcattgttgtgttaacgttttgggcatgccaagaactatttttttggttatgagtttgtcaaacatatgttgagtttgtcgctcatttcttaagagctatttctgtgatcgaagaaatttgtttattttagtggcatgaataaaaaaaccaagcaaatccatggtagaaacttgtttgtgtgcatattttgagggctttgttttactggaactgtttgattttgctgatttttaaa

SEQ ID NO: 220998 - DNA, 912 bp, Zea Mays
cgcagaagccacggccctccaccccctccacctcggtgatgagcggcgcctccacttccgtcatcgctccaccttgagggctcctttggttgcccgggatcccgggagtatccaggtcgattccctgggtctgaaatccacaggccgaatcgtcccagggaaaaataaaaagttgtttggtgacccacgctccccgatctgatccgcgggggaggacagtgctttggtccccggcctcccagggtcgggaagggcttccccgcgtcccctcccgtgcaagccgtcgcctcctcctctcgctcgtgaagcctcctctccctcgcgcacggtaccgccacccaccgcctccacctctccctcgcactcgcgcacccaccgtcgcccgccacccccgctcttcctcactccctcctctgcctcgcgcaaagcgcaccgctaccacaggcggtaggaccgcacaacttgccccagatccagaacagtctcctatctcctcaactcacgcatgacgacctcctcagctcccccatccgcatctcgcgaagagaacagaagctggtgagcgatccagaattcggtcgtgaactgaagtgtgatgttggccatgaggagacaagggatggaactcttgagcactaaacacaagttggtcgaaggaaaatcatgatgagcaaagtcattgttgtgttaacgttttgggcatgccaagaactatttttttggttatgagtttgtcaaacatatgttgagtttgtcgctcatttcttaagagctatttctgtgatcgaagaaatttgtttattttagtggcatgaataaaaaaaccaagcaaatccatggtagaaacttgtttgtgtgcatattttgagggctttgttttactggaactgtttgattttgctgatttttaaa

SEQ ID NO: 220999 - DNA, 662 bp, Zea Mays
cctccaccccctccacctcggtgatgagcggcgcctccacttccgtcatcgctccaccttgagggctcctttggttgcccgggatcccgggagtatccaggtcgattccctgggtctgaaatccacaggccgaatcgtcccagggaaaaataaaaagttgtttggtgacccacgctccccgatctgatccgcgggggaggacagtgctttggtccccggcctcccagggtcgggaagggcttccccgcgtcccctcccgtgcaagccgtcgcctcctcctctcgctcgtgaagcctcctctccctcgcgcacgagaacagaagctggtgagcgatccagaattcggtcgtgaactgaaggagacaagggatggaactcttgagcactaaacacaagttggtcgaaggaaaatcatgatgagcaaagtcattgttgtgttaacgttttgggcatgccaagaactatttttttggttatgagtttgtcaaacatatgttgagtttgtcgctcatttcttaagagctatttctgtgatcgaagaaatttgtttattttagtggcatgaataaaaaaaccaagcaaatccatggtagaaacttgtttgtgtgcatattttgagggctttgttttactggaactgtttgattttgctgatttttaaa

SEQ ID NO: 221000 - DNA, 884 bp, Zea Mays
tccaccccctccacctcggtgatgagcggcgcctccacttccgtcatcgctccaccttgagggctcctttggttgcccgggatcccgggagtatccaggtcgattccctgggtctgaaatccacaggccgaatcgtcccagggaaaaataaaaagttgtttggtgacccacgctccccgatctgatccgcgggggaggacagtgctttggtccccggcctcccagggtcgggaagggcttccccgcgtcccctcccgtgcaagccgtcgcctcctcctctcgctcgtgaagcctcctctccctcgcgcacggtaccgccacccaccgcctccacctctccctcgcactcgcgcacccaccgtcgcccgccacccccgctcttcctcactccctcctctgcctcgcgcaaagcgcaccgctaccacaggcggtaggaccgcacaacttgccccagatccagaacagtctcctatctcctcaactcacgcatgacgacctcctcagctcccccatccgcatctcgcgaagagaacagaagctggtgagcgatccagaattcggtcgtgaactgaagtgtgatggagacaagggatggaactcttgagcactaaacacaagttggtcgaaggaaaatcatgatgagcaaagtcattgttgtgttaacgttttgggcatgccaagaactatttttttggttatgagtttgtcaaacatatgttgagtttgtcgctcatttcttaagagctatttctgtgatcgaagaaatttgtttattttagtggcatgaataaaaaaaccaagcaaatccatggtagaaacttgtttgtgtgcatattttgagggctttgttttactggaactgtttgattttgctgatttttaaa

SEQ ID NO: 221001 - DNA, 843 bp, Zea Mays
caccccctccacctcggtgatgagcggcgcctccacttccgtcatcgctccaccttgagggctcctttggttgcccgggatcccgggagtatccaggtcgattccctgggtctgaaatccacaggccgaatcgtcccagggaaaaataaaaagttgtttggtgacccacgctccccgatctgatccgcgggggaggacagtgctttggtccccggcctcccagggtcgggaagggcttccccgcgtcccctcccgtgcaagccgtcgcctcctcctctcgctcgtgaagcctcctctccctcgcgcacggtaccgccacccaccgcctccacctctccctcgcactcgcgcacccaccgtcgcccgccacccccgctcttcctcactccctcctctgcctcgcgcaaagcgcaccgctaccacaggcggtaggaccgcacaacttgccccagatccagaacagtctcctatctcctcaactcacgcatgacgacctcctcagctcccccatccgcatctcgcgaagagaacagaagctgggagacaagggatggaactcttgagcactaaacacaagttggtcgaaggaaaatcatgatgagcaaagtcattgttgtgttaacgttttgggcatgccaagaactatttttttggttatgagtttgtcaaacatatgttgagtttgtcgctcatttcttaagagctatttctgtgatcgaagaaatttgtttattttagtggcatgaataaaaaaaccaagcaaatccatggtagaaacttgtttgtgtgcatattttgagggctttgttttactggaactgtttgattttgctgatttttaaa

SEQ ID NO: 221002 - DNA, 670 bp, Zea Mays
ctccacctcggtgatgagcggcgcctccacttccgtcatcgctccaccttgagggctcctttggttgcccgggatcccgggagtatccaggtcgattccctgggtctgaaatccacaggccgaatcgtcccagggaaaaataaaaagttgtttggtgacccacgctccccgatctgatccgcgggggaggacagtgctttggtccccggcctcccagggtcgggaagggcttccccgcgtcccctcccgtgcaagccgtcgcctcctcctctcgctcgtgaagcctcctctccctcgcgcacgagaacagaagctggtgagcgatccagaattcggtcgtgaactgaagtgtgatgttggccatgaggagacaagggatggaactcttgagcactaaacacaagttggtcgaaggaaaatcatgatgagcaaagtcattgttgtgttaacgttttgggcatgccaagaactatttttttggttatgagtttgtcaaacatatgttgagtttgtcgctcatttcttaagagctatttctgtgatcgaagaaatttgtttattttagtggcatgaataaaaaaaccaagcaaatccatggtagaaacttgtttgtgtgcatattttgagggctttgttttactggaactgtttgattttgctgatttttaaa

SEQ ID NO: 221003 - DNA, 1309 bp, Zea Mays
cattgagatgctctgacatttcttcctttccactttcccaactttacgccgcgtctcatccccacctagagtcctaatcgaaaaccctcgtttgttcgcttgaacagaagcctcccccgccgcacccgccaggcggcgcgggcgcgcggcaatggccgcgcagaacgctgggatcatcatcgattgtcgacaggcgatgtcccccgatcccccggccgtggagttggaggtcatcggctcatcttctccgtccatcacgccatgtcccgctgcagcggcgcccgccgacgccgatttcgatcatgacggatgcaccgcggaattatcttcttcaactgatcgagaattacaggaccatatcagacagtgggaagggtcctatgggcagggtgtactccgtaggatgccggatggtggcgagaagatgcattcacgtgtcctccggatgaagaaggagctcgagcggcggagggccagacagaggatggatgtcacgcccttgagacagacagtgcaagctaagcgtactggtggcagcagtggagaaatctacaacttaaagtctgatgatgagaccatggacagtacggctagcaaacactatccaaactcaagttgtactacatctacaaagacctatacccaggttaagggagctgcatatgaagaacaaagttctttaagccatggcaaatatgcttacccaaagaatggtggtcaaatttcaaaagagtcgttgaggcatcaatcaaaaacgtggaaccttgccaaaaataaggcctcacccttggagattaaaaaggatgtagttctgttggatgacgatgatgatatagagcctgctagatcagctgatgttcagatatctaataagtgggaggagtcaaatatccactatccttcaagcactgatccagaagcggttgaactgacctactctgacatgaaatgtcttgaaccagaagaatatttaaaatcacctgttataaatttttaccttcagtacctcaagaaggcaagacctcgcagggatttacacatgtttaacacctatttttatagcaaactcgaagaagcactatccatgccgaattcagcaagttacggagatggtggagaggtgtagatatttttaagaaagcgtacataattttgccgattaatgaatcgatgcactggagcttgatcattgtttgcatgcctacaaaagaggcagattctgggccaataatacttcacttggactctcttggtcttcactccagtcaaaagctttttgacatagttgcgagggcgaacccagtgccgg

SEQ ID NO: 221004 - DNA, 1937 bp, Zea Mays
cattgagatgctctgacatttcttcctttccactttcccaactttacgccgcgtctcatccccacctagagtcctaatcgaaaaccctcgtttgttcgcttgaacagaagcctcccccgccgcacccgccaggcggcgcgggcgcgcggcaatggccgcgcagaacgctgggatcatcatcgattgtcgacaggcgatgtcccccgatcccccggccgtggagttggaggtcatcggctcatcttctccgtccatcacgccatgtcccgctgcagcggcgcccgccgacgccgatttcgatcatgacggatgcaccgcggaattatcttcttcaactgatcgagaattacaggaccatatcagacagtgggaagggtcctatgggcagggtgtactccgtaggatgccggatggtggcgagaagatgcattcacgtgtcctccggatgaagaaggagctcgagcggcggagggccagacagaggatggatgtcacgcccttgagacagacagtgcaagctaagcgtactggtggcagcagtggagaaatctacaacttaaagtctgatgatgagaccatggacagtacggctagcaaacactatccaaactcaagttgtactacatctacaaagacctatacccaggttaagggagctgcatatgaagaacaaagttctttaagccatggcaaatatgcttacccaaagaatggtggtcaaatttcaaaagagtcgttgaggcatcaatcaaaaacgtggaaccttgccaaaaataaggcctcacccttggagattaaaaaggatgtagttctgttggatgacgatgatgatatagagcctgctagatcagctgatgttcagatatctaataagtgggaggagtcaaatatccactatccttcaagcactgatccagaagcggttgaactgacctactctgacatgaaatgtcttgaaccagaagaatatttaaaatcacctgttataaatttttaccttcagtacctcaagaaggcaagacctcgcagggatttacacatgtttaacacctatttttatagcaaactcgaagaagcactatccatgccgaattcagcaagttacggagatggtggagaggtgtagatatttttaagaaagcgtacataattttgccgattaatgaatcgatgcactggagcttgatcattgtttgcatgcctacaaaagaggcagattctgggccaataatacttcacttggactctcttggtcttcactccagtcaaaagctttttgacatagttgcgaggtatattcaagcagaacggtggcacctagggatggattcgtcttatgatattccattttcagggaggatatggaggcgtctttcgaaaaatatcaatagggaaaagattgaggtgccacgtcagcgtaacgagtatgattgtggcctctttatgctttactatattgacaggtttattcaagatgcgccagagaggttgacaaaagagggccttggcatgtttggacgcagatggttcaaccatgaagaggcttcagcgtttcggggagggatacgggcgctactgattgatctatttcatagtgctctagacgacgatggaccatcggaggcagagcttgaagacaaggacattcagatggactgagcctgctgttgctgctttgattgaatatgtaacctcgttcactcccaagtgaagtttggccgtggagggaatgcgccccgttggctacacacttttgtttacacgctcgttcattcggcggtggaaatgtacagttcaacgttatctaagggcctgtttggaaccggattcagattcaacaaaaatatatttacgaaaagttagctaaatggtttagggtttagatcaataaaatccagattcacaaaatggtgcctttagatttaacaaaaaaaaca

SEQ ID NO: 221005 - DNA, 1878 bp, Zea Mays
cattgagatgctctgacatttcttcctttccactttcccaactttacgccgcgtctcatccccacctagagtcctaatcgaaaaccctcgtttgttcgcttgaacagaagcctcccccgccgcacccgccaggcggcgcgggcgcgcggcaatggccgcgcagaacgctgggatcatcatcgattgtcgacaggcgatgtcccccgatcccccggccgtggagttggaggtcatcggctcatcttctccgtccatcacgccatgtcccgctgcagcggcgcccgccgacgccgatttcgatcatgacggatgcaccgcggaattatcttcttcaactgatcgagaattacaggaccatatcagacagtgggaagggtcctatgggcagggtgtactccgtaggatgccggatggtggcgagaagatgcattcacgtgtcctccggatgaagaaggagctcgagcggcggagggccagacagaggatggatgtcacgcccttgagacagacagtgcaagctaagcgtactggtggcagcagtggagaaatctacaacttaaagtctgatgatgagaccatggacagtacggctagcaaacactatccaaactcaagttgtactacatctacaaagacctatacccaggttaagggagctgcatatgaagaacaaagttctttaagccatggcaaatatgcttacccaaagaatggtggtcaaatttcaaaagagtcgttgaggcatcaatcaaaaacgtggaaccttgccaaaaataaggcctcacccttggagattaaaaaggatgtagttctgttggatgacgatgatgatatagagcctgctagatcagctgatgttcagatatctaataagtgggaggagtcaaatatccactatccttcaagcactgatccagaagcggttgaactgacctactctgacatgaaatgtcttgaaccagaagaatatttaaaatcacctgttataaatttttaccttcagtacctcaagaaggcaagacctcgcagggatttacacatgtttaacacctatttttatagcaaactcgaagaagcactatccatgccgaattcagcaagttacggagatggtggagaggtgtagatatttttaagaaagcgtacataattttgccgattaatgaatcgatgcactggagcttgatcattgtttgcatgcctacaaaagaggcagattctgggccaataatacttcacttggactctcttggtcttcactccagtcaaaagctttttgacatagttgcgaggtatattcaagcagaacggtggcacctagggatggattcgtcttatgatattccattttcagggaggatatggaggcgtctttcgaaaaatatcaatagggaaaagattgaggtttattcaagatgcgccagagaggttgacaaaagagggccttggcatgtttggacgcagatggttcaaccatgaagaggcttcagcgtttcggggagggatacgggcgctactgattgatctatttcatagtgctctagacgacgatggaccatcggaggcagagcttgaagacaaggacattcagatggactgagcctgctgttgctgctttgattgaatatgtaacctcgttcactcccaagtgaagtttggccgtggagggaatgcgccccgttggctacacacttttgtttacacgctcgttcattcggcggtggaaatgtacagttcaacgttatctaagggcctgtttggaaccggattcagattcaacaaaaatatatttacgaaaagttagctaaatggtttagggtttagatcaataaaatccagattcacaaaatggtgcctttagatttaacaaaaaaaaca

SEQ ID NO: 221006 - DNA, 1864 bp, Zea Mays
cattgagatgctctgacatttcttcctttccactttcccaactttacgccgcgtctcatccccacctagagtcctaatcgaaaaccctcgtttgttcgcttgaacagaagcctcccccgccgcacccgccaggcggcgcgggcgcgcggcaatggccgcgcagaacgctgggatcatcatcgattgtcgacaggcgatgtcccccgatcccccggccgtggagttggaggtcatcggctcatcttctccgtccatcacgccatgtcccgctgcagcggcgcccgccgacgccgatttcgatcatgacggatgcaccgcggaattatcttcttcaactgatcgagaattacaggaccatatcagacagtgggaagggtcctatgggcagggtgtactccgtaggatgccggatggtggcgagaagatgcattcacgtgtcctccggatgaagaaggagctcgagcggcggagggccagacagaggatggatgtcacgcccttgagacagacagtgcaagctaagcgtactggtggcagcagtggagaaatctacaacttaaagtctgatgatgagaccatggacagtacggctagcaaacactatccaaactcaagttgtactacatctacaaagacctatacccaggttaagggagctgcatatgaagaacaaagttctttaagccatggcaaatatgcttacccaaagaatggtggtcaaatttcaaaagagtcgttgaggcatcaatcaaaaacgtggaaccttgccaaaaataaggcctcacccttggagattaaaaaggatgtagttctgttggatgacgatgatgatatagagcctgctagatcagctgatgttcagatatctaataagtgggaggagtcaaatatccactatccttcaagcactgatccagaagcggttgaactgacctactctgacatgaaatgtcttgaaccagaagaatatttaaaatcacctgttataaatttttaccttcagtacctcaagaaggcaagacctcgcagggatttacacatgtttaacacctatttttatagcaaactcgaagaagcactatccatgccgaattcagcaagttacggagatggtggagaggtgtagatatttttaagaaagcgtacataattttgccgattaatgaatcgatgcactggagcttgatcattgtttgcatgcctacaaaagaggcagattctgggccaataatacttcacttggactctcttggtcttcactccagtcaaaagctttttgacatagttgcgagggaggatatggaggcgtctttcgaaaaatatcaatagggaaaagattgaggtgccacgtcagcgtaacgagtatgattgtggcctctttatgctttactatattgacaggtttattcaagatgcgccagagaggttgacaaaagagggccttggcatgatggttcaaccatgaagaggcttcagcgtttcggggagggatacgggcgctactgattgatctatttcatagtgctctagacgacgatggaccatcggaggcagagcttgaagacaaggacattcagatggactgagcctgctgttgctgctttgattgaatatgtaacctcgttcactcccaagtgaagtttggccgtggagggaatgcgccccgttggctacacacttttgtttacacgctcgttcattcggcggtggaaatgtacagttcaacgttatctaagggcctgtttggaaccggattcagattcaacaaaaatatatttacgaaaagttagctaaatggtttagggtttagatcaataaaatccagattcacaaaatggtgcctttagatttaacaaaaaaaaca

SEQ ID NO: 221007 - DNA, 1875 bp, Zea Mays
cattgagatgctctgacatttcttcctttccactttcccaactttacgccgcgtctcatccccacctagagtcctaatcgaaaaccctcgtttgttcgcttgaacagaagcctcccccgccgcacccgccaggcggcgcgggcgcgcggcaatggccgcgcagaacgctgggatcatcatcgattgtcgacaggcgatgtcccccgatcccccggccgtggagttggaggtcatcggctcatcttctccgtccatcacgccatgtcccgctgcagcggcgcccgccgacgccgatttcgatcatgacggatgcaccgcggaattatcttcttcaactgatcgagaattacaggaccatatcagacagtgggaagggtcctatgggcagggtgtactccgtaggatgccggatggtggcgagaagatgcattcacgtgtcctccggatgaagaaggagctcgagcggcggagggccagacagaggatggatgtcacgcccttgagacagacagtgcaagctaagcgtactggtggcagcagtggagaaatctacaacttaaagtctgatgatgagaccatggacagtacggctagcaaacactatccaaactcaagttgtactacatctacaaagacctatacccaggttaagggagctgcatatgaagaacaaagttctttaagccatggcaaatatgcttacccaaagaatggtggtcaaatttcaaaagagtcgttgaggcatcaatcaaaaacgtggaaccttgccaaaaataaggcctcacccttggagattaaaaaggatgtagttctgttggatgacgatgatgatatagagcctgctagatcagctgatgttcagatatctaataagtgggaggagtcaaatatccactatccttcaagcactgatccagaagcggttgaactgacctactctgacatgaaatgtcttgaaccagaagaatatttaaaatcacctgttataaatttttaccttcagtacctcaagaaggcaagacctcgcagggatttacacatgtttaacacctatttttatagcaaactcgaagaagcactatccatgccgaattcagcaagttacggagatggtggagaggtgtagatatttttaagaaagcgtacataattttgccgattaatgaatcgatgcactggagcttgatcattgtttgcatgcctacaaaagaggcagattctgggccaataatacttcacttggactctcttggtcttcactccagtcaaaagctttttgacatagttgcgagggaggatatggaggcgtctttcgaaaaatatcaatagggaaaagattgaggtgccacgtcagcgtaacgagtatgattgtggcctctttatgctttactatattgacaggtttattcaagatgcgccagagaggttgacaaaagagggccttggcatgtttggacgcagatggttcaaccatgaagaggcttcagcgtttcggggagggatacgggcgctactgattgatctatttcatagtgctctagacgacgatggaccatcggaggcagagcttgaagacaaggacattcagatggactgagcctgctgttgctgctttgattgaatatgtaacctcgttcactcccaagtgaagtttggccgtggagggaatgcgccccgttggctacacacttttgtttacacgctcgttcattcggcggtggaaatgtacagttcaacgttatctaagggcctgtttggaaccggattcagattcaacaaaaatatatttacgaaaagttagctaaatggtttagggtttagatcaataaaatccagattcacaaaatggtgcctttagatttaacaaaaaaaaca

SEQ ID NO: 221008 - DNA, 1190 bp, Zea Mays
tatgcacggcgcaaattgtttacatcctctaaacgggtggccatcttgagaactatactagtgactacaccctacaggtgttggtaggttattgcgctgtgtacatcttcatgcagaccttcatgatcccagggacaatattcatgtcactgcttgctggtgctctatttgggcaactgcgtggccttgcactggtggtctttgctgccactgcaggtgcttcttcgtgctatttcctgtcaaagatgattgggaagccactggtgttcacactgtggccagataagctcagcttcttccagagacaggttgctaaaagaagagagaagttgttgaattacatgcttttcctcagggtgaccccaacattgccaaataccttcatcaacttagcttcacccatagtagatgtcccctaccatatattcttactgggaactctcattggtcttatcccagctgcttatgtcactgtcagggctggaattgctcttggagagttaacttcgctgagtgacctttacgacacccagtcgatagcactgctattcctgatcggtgttgtttcagtcacaccagcattgctgggcaaggatgaggcacaagagaaaccaccagaaatggcggtaggcgcgtcatgatcaccaaagcacctagcggtgtccacgtcacctgtatatatgtcaacatccagcatgcagtggcttcattagttcggatcaacgggcccttgtggctggatgataaaaacggttcgcatggccacacagcttggcgggacctcggcctaaactccctccactgctggcctagagaggcgcctgtgttgccatcatcagaacatgattcggtagccattcaccacattattaatgaatgaacctgggaagcagaattgcctgtagacgagctgctctgatgtgtaaacgagtagcgctgttcggataggacaggcatttagtccaatccctgtatatattaaccagattcattcaatccatattcagtggttcaaagataatgccctgttcagctgctgtgttcttgaatgttttgctctatttcccttctgtgcctgattgactatggcctaccggttctgttgtaaatgtctccgcatcacttcggcattcggcaagtgatgccttcgctgtcggtgggaaacagtagagcttgttcctccttttcca

SEQ ID NO: 221009 - DNA, 1286 bp, Zea Mays
ctcagctttactttaggaaattctgaaagacatagcatggatccggtgaaacttgctgtcccccttgtcaattcgaaattgcaaacggatgatttgtttgtgtcaattatggacttgccttcagattaggaagtggccatcttgagaactatactagtgactacaccctacaggtgttggtaggttattgcgctgtgtacatcttcatgcagaccttcatgatcccagggacaatattcatgtcactgcttgctggtgctctatttgggcaactgcgtggccttgcactggtggtctttgctgccactgcaggtgcttcttcgtgctatttcctgtcaaagatgattgggaagccactggtgttcacactgtggccagataagctcagcttcttccagagacaggttgctaaaagaagagagaagttgttgaattacatgcttttcctcagggtgaccccaacattgccaaataccttcatcaacttagcttcacccatagtagatgtcccctaccatatattcttactgggaactctcattggtcttatcccagctgcttatgtcactgtcagggctggaattgctcttggagagttaacttcgctgagtgacctttacgacacccagtcgatagcactgctattcctgatcggtgttgtttcagtcacaccagcattgctgggcaaggatgaggcacaagagaaaccaccagaaatggcggtaggcgcgtcatgatcaccaaagcacctagcggtgtccacgtcacctgtatatatgtcaacatccagcatgcagtggcttcattagttcggatcaacgggcccttgtggctggatgataaaaacggttcgcatggccacacagcttggcgggacctcggcctaaactccctccactgctggcctagagaggcgcctgtgttgccatcatcagaacatgattcggtagccattcaccacattattaatgaatgaacctgggaagcagaattgcctgtagacgagctgctctgatgtgtaaacgagtagcgctgttcggataggacaggcatttagtccaatccctgtatatattaaccagattcattcaatccatattcagtggttcaaagataatgccctgttcagctgctgtgttcttgaatgttttgctctatttcccttctgtgcctgattgactatggcctaccggttctgttgtaaatgtctccgcatcacttcggcattcggcaagtgatgccttcgctgtcggtgggaaacagtagagcttgttcctccttttcca

SEQ ID NO: 221010 - DNA, 2594 bp, Zea Mays
cccctgattaatcaatcaatccattttagctacgagaaagaaaggtgggggaagaaaaaaaggcagggaaagcggtgcgaggagcagaaattcgggggtgactagctagctgttcgtcccgtgtcccgttcctcctcgcccaccaccaccgcacgccggacaaaaccgctctcctcgccacattcgcagcccccctcgctcgcgcacacgccacaccacaccaccagtacactgctctacgccacagtacagcagcatccagcgggcggctggctgcctaatctttccagctctttcgtcccctcgccacgccgcccaccgctgccgcatcatccgcccgttgcccgccgtcgtcgcctggcccgcggattccgcccccattcgccgtcgcagcgcgccgagccccgtcccagatcgccgcggcgcttcctgccgccgtcggcgcggcgcagggttgaaatctatttgaccactcagttataaccatttctggtctgaagatgcttcgtcaatgacatctggaaactgtaatagtatgcgctgatcttctatgcttcaccacctgactatcaatgggctctttcctgtggaaacagcccagctacctcttcattttgataattctccaccttgttgctcatgaggcaagaacgctgagttcagatggtgaagcacttcttgccttcaagaaggcagttacaaattcagatggagtctttctaaattggcgtgagcaagatgcagacccctgcaattggaagggtgttagatgtgatagtcatagcaagagagtgattgatctgattcttgcataccacagattagttgggcccataccacccgaaattggaaagttaaatcagttgcaaaccttgtcactgcaggggaacagtttgtatggttcactccctcctgaactggggaattgtaccaagctgcaacaattgtatctacaaggaaactatttaagtggatacatcccttcagaatttggcgatctggtggaactcgaggcattggacttgtccagtaatacattgagtggatctgttccacattctcttgataagttgtccaaacttacattattcaatgtttccatgaacttcctgacaggagccataccatcttctggttcacttgtcaatttcaatgagacatcctttgttggcaaccttggtttatgtgggaagcagataaacttggtgtgcaaagatgcacttcaatcatcatcaaatggtctgcagtcaccttcaccagatgacatgattaataaaaggaatgggaagaattcgaccagacttgttataagtgcagtggcaacagtgggagctctcctattggtggctttaatgtgtttctggggttgctttctttacaaaaattttggaaaaaaagatatgcgtggtttcagagtggagctctgtggaggctcttctgtcgtgatgttccatggggacctcccttactcctcaaaagacatcctcaagaagctagagactatagatgaagaaaatatcattggagcaggaggcttcggaactgtttataaacttgcaatggatgatggcaatgtctttgctttgaaaaggatagtgaaaacaaatgaagggctagatcggttctttgatagagaacttgagatattgggaagtgttaaacatcgctatttggtcaatctccgtggttattgcaactccccttcatcaaaacttttgatatatgattatcttcaaggtggaagcctggatgaagtgcttcatgaaaaatctgaacagttggattgggatgcacgtattaacattatacttggagctgcaaaagtttcgaggcccgtgtatcagactttggacttgcaaagcttttagaggatgaagaatcacatattactacaatagttgcaggaacatttggctaccttgcaccagagtatatgcaatttggcagagccaccgagaagactgatgtctacagttttggggttttggtactcgaaatactcagtggaaagcggcctactgatgcatccttcattgagaagggactaaacattgttggatggttaaattttcttgctagtgagaaccgggagagggaaattgtcgacctgaactgtgaaggagtgcagactgagaccttagatgccctgctctctcttgccaagcaatgtgttagctcctcgccagaggagaggccgacaatgcacagggtggtacatatgctggagtcggatgtaattacaccgtgccctagcgacttctatgattcagagtagtctcctggacaagccacgctgctgctagtttcccgtgggggcgcattcctttattctttgcgtatattgtgtaaatgcattgccgcggtgtttggtctccaatcggctggctcaacgggtgacttttttttgcgtctgtatacctatgtatgtatctgtcatggtacaagttggctatatgctgatttaataataagagagaacttactagtagactattgtatgtttaactatagtctttagatactcgtagatgttgtgggatctacaaaagaaatggggaaataatgaatatcgcttggaacaaacaagaatagat

SEQ ID NO: 221011 - DNA, 1684 bp, Zea Mays
ccgatgtggggggccatatttggcggggacttgtccagtaatacattgagtggatctgttccacattctcttgataagttgtccaaacttacattattcaatgtttccatgaacttcctgacaggagccataccatcttctggttcacttgtcaatttcaatgagacatcctttgttggcaaccttggtttatgtgggaagcagataaacttggtgtgcaaagatgcacttcaatcatcatcaaatggtctgcagtcaccttcaccagatgacatgattaataaaaggaatgggaagaattcgaccagacttgttataagtgcagtggcaacagtgggagctctcctattggtggctttaatgtgtttctggggttgctttctttacaaaaattttggaaaaaaagatatgcgtggtttcagagtggagctctgtggaggctcttctgtcgtgatgttccatggggacctcccttactcctcaaaagacatcctcaagaagctagagactatagatgaagaaaatatcattggagcaggaggcttcggaactgtttataaacttgcaatggatgatggcaatgtctttgctttgaaaaggatagtgaaaacaaatgaagggctagatcggttctttgatagagaacttgagatattgggaagtgttaaacatcgctatttggtcaatctccgtggttattgcaactccccttcatcaaaacttttgatatatgattatcttcaaggtggaagcctggatgaagtgcttcatgaaaaatctgaacagttggattgggatgcacgtattaacattatacttggagctgcaaaaggcttgtcttacttgcatcatgactgttcgcctcgaataatacatcgtgatattaagtctagcaacatcttgcttgatggcagtttcgaggcccgtgtatcagactttggacttgcaaagcttttagaggatgaagaatcacatattactacaatagttgcaggaacatttggctaccttgcaccagagtatatgcaatttggcagagccaccgagaagactgatgtctacagttttggggttttggtactcgaaatactcagtggaaagcggcctactgatgcatccttcattgagaagggactaaacattgttggatggttaaattttcttgctagtgagaaccgggagagggaaattgtcgacctgaactgtgaaggagtgcagactgagaccttagatgccctgctctctcttgccaagcaatgtgttagctcctcgccagaggagaggccgacaatgcacagggtggtacatatgctggagtcggatgtaattacaccgtgccctagcgacttctatgattcagagtagtctcctggacaagccacgctgctgctagtttcccgtgggggcgcattcctttattctttgcgtatattgtgtaaatgcattgccgcggtgtttggtctccaatcggctggctcaacgggtgacttttttttgcgtctgtatacctatgtatgtatctgtcatggtacaagttggctatatgctgatttaataataagagagaacttactagtagactattgtatgtttaactatagtctttagatactcgtagatgttgtgggatctacaaaagaaatggggaaataatgaatatcgcttggaacaaacaagaatagat

SEQ ID NO: 221012 - DNA, 1723 bp, Zea Mays
tccatgactgttctggaagctccaagcgttggcgaaaaaagtaagatatttctgcgaggcaaggaatccctcccccgcttctactctttcggttcgccggttcgccgtctcgcacacccacttcctacaccgccaccgagcactcgctcagtttcatacccatcctcgaagtcgcctctgtctagttcctgctcttccaccaccgcctgtgatgtatccccgaggcccggatgggggacgagatgcctcgtctcgccctatgcttgccactcccgccggcaacgacacgcgcgaggaggatgagatcaccaccgcggaggctcatgtggagaaagacgccgcgcggatggacgctgccctcctcatgcggactacgcccaagatggacgagtttcacaccgggggcgatctggactcaagtggaagtggaagcggcatctcggggccaagcgcctccaaaagacagctacaaagaaggggatcgtggcggcaacgagtcagcaggtccagcatccatgcttatccttttcctttgtgtttctatttgatctgtttttttgcccgcgccagcaacagagaagaatgtggtcgtggctgtaatgggtcagcaggaaatgttgcatgtgttgccgacagaaccatctcactctctctttagtttctgcaattttttggacgaccgagaggtgctgccgtttatgagtaactttccagtgggaaaacagtatgccacaacatcatggtcagagtttggacattgcatgaagcacttgctggacaattgagaagaactcatgcctacttgcaggcatcatctcaaccatacaatgggattcattgaaatatcaggagggttgttgtacacgtgagtggaggtcgaacccttcttgtagggctcttaatgtatgaagtacgccatgctagctattgaatcaagttcaatgggattcgttaaaatataaggagggttgttgtacaagtgagacaaggtcagcccttcttgcagggctcttaatataagcctgtactacacgttcatccacgtcgagctcgtcggctcccaacgcaaccccttcttctctcacgagatcagtggtgaggacgacactggggatagagacctagggttctccaagtgggcctagaaactccatggcaacgtctcaggaaaaatgggcgcattgaagtcttgaaggactttcaggaatactaattttgagaattcgtggaaataaaaatagggttggctttatcaaactgcacaaaaaaatcagcagcacttctctttatcatgcaaggaaaatcaaacttaggagcatcttccaatttcgtcagcagctgagccgattgtgatctctgatcactatacaaccatggaaataaataatgcagctttgctctgcaaattttatacaatagttcttgaatcgatattgactactactatattcacaacgtcatccacaaacatcattctaagaaaactaacaacatatgatggtatgtaaagcatgtttagtgtcaaaaaatgatatgatatatgttaagtacattctataagtttttttttcttggaccatctcgcagtcacacgctaagatactacatatgactatctgcacaaatccttcaccacagttcaaactggccagatgtactccgcatggacatatgtttaggacaacgcattactgtttttctgtcattcaatgctattggccct

SEQ ID NO: 221013 - DNA, 2081 bp, Zea Mays
tccatgactgttctggaagctccaagcgttggcgaaaaaagtaagatatttctgcgaggcaaggaatccctcccccgcttctactctttcggttcgccggttcgccgtctcgcacacccacttcctacaccgccaccgagcactcgctcagtttcatacccatcctcgaagtcgcctctgtctagttcctgctcttccaccaccgcctgtgatgtatccccgaggcccggatgggggacgagatgcctcgtctcgccctatgcttgccactcccgccggcaacgacacgcgcgaggaggatgagatcaccaccgcggaggctcatgtggagaaagacgccgcgcggatggacgctgccctcctcatgcggactacgcccaagatggacgagtttcacaccgggggcgatctggactcaagtggaagtggaagcggcatctcggggccaagcgcctccaaaagacagctacaaagaaggggatcgtggcggcaacgagtcagcaggtccagcatccatgcttatccttttcctttgtgtttctatttgatctgtttttttgcccgcgccagcaacagagaagaatgtggtcgtggctgtaatgggtcagcaggtacaccatccacgctcatcatttcctttgtgtttctgtttgatctatttttttaaaatttctttatcagtttgattagcatccacttgcatccgctcatagtttgattcgtgttcgttggatgggcctcaaaattaccagttgcttcgactacactctctgaatttcgcagatcaagataaaacccgacacaaaggaatgaatagcacacaaaaaatcacagtattatttagtcatattggacacgaataagttaaatttcttaaattttagatccacatttttgtattttggtctagactatcaaaaaaatcctagaaatgtccctctgcctctcgcgcgtgaattctcctctgccgaagggaagacactcaaaggcgagctactgatcttcaactgcttttctggattctctttgcaatatgctttgttggggctagatctgaaatcaatgtttttaataatctagcacaaataggaaatgttgcatgtgttgccgacagaaccatctcactctctctttagtttctgcaattttttggacgaccgagaggtgctgccgtttatgagtaactttccagtgggaaaacagtatgccacaacatcatggtcagagtttggacattgcatgaagcacttgctggacaattgagaagaactcatgcctacttgcaggagggttgttgtacacgtgagtggaggtcgaacccttcttgtagggctcttaatgtatgaagtacgccatgctagctattgaatcaagctcagcctgtactacacgttcatccacgtcgagctcgtcggctcccaacgcaaccccttcttctctcacgagatcagtggtgaggacgacactggggatagagacctagggttctccaagtgggcctagaaactccatggcaacgtctcaggaaaaatgggcgcattgaagtcttgaaggactttcaggaatactaattttgagaattcgtggaaataaaaatagggttggctttatcaaactgcacaaaaaaatcagcagcacttctctttatcatgcaaggaaaatcaaacttaggagcatcttccaatttcgtcagcagctgagccgattgtgatctctgatcactatacaaccatggaaataaataatgcagctttgctctgcaaattttatacaatagttcttgaatcgatattgactactactatattcacaacgtcatccacaaacatcattctaagaaaactaacaacatatgatggtatgtaaagcatgtttagtgtcaaaaaatgatatgatatatgttaagtacattctataagtttttttttcttggaccatctcgcagtcacacgctaagatactacatatgactatctgcacaaatccttcaccacagttcaaactggccagatgtactccgcatggacatatgtttaggacaacgcattactgtttttctgtcattcaatgctattggccct

SEQ ID NO: 221014 - DNA, 1835 bp, Zea Mays
tccatgactgttctggaagctccaagcgttggcgaaaaaagtaagatatttctgcgaggcaaggaatccctcccccgcttctactctttcggttcgccggttcgccgtctcgcacacccacttcctacaccgccaccgagcactcgctcagtttcatacccatcctcgaagtcgcctctgtctagttcctgctcttccaccaccgcctgtgatgtatccccgaggcccggatgggggacgagatgcctcgtctcgccctatgcttgccactcccgccggcaacgacacgcgcgaggaggatgagatcaccaccgcggaggctcatgtggagaaagacgccgcgcggatggacgctgccctcctcatgcggactacgcccaagatggacgagtttcacaccgggggcgatctggactcaagtggaagtggaagcggcatctcggggccaagcgcctccaaaagacagctacaaagaaggggatcgtggcggcaacgagtcagcagcaacagagaagaatgtggtcgtggctgtaatgggtcagcaggtacaccatccacgctcatcatttcctttgtgtttctgtttgatctatttttttaaaatttctttatcagtttgattagcatccacttgcatccgctcatagtttgattcgtgttcgttggatgggcctcaaaattaccagttgcttcgactacactctctgaatttcgcagatcaagataaaacccgacacaaaggaatgaatagcacacaaaaaatcacagtattatttagtcatattggacacgaataagttaaatttcttaaattttagatccacatttttgtattttggtctagactatcaaaaaaatcctagaaatgtccctctgcctctcgcgcgtgaattctcctctgccgaagggaagacactcaaaggcgagctactgatcttcaactgcttttctggattctctttgcaatatgctttgttggggctagatctgaaatcaatgtttttaataatctagcacaaataggaaatgttgcatgtgttgccgacagaaccatctcactctctctttagtttctgcaattttttggacgaccgagaggtgctgccgtttatgagtaactttccagtgggaaaacagtatgccacaacatcatggtcagagtttggacattgcatgaagcacttgctggacaattgagaagaactcatgcctacttgcagcctgtactacacgttcatccacgtcgagctcgtcggctcccaacgcaaccccttcttctctcacgagatcagtggtgaggacgacactggggatagagacctagggttctccaagtgggcctagaaactccatggcaacgtctcaggaaaaatgggcgcattgaagtcttgaaggactttcaggaatactaattttgagaattcgtggaaataaaaatagggttggctttatcaaactgcacaaaaaaatcagcagcacttctctttatcatgcaaggaaaatcaaacttaggagcatcttccaatttcgtcagcagctgagccgattgtgatctctgatcactatacaaccatggaaataaataatgcagctttgctctgcaaattttatacaatagttcttgaatcgatattgactactactatattcacaacgtcatccacaaacatcattctaagaaaactaacaacatatgatgtcacacgctaagatactacatatgactatctgcacaaatccttcaccacagttcaaactggccagatgtactccgcatggacatatgtttaggacaacgcattactgtttttctgtcattcaatgctattggccct

SEQ ID NO: 221015 - DNA, 2166 bp, Zea Mays
cattctccatgactgttctggaagctccaagcgttggcgaaaaaagtaagatatttctgcgaggcaaggaatccctcccccgcttctactctttcggttcgccggttcgccgtctcgcacacccacttcctacaccgccaccgagcactcgctcagtttcatacccatcctcgaagtcgcctctgtctagttcctgctcttccaccaccgcctgtgatgtatccccgaggcccggatgggggacgagatgcctcgtctcgccctatgcttgccactcccgccggcaacgacacgcgcgaggaggatgagatcaccaccgcggaggctcatgtggagaaagacgccgcgcggatggacgctgccctcctcatgcggactacgcccaagatggacgagtttcacaccgggggcgatctggactcaagtggaagtggaagcggcatctcggggccaagcgcctccaaaagacagctacaaagaaggggatcgtggcggcaacgagtcagcaggtccagcatccatgcttatccttttcctttgtgtttctatttgatctgtttttttgcccgcgccagcaacagagaagaatgtggtcgtggctgtaatgggtcagcaggtacaccatccacgctcatcatttcctttgtgtttctgtttgatctatttttttaaaatttctttatcagtttgattagcatccacttgcatccgctcatagtttgattcgtgttcgttggatgggcctcaaaattaccagttgcttcgactacactctctgaatttcgcagatcaagataaaacccgacacaaaggaatgaatagcacacaaaaaatcacagtattatttagtcatattggacacgaataagttaaatttcttaaattttagatccacatttttgtattttggtctagactatcaaaaaaatcctagaaatgtccctctgcctctcgcgcgtgaattctcctctgccgaagggaagacactcaaaggcgagctactgatcttcaactgcttttctggattctctttgcaatatgctttgttggggctagatctgaaatcaatgtttttaataatctagcacaaataggaaatgttgcatgtgttgccgacagaaccatctcactctctctttagtttctgcaattttttggacgaccgagaggtgctgccgtttatgagtaactttccagtgggaaaacagtatgccacaacatcatggtcagagtttggacattgcatgaagcacttgctggacaattgagaagaactcatgcctacttgagggttgttgtacacgtgagtggaggtcgaacccttcttgtagggctcttaatgtatgaagtacgccatgctagctattgaatcaagttcaatgggattcgttaaaatataaggagggttgttgtacaagtgagacaaggtcagcccttcttgcagggctcttaatataagctcagcctgtactacacgttcatccacgtcgagctcgtcggctcccaacgcaaccccttcttctctcacgagatcagtggtgaggacgacactggggatagagacctagggttctccaagtgggcctagaaactccatggcaacgtctcaggaaaaatgggcgcattgaagtcttgaaggactttcaggaatactaattttgagaattcgtggaaataaaaatagggttggctttatcaaactgcacaaaaaaatcagcagcacttctctttatcatgcaaggaaaatcaaacttaggagcatcttccaatttcgtcagcagctgagccgattgtgatctctgatcactatacaaccatggaaataaataatgcagctttgctctgcaaattttatacaatagttcttgaatcgatattgactactactatattcacaacgtcatccacaaacatcattctaagaaaactaacaacatatgatggtatgtaaagcatgtttagtgtcaaaaaatgatatgatatatgttaagtacattctataagtttttttttcttggaccatctcgcagtcacacgctaagatactacatatgactatctgcacaaatccttcaccacagttcaaactggccagatgtactccgcatggacatatgtttaggacaacgcattactgtttttctgtcattcaatgctattggccct

SEQ ID NO: 221016 - DNA, 2107 bp, Zea Mays
acgcatcgctgctccattctccatgactgttctggaagctccaagcgttggcgaaaaaagtaagatatttctgcgaggcaaggaatccctcccccgcttctactctttcggttcgccggttcgccgtctcgcacacccacttcctacaccgccaccgagcactcgctcagtttcatacccatcctcgaagtcgcctctgtctagttcctgctcttccaccaccgcctgtgatgtatccccgaggcccggatgggggacgagatgcctcgtctcgccctatgcttgccactcccgccggcaacgacacgcgcgaggaggatgagatcaccaccgcggaggctcatgtggagaaagacgccgcgcggatggacgctgccctcctcatgcggactacgcccaagatggacgagtttcacaccgggggcgatctggactcaagtggaagtggaagcggcatctcggggccaagcgcctccaaaagacagctacaaagaaggggatcgtggcggcaacgagtcagcagagaagaatgtggtcgtggctgtaatgggtcagcaggtacaccatccacgctcatcatttcctttgtgtttctgtttgatctatttttttaaaatttctttatcagtttgattagcatccacttgcatccgctcatagtttgattcgtgttcgttggatgggcctcaaaattaccagttgcttcgactacactctctgaatttcgcagatcaagataaaacccgacacaaaggaatgaatagcacacaaaaaatcacagtattatttagtcatattggacacgaataagttaaatttcttaaattttagatccacatttttgtattttggtctagactatcaaaaaaatcctagaaatgtccctctgcctctcgcgcgtgaattctcctctgccgaagggaagacactcaaaggcgagctactgatcttcaactgcttttctggattctctttgcaatatgctttgttggggctagatctgaaatcaatgtttttaataatctagcacaaataggaaatgttgcatgtgttgccgacagaaccatctcactctctctttagtttctgcaattttttggacgaccgagaggtgctgccgtttatgagtaactttccagtgggaaaacagtatgccacaacatcatggtcagagtttggacattgcatgaagcacttgctggacaattgagaagaactcatgcctacttgcaggagggttgttgtacacgtgagtggaggtcgaacccttcttgtagggctcttaatgtatgaagtacgccatgctagctattgaatcaagttcaatgggattcgttaaaatataaggagggttgttgtacaagtgagacaaggtcagcccttcttgcagggctcttaatataagcctgtactacacgttcatccacgtcgagctcgtcggctcccaacgcaaccccttcttctctcacgagatcagtggtgaggacgacactggggatagagacctagggttctccaagtgggcctagaaactccatggcaacgtctcaggaaaaatgggcgcattgaagtcttgaaggactttcaggaatactaattttgagaattcgtggaaataaaaatagggttggctttatcaaactgcacaaaaaaatcagcagcacttctctttatcatgcaaggaaaatcaaacttaggagcatcttccaatttcgtcagcagctgagccgattgtgatctctgatcactatacaaccatggaaataaataatgcagctttgctctgcaaattttatacaatagttcttgaatcgatattgactactactatattcacaacgtcatccacaaacatcattctaagaaaactaacaacatatgatggtatgtaaagcatgtttagtgtcaaaaaatgatatgatatatgttaagtacattctataagtttttttttcttggaccatctcgcagtcacacgctaagatactacatatgactatctgcacaaatccttcaccacagttcaaactggccagatgtactccgcatggacatatgtttaggacaacgcattactgtttttctgtcattcaatgctattggccct

SEQ ID NO: 221017 - DNA, 1340 bp, Zea Mays
tccatgactgttctggaagctccaagcgttggcgaaaaaagtaagatatttctgcgaggcaaggaatccctcccccgcttctactctttcggttcgccggttcgccgtctcgcacacccacttcctacaccgccaccgagcactcgctcagtttcatacccatcctcgaagtcgcctctgtctagttcctgctcttccaccaccgcctgtgatgtatccccgaggcccggatgggggacgagatgcctcgtctcgccctatgcttgccactcccgccggcaacgacacgcgcgaggaggatgagatcaccaccgcggaggctcatgtggagaaagacgccgcgcggatggacgctgccctcctcatgcggactacgcccaagatggacgagtttcacaccgggggcgatctggactcaagtggaagtggaagcggcatctcggggccaagcgcctccaaaagacagctacaaagaaggggatcgtggcggcaacgagtcagcagcaacagagaagaatgtggtcgtggctgtaatgggtcagcagtttctgcaattttttggacgaccgagaggtgctgccgtttatgagtaactttccagtgggaaaacagtatgccacaacatcatggtcagagtttggacattgcatgaagcacttgctggacaattgagaagaactcatgcctacttgcaggcatcatctcaaccatacaatgggattcattgaaatatcaggagggttgttgtacacgtgagtggaggtcgaacccttcttgtagggctcttaatgtatgaagtacgccatgctagctattgaatcaagttcaatgggattcgttaaaatataaggagggttgttgtacaagtgagacaaggtcagcccttcttgcagggctcttaatataagctcagcctgtactacacgttcatccacgtcgagctcgtcggctcccaacgcaaccccttcttctctcacgagatcagtggtgaggacgacactggggatagagacctagggttctccaagtgggcctagaaactccatggcaacgtctcaggtttcatgcagttctctaaatttattttgctcgattgtaagggaactgtgtcctctataagctcgcgctcgtgctgtaccgggagtaccccttcttcctgcaagtctggttcaattaaaaaattttgttctgtcgtgttgtaaagtacttggcgagctatgatatgtcattaccttagtgagaagactgcttctaatatattagtaatttttagctgtgcagatcatgtcatcatataaatgttgcaaacattataaaatagaggatccatttgaactctt

SEQ ID NO: 221018 - DNA, 722 bp, Zea Mays
aaatttctttgtgaacaaaattccaccgaatcgctgtcgttcgacaccgtcaacggcggccgcgcgctcacgtcccggcggccacgggccgtgacagactcgagcccgtccgccgccttcgccgcgccgcctccgcctcctccatcgcacgccgactccgctgcctacatccgcgcacgtccgcctccactgcctccatccgctcgggagccgccgccctccgcgctaggcctcgcctccgtctggtctggattcttcgacatctggccatctgggcgctccgcgtcgccgacttctcgcaggcagagaatataccatggagcgccctcgatttagtgatcatcttgaagcaatcaagtttatctgcaaagatttttggtcagagctgttcaagaagcagattgacaatctgaaaacaaatcacaggggtacctttgtccttcaagataaccgttttcggtggcttactcgtgtttctctagatccacgtacagagaacacagattcaactgaaaatgattctgcagcattgggtgatactgcagcccaaacgactaccatgcttctgtatttcccatgcgggttgataagaggtgccttgaccaacttaggaatttcgtgttctgtctctgctgacatgtcaaaccttccagcatgggcctccaagcctccgaagaacacatcgttgtgacgtaatttaggctccggttgaatcaagtggc

SEQ ID NO: 221019 - DNA, 549 bp, Zea Mays
ttctagtaacaccagggtgcagaccaccggagccccctcctcttccttgtgcatggtgacttcctctccctctccaagctgtcgccgcccaccgccttagttcgcggacaacggcctcatcttcctcgtgtagaccaccagagccccctcctcttcctcgtgcagagcactggatccccatcttcctcacgcagagcacgaacataggagatttgcaaagcctcatcaagacggcaagagatctacaaagtccaaatcagtaaccatctgctgaaggtgatacaatgtaacatgtgcaagcataagaagttttttcagaagatcaaagggatggagctctgtggtgctaaatagatgtttaaaggaaagtcatgatgagcaaagccattgttgtcatgaatcaaaaaatcctaccatgtccatggcaaaaagttgtttctgcatacatattttaagggttgtgttttattgaatctgtttgattttattgatttttaatatttctattttatttgagatttgatgatgaacacatccattgtagccgtg

SEQ ID NO: 221020 - DNA, 849 bp, Zea Mays
tacaaacggagatattgctttgcggtggaggtggaggcgctcgtgatccaggggcccaagctgtcgaccatcctcagccaggtgaagaagctggaggcgtccgtgctggtgctcagccaacgcaaaccctcgcctttctgctgcttcctgcggagcaggagcagcagcgaggaggaggagctggtggaggagtgcataaaccgggcggagtgcctgacgctggcggtgcggcggcggagcaagggcgtgggcggctacctcgtgagcacccggtggcagaagaacttctggctgctcgcctgaccggtccacgaggactccccctcctcatcctcatcctttgacgcaacgcaagagttttacttacttcccgggctaatcgtttttacaaagtccaataataagtaaccaccaccaccaccactactgcatctgtttgttgatctgtaacctccagtgtcctagggtgtgtgccagccagtgtgcgtgtgcctgatcctctctctctccccacgatgtggtgctgtattctatgtatcgtcttggtttagctgtgctgctgtagcctgtagagtgtaagctagctgttgtgtagtgaaggcacgcagaagctgagccgatccgtttgccctgtctgttctgcgggaatctgtctgttttgcagagcggggatgcagaggcgcgggacggggacgtcagtacactgcgttgcgttgcgttgcgttgcataaactacgacttgtgtattgtgcttgtgcgatgtgtttgtttgcttgcttgcttgctacaatggttggtacagagttccataatgaagtgatgatgcgttttgactaactgtctccccct

SEQ ID NO: 221021 - DNA, 847 bp, Zea Mays
cctggaggcaagagttatgcaagtggaggtggaggcgctcgtgatccaggggcccaagctgtcgaccatcctcagccaggtgaagaagctggaggcgtccgtgctggtgctcagccaacgcaaaccctcgcctttctgctgcttcctgcggagcaggagcagcagcgaggaggaggagctggtggaggagtgcataaaccgggcggagtgcctgacgctggcggtgcggcggcggagcaagggcgtgggcggctacctcgtgagcacccggtggcagaagaacttctggctgctcgcctgaccggtccacgaggactccccctcctcatcctcatcctttgacgcaacgcaagagttttacttacttcccgggctaatcgtttttacaaagtccaataataagtaaccaccaccaccaccactactgcatctgtttgttgatctgtaacctccagtgtcctagggtgtgtgccagccagtgtgcgtgtgcctgatcctctctctctccccacgatgtggtgctgtattctatgtatcgtcttggtttagctgtgctgctgtagcctgtagagtgtaagctagctgttgtgtagtgaaggcacgcagaagctgagccgatccgtttgccctgtctgttctgcgggaatctgtctgttttgcagagcggggatgcagaggcgcgggacggggacgtcagtacactgcgttgcgttgcgttgcgttgcataaactacgacttgtgtattgtgcttgtgcgatgtgtttgtttgcttgcttgcttgctacaatggttggtacagagttccataatgaagtgatgatgcgttttgactaactgtctccccct

SEQ ID NO: 221022 - DNA, 747 bp, Zea Mays
cttacccattattcggagagcatctgcatttagcagctgagcttcctgcggagcaggagcagcagcgaggaggaggagctggtggaggagtgcataaaccgggcggagtgcctgacgctggcggtgcggcggcggagcaagggcgtgggcggctacctcgtgagcacccggtggcagaagaacttctggctgctcgcctgaccggtccacgaggactccccctcctcatcctcatcctttgacgcaacgcaagagttttacttacttcccgggctaatcgtttttacaaagtccaataataagtaaccaccaccaccaccactactgcatctgtttgttgatctgtaacctccagtgtcctagggtgtgtgccagccagtgtgcgtgtgcctgatcctctctctctccccacgatgtggtgctgtattctatgtatcgtcttggtttagctgtgctgctgtagcctgtagagtgtaagctagctgttgtgtagtgaaggcacgcagaagctgagccgatccgtttgccctgtctgttctgcgggaatctgtctgttttgcagagcggggatgcagaggcgcgggacggggacgtcagtacactgcgttgcgttgcgttgcgttgcataaactacgacttgtgtattgtgcttgtgcgatgtgtttgtttgcttgcttgcttgctacaatggttggtacagagttccataatgaagtgatgatgcgttttgactaactgtctccccct

SEQ ID NO: 221023 - DNA, 865 bp, Zea Mays
cggagatgcctttcctttgtccttggtcccttgcagttaaaatcgatctcccgaatggagcaaactgtcagtcattgtgtgccctgcccctacatagtgctacgcctgtctgtgaaagtaaaacatctggagaaaaaaaagtcaccttttcaaccacatcttcctgcggagcaggagcagcagcgaggaggaggagctggtggaggagtgcataaaccgggcggagtgcctgacgctggcggtgcggcggcggagcaagggcgtgggcggctacctcgtgagcacccggtggcagaagaacttctggctgctcgcctgaccggtccacgaggactccccctcctcatcctcatcctttgacgcaacgcaagagttttacttacttcccgggctaatcgtttttacaaagtccaataataagtaaccaccaccaccaccactactgcatctgtttgttgatctgtaacctccagtgtcctagggtgtgtgccagccagtgtgcgtgtgcctgatcctctctctctccccacgatgtggtgctgtattctatgtatcgtcttggtttagctgtgctgctgtagcctgtagagtgtaagctagctgttgtgtagtgaaggcacgcagaagctgagccgatccgtttgccctgtctgttctgcgggaatctgtctgttttgcagagcggggatgcagaggcgcgggacggggacgtcagtacactgcgttgcgttgcgttgcgttgcataaactacgacttgtgtattgtgcttgtgcgatgtgtttgtttgcttgcttgcttgctacaatggttggtacagagttccataatgaagtgatgatgcgttttgactaactgtctccccct

SEQ ID NO: 221024 - DNA, 3449 bp, Zea Mays
cgcgtcagttggccccacaactgcaccccatttcgaattcaaaccacctcctacggcccttcagccctcttcctgctccccctcctcgtctccttccatcgaagcttctacgccctcgccgaaggcccttgcccggggagcgcgaggcgcagtcatgacggagccgcgcagggtgtcgttccgcgacggctgcctcgcgtcgcggaaggccgaggaagcagcatggaggcggcatcaggctgcagcctggctccaagcaatggtgggctccttgggcctgcctccttatccgtcggagcaagagtttgttgcttctctaaggaatggcattgtcctatgcaaggcaatcaacaagttacagcctggtgccgtgacaaagattatcacaaatgcccccagcaatagccagccgttgacggcttttcagtatttcgagaacatccgcaacttcttagtcgctgtcaacaaactgaagctgacgagttttgaggcatctgacttagataaggacaatcttgatgctgggacggttggcaagattgttgactgtgtcatttcattgaagtcttaccatgaatggaagcaagccggcggagccaatgggcctaacaagtacatgaaatcacctcttgcagtgcgttcttcgcagattcaatccgaaaatgttgcttcgggaccttctccctccctaaagcgtctagacttgactgaggttgatgctgacacacagacatttcaaaatctagatcctaacatgaaagattgtgcatttgcagacgcagtggagaaacttcagaaagttatagtagattctatgttgagttctaaggaaaatattgaccaagacattctgaaaaaggttccatcaaagcttattggtgctgttttagcaagccaactgggaaaagaacagttcaaacatcttcagcttttatctccggaaaagcttatagcggagaatgagccaactcattgtattgagcatcccaactcaccgattgagagcaaacaattgctgttgcaagcacatgaaactgaacttttggacctcaagaaaatgtttcaagatgttaaagtcaacttcaggtctttgcagacccaatttcgagatgacatggccaaattaggtgaaaatatccaagatctttccaaagctgcccttggttataaccaagccgtaaaagaaaacagaaatttgtataacatgcttcaagaactgcgaggaaatatccgagtcttctgccggataaggccacttcttcattcagagtctatttcttcaattgaacatgttggaaccgatggctcagtgatggtctgtgatccagttaaaccacaaagtgcacataaaatattccagttcaacaaagtttttgggccaacaactactcaagatgaagtgtataaggagacacaacctttggttagatccgtcatggatggatataatgtatgcatatttgcttacggtcagacaggttccggcaaaacccatacaatgtgtggcccatctggtgggctgtccaaggattatggaattaattacatggccttgaatgatctcttcaacatatcaacttctagagaagatgtcaagtacgacatacgggtgcagatggttgaaatatacaatgaacaagttcgtgatcttctaaatgaggacagatcaagcacaaaattagatataagggcttccttgaacaatggtctatccaaccttccagatgcaaagatctgcccagtgcagtccccttctgatgttatcaatttgatgcagttgggtgaaaagcaccgagcttccggatcaacagcaatgaaccataggagcagtcgttcccacagtatcttaactgtccatgtaaatggaaaggacattgctggcaatgtgagccgtagcagtttgcatttggtagatcttgcaggaagcgaaagggttgataggtcagaagccacaggagacagattaaaagaggctcagcatattaacaagtcactctcctgccttggagatgtcatcaacgcattagctcagaagaactctcacattccttatagaaatagtaaactcacccaactactacaaagttcattaggggggaatgcaaaaatgctaatgtttgcccacataagtccggatgcagaatcttgtgcagaaacccttagtacactaaaatttgctcagagggcttctactgtagaacttgggactgcactcgcaaacaaagaaagcagtgaagtaagagagcttaaggaacaggtagatactctgaaaaaggcattagcaagtaaagaactggaaaaaacaactcttaaagtgaagggaagtgcaaccacgagtgagagaacaaagcaagtactggattgcactccccctaggccacggagattaagcctagagaatgctagtgataaagccaggatgccagaaagaaagatactgaaatcccctcgttcagctgtgggtataacccacgacaaggaatgcaacactgatgccttccgtcacgccaaccaccacgaatcactaatacagatgtcagcggcatgcgctgaagttcttgttagagaggaggagaagataatttgtacagttgatacagtggaattttgtcagctacccactgaagcttataatctacttaagcaatcaggattaaatactccagaggcagcaccttgtaggtcaaggaacctgcgcactgaagcaagttgcggtgatgctctttcttccactaccaaattggagaaaataatggcaggtactgcagtgaagaagggatctcaactaaagaagtcaattcaaagcagcatagggagattgattcatggtactgaaagaaggaacgcgcagcattcagcacaagggactccaactaaaatcatagctagcggatgccataataatgtctccccagttacagctgatatcaggttaaggagaagacagtcactgacaggtatcccaccaccgctcccaactatgtcacgcagatcctcacttggagggaggtcggatacaagttcaaacgacaaaagaggtgcaaaaacaccacctcccgtgaactcggcagcaaaggctaaaagatggctttgaatctgaagcagaactgtcagaaaattttgactccaagcagagctcaaggcagacacgtatttggtgccatcacttaactgtggttttaggccttgggtggtggttacattctttgtaacagctgaagcattagttgtacaagggggaagggtgtgtgtttgttgtattctggatttctatgatggagcattggagcaactcacttgttcgatttattatgggatgtttgttttgaggaaatcaccccatctaagatgaagtggtgcattatgagttcatttcttaaattttgtggaatgatcttattcttcgtgttagtactaactatgggggataaggtgatgatggataaact

SEQ ID NO: 221025 - DNA, 1102 bp, Zea Mays
gatttgatgctaggcgtaattccattcgtgttctgtgaacttgcttgccctggatctttctgaagatgaccgcaaccagcttgagaagatggaagtagccagcacgtgcacagtgttttgtccaattgctggttgtggtgctcatctagattgcctggaggagtttgaggaccactatgtcactcgacatactgcttcatgctctgtatgctcgcgagtttatccaacttcaaggttgctgagcatccatgtttctgagacgcacgactcgtatttccaagcaaaagttgcccgtggttttccaatgtacgagtgtttggtggagggttgtggtatgaaattgaagagttacaagagccggcagcagcatctcatcgataagcatcagtttcccaaatcatttgagttcttcaaaaaggcacgggactcccagcgtcagcggcagaagtcccagaggaggcagactgctcacaagggtgaagagacaagggataattcgatggacgtcgacggaaaaggtgcaaggcaaacaaaccggaggtaccggctgaagcaacatgatcatagcgaaccgaaagagaacaagcagcagcataaggaggcccaggaggacgaaatggaggtcgagcagaagattgatgagctcacctctgctgtatcgaggttgagcacagcagattctacgccctcaagcgtcacctttggccaccgtcgctctcgtggccttacgtttgttcccaggtcaatcaggcagaataagcaggcggccctcccagctggaagcaacaaatgactaaccactgtcatttggccttttggtagttccagaatctggcttggagctattaactttgtatgaaaaaatgatcttggatgttaaatgtaccacgggaagctcatgtttccactgatatccttggatgactcagtgggcaaacgttttcttggctatatataatggtgttatactgctttgcagaaacgcaacgcagtgggcccacaaaactctgtatgctgtattgaaaatgtttgcataggtttcgtagactgttctccgcggttactcataaaattcttcaactatatattacttttacacccc

SEQ ID NO: 221026 - DNA, 2787 bp, Zea Mays
gcccacctaccgaagtccgaaacctcgccaagcggcaccaaaaaaacgcagccaatcgaaaccctacgtccgccgccagcttcaagctcccagagaccaaaccttccctccctacacactaacccacaccagccgccggccagcagcagccatgccgcccaagttggacccctcgcaggtggtcgaggtattcgtccgcgtgacgggcggctaggtcggcgcggcgtcgtcgctggcgcccaagatcggcccgctcggcctctccccgaagaagatcggcgaggacatcgccaaggagaccgccagggactggaagggcctgcgcgtcaccgtgaagctcacggtgcagaaccggcaggccaaggtctccgtcgtcccctccgccgccgccctcgtcatcaaggcgctcaaggagcccgagcgggaccggaagaaggtcaagaacatccggcacagcggcaacgtcgccctcgacgacgtcgtcgagatcgccaggaccatgcgccccagatccatggccaaggagatggccggcaccgtcaaggagatcctcggcacctgcgtcagcgtcgggtgcaccgtccacggcaaggaccccaaggacctgcagcaggagatcgatgatggtgaggtcgagatcccctccgcttaaaggggtttcgcccggttcgacaacatcagggacgacagcggcgccatgccgctacacctcgccgccatgcaaggccgccccgcctacatgcaggtgctactagagaacgacgccattgtctccgttctcacaggctcatacaggtttaaaatctctcctgcgacagcaactgggcactaaactcaagcaatccctccagagcctcagctctctgctggttagtgccttactggtgtctaccactggctagggaccggtaatatctatgctgtctgacaagtcatctggccactcccttaaggaccaattaactcgcatggctgagaatgactatctacttagcggtggccttgaaggtattggttctactggaaagaagtgtgaagtcgctcgccgaagaaatggtttagataccaacaagccaaaaaaaggtggtgggccaacaggaagagagctgaatatcggacaagcatgtttccattcagaaccgagcaacgcttcaaaccagttcatcctagcccaattgatgcaggtgaattcattcttaagcaggacaacaactattactatacatcccttgtttagtctgcaaagctggtacaatggcaggtgcaacattttgagataattggattggacaagcttcttgataatagttctgtagaatcaatgaatgaggaacatacaattggtgattcattagacgaggctgagcaggaggaattgaaccatgagattgctctggagtctactgaagactgcactggctccttgtgcaaagccactgcttttctatttcccaagacagcttttgacttcctgacaaatgtggctgctagtttgtttggtattcatggttctccatctccaagctcagttttggtagatcctcgatatgaaattgtgaagatggcagaaatgcagccatgtgcagaagaaacgccaaaagaagaacagatagtgaagtttgtggcgcagattgacaagccaattctctcttcagaggatgccgtctcaaaaagattcgatgtagtcactgactgtttggatcatcattttgtgaaggaaaatggccatgaaagtgttacaagaggttggctgaagaaggtgcgactggaatggaacatcctgcaaaatgacctaccagatggtattcatgtgagagtttatgaggaaaggatggatcttctgagggcttgcatcgttggggcacctggaacaccttaccatgacaatctttttttcttcgatattttctttcctcctgattaccctcatgaaccaccttgactggagcggcaagtgactcgcggcgggcggcggggactcgcggatggcgcccgcgaatcgcggcgttgggcgggcgggcgggcggcggttgtttgcggctgcgggatcctcagcggttgtgcgcgcgggagccacgcgagctggcggcggcggctgcgagatcctcggcggttgtgcgcgcgggagccacgggagcgaggggagagcgggcggttgtgcgcgcgggagccacgcgagctggcggcggttgtttgcggctgcgggatcctcggcggttgtgcgcgcgggagccacgggagtgaggggagagcgggggcagtctacatgtgagtcttaatagttgtagaagactttggaaagtagtggaatgtcacattctaaaaaaatagcctattctaatagtaagattctaattcctcaaaatgaaaagaaacaaacggggcctaagtgttttggtgattaagtatccaacacaaatgttttgaactctttatgtgttaaacaggcaaaaagtatgtttctagacttggtaaattgttttatgtactaacatggttatcaaagtgttagaaacagtgactaaagaacaagagaagaaaagggagaagagttggctgtgtgcagccaacactagctcggtctgggtgcaccggactgtccggtggtgcaccgaacagcgtccggtgcgccaggctggtccgcgtgaactcgctgctctcgggactcgacgacggcgtacggttaaaaatcaacggactgtccggtgagtcatctgcgacgaactcgatgctctcgggaatgaagaaaggcgacatggctataattcaccggactgtctggtggtg

SEQ ID NO: 221027 - DNA, 3076 bp, Zea Mays
cctcgccaagcggcaccaaaaaaacgcagccaatcgaaaccctacgtccgccgccagcttcaagctcccagagaccaaaccttccctccctacacactaacccacaccagccgccggccagcagcagccatgccgcccaagttggacccctcgcaggtggtcgaggtattcgtccgcgtgacgggcggctaggtcggcgcggcgtcgtcgctggcgcccaagatcggcccgctcggcctctccccgaagaagatcggcgaggacatcgccaaggagaccgccagggactggaagggcctgcgcgtcaccgtgaagctcacggtgcagaaccggcaggccaaggtctccgtcgtcccctccgccgccgccctcgtcatcaaggcgctcaaggagcccgagcgggaccggaagaaggtcaagaacatccggcacagcggcaacgtcgccctcgacgacgtcgtcgagatcgccaggaccatgcgccccagatccatggccaaggagatggccggcaccgtcaaggagatcctcggcacctgcgtcagcgtcgggtgcaccgtccacggcaaggaccccaaggacctgcagcaggagatcgatgatggtgaggtcgagatcccctccgcttaaaggcaatcctcgcggcggcgcggactacgacggtggctgactcgtagcgagaccttctccctcctcccccgcctgacgcccggcgaccactactcactcgctgctctggaagtctggcaggggtttcgcccggttcgacaacatcagggacgacagcggcgccatgccgctacacctcgccgccatgcaaggccgccccgcctacatgcaggtgctactagagaacgacgccattgtctccgttctcacaggctcatacagctgctgcaggtttaaaatctctcctgcgacagcaactgggcactaaactcaagcaatccctccagagcctcagctctctgctgggaccggtaatatctatgctgtctgacaagtcatctggccactcccttaaggaccaattaactcgcatggctgagaatgactatctacttagcggtggccttgaaggtattggttctactggaaagaagtgtgaagtcgctcgccgaagaaatggtttagataccaacaagccaaaaaaaggtggtgggccaacaggaagagagctgaatatcggacaagcatgtttccattcagaaccgagcaacgcttcaaaccagttcatcctagcccaattgatgcaggtgaattcattcttaagcaggacaacaactattactatacatcccttgtttagtctgcaaagctggtacaatggcaggtgcaacattttgagataattggattggacaagcttcttgataatagttctgtagaatcaatgaatgaggaacatacaattggtgattcattagacgaggctgagcaggaggaattgaaccatgagattgctctggagtctactgaagactgcactggctccttgtgcaaagccactgcttttctatttcccaagacagcttttgacttcctgacaaatgtggctgctagtttgtttggtattcatggttctccatctccaagctcagttttggtagatcctcgatatgaaattgtgaagatggcagaaatgcagccatgtgcagaagaaacgccaaaagaagaacagatagtgaagtttgtggcgcagattgacaagccaattctctcttcagaggatgccgtctcaaaaagattcgatgtagtcactgactgtttggatcatcattttgtgaaggaaaatggccatgaaagtgttacaagaggttggctgaagaaggtgcgactggaatggaacatcctgcaaaatgacctaccagatggtattcatgtgagagtttatgaggaaaggatggatcttctgagggcttgcatcgttggggcacctggaacaccttaccatgacaatctttttttcttcgatattttctttcctcctgattaccctcatgaaccacctgtaagctcttccattccagtctctattgttcttgtagacaaaatcacgtgtttggagacggatttgatagcctaccaaccacgtcaccgtgcgtgcaggattaattattcagccttgcactgcaccactgtcaatctgtcaggccacgccacagcgtgattttgtctacatacagtacggttaatctctttttttctgattgatctctgtgatccagtgactggagcggcaagtgactcgcggcgggcggcggggactcgcggatggcgcccgcgaatcgcggcgttgggcgggcgggcgggcggcggttgtttgcggctgcgggatcctcagcggttgtgcgcgcgggagccacgcgagctggcggcggcggctgcgagatcctcggcggttgtgcgcgcgggagccacgggagcgaggggagagcgggcggttgtgcgcgcgggagccacgcgagctggcggcggttgtttgcggctgcgggatcctcggcggttgtgcgcgcgggagccacgggagtgaggggagagcgggggcagtctacatgtgagtcttaatagttgtagaagactttggaaagtagtggaatgtcacattctaaaaaaatagcctattctaatagtaagattctaattcctcaaaatgaaaagaaacaaacggggcctaagtgttttggtgattaagtatccaacacaaatgttttgaactctttatgtgttaaacaggcaaaaagtatgtttctagacttggtaaattgttttatgtactaacatggttatcaaagtgttagaaacagtgactaaagaacaagagaagaaaagggagaagagttggctgtgtgcagccaacactagctcggtctgggtgcaccggactgtccggtggtgcaccgaacagcgtccggtgcgccaggctggtccgcgtgaactcgctgctctcgggactcgacgacggcgtacggttaaaaatcaacggactgtccggtgagtcatctgcgacgaactcgatgctctcgggaatgaagaaaggcgacatggctataattcaccggactgtctggtggtg

SEQ ID NO: 221028 - DNA, 3954 bp, Zea Mays
ccctcccccacgtccgcctgctcgcgctcgagctcgagccgcatctcccaaaccctacccatataaaatattaagcccaacgcccgagtctctctctctctcaacttcccttcccaccaccctcaccctccccttcccgccgccaccaccagttcaaccctctctccctcaaaccctagccgccgccgcgctcgttccggattcggttccgatccgatggcgtccgccgaggaccaggccgcggccgccgcgctgctggggggtgacccggcggcgttcgacgcgctgctctcgacgctcatgtcgtcctccaacgccgaccgttccgccgccgaggccgccttccaccgcctccgggcctcgcacccggagcccctcgcgctgcggctcgccacctcgctggcggcgcccaccacccccgccgacctgcgcgccatggcgggggtcctcctccgcaaggtcctctccccggccccgtcttccgacgcgtcctccaacaacgccacgcccccggcgccgctctggccgcagctctcccccgcggggcaggccgcgctcaaggcgcacctcctctccgcgctccagtccgatcctcccaagcccatcgccaagaaggtctgcgacgctatctctgagctcgcggcctcgctgctgcctgagaacgcctggcccgagctgctgccgttcctcttccgcgccgcgtcggggcctgatgcgcacaaccttcaggagtcagcgctgctcatcttcgcgaggctggcggattacatcgcagaatctctcctcgaccatctcatgactatccacaacctcctcgcctcagccctggcgcatcccacgtctcctgatgttcggattgcggccctgggtgccgcagtcaaccttgttcagtgcctgccaaccaactccgacagggataagatgcaggatttgctcccagcaatgatgagggcgctcactgattgcctaaactctggccaggaagtctctgcgcaggaggcactggagctgctggtggagctcgctggcgccgagccaaggttcctgaggaggcagattgctgatgtggtaggggcaatgttgcaagttgctgaggctacacagctggaagatgggaccagacacttggcggtggagtttgtgattactctagctgaggctagagagcgtgcaccaggaatgatgcggcgactcccgcagtttgttggtaggctgtttgcagtgctgatgcagatgctgcttgatgtcgaggatgaccctgcttggcactctgctgaaactgaagatgaggacgcaggggaagggaacaactatggagtggcgcaggagtgccttgaccgcctttccatcgccattggtgggaacgcaattgtaccaattgcttctgagctgctaccacagtacctgtcttctgctgagtggcagaagcaccatgctgcgctcattacacttgcacagattgcggaaggatgtgcaaaggttatgcttaaaaatttggaacaagtcgtttcgatgatattgaatggatttcaacatccccacccacgtgtgagatgggctgctatcaatgccatcggtcagctttctacggatttgggcccagatcttcaagttcattaccaccagcaggtgctgcctgcattggccaatgctatggatgatttccagaatccacgagttcaggcacatgctgcttcagcgattttgaattttagtgagaattgtacaccggaaattttgacgccttacctggatggaattgtgaacaaattacttgttcttcttcagaatggaaagcaaatggtgcaggagggagcattgacagctttagcgtcagtagcagattcatcacaggatcacttcaagaaatactatgatgctgtcatgccatacctaaaatctatcttgatgcatgcaactgataagtccaataggatgctccgtgccaagtccatggagtgtataagtttggtaggaatggctgtgggtaaggacaagttcagagacgacgcaaggcaggttatggaagtacttatggctttgcaaggagctccaatggaaactgatgatccaattaccagctacatgttgcaggcttgggctaggctatgcaaatgtcttggacaggatttccttccttacatgagtgttgttatgcctccactgcttcagtctgctcaactcaagcctgatgttacagttacttcagctgaatcagatgacgatattgcatcagatgacgatagcattgaaacaattacacttggtgacaaaagaataggaattcgaactagtgtgctggaagagaaagcaacagcttgcaacatgctgtgctgttatgctgatgagcttaaggagggtttcttcccatggattgatcaggttgccccaacgttggttcctctgctgaagttttacttccatgaggaagtcaggagagctgctgttgcggccatgccggaacttctacgctcagcaaaattggctgttgagaaagggcaggctcaaggacgtgatgagtcttatgtcaaacagttgtctgactacataattgcagcacttgttgaagcactgcacaaggagccagaaacagaaatgtgctcatccatgctggattctttaaacgagtgtatgcagctttcgggtcttttgcttgatgaagcccaagtacgagctatcatagatgagattaaaaacgtcattatagccagtgccacccggaaaagagaacgctcggagagaacaaaagcggaagattttgatgctgatgaaggagagctactcaaagaagagaatgaacaggaggaggaagtatttgatcaggtcagtgagtgcctagggactttgattaaaaccttcaaaggttctttcttgccgttttttgaagagctctctatgtacattacaccaatgttgggaaaagataaaacacctgaagagagaaggatagctatctgtatttttgatgatgttgcagagcaatgccgtgaatcagctctgaagtattatgacacataccttcctttccttttggaggcatcaaacgatgaaaattcagatgttcggcaggctgctgtctatggtgtgggtgtatgtgccgagtttggtggtcatgtttttcgccctctagtaggagaggccttatcaaaattaaacaatgttataaggcatcctgatgcacgacttcctgataatatcatggcatatgacaatgctgtttcggcgcttggaaaaatatgccaatttcatcgggatggtattgatgcagctcaggttgttccagcctggcttagctgcttgcctataaaagacgacaaggttgaagctaaagttgtacatggacagctttgctccatggtggagaggtcggatgctgaaattcttgggcctcacagtcagtatcttcctaaaattgtttcaatttttgcagaggttttgtgcaatggaacagaacttgccactgatgaaactagaaacaggatggtgaatgtcttgaggcgtttccagcagactttgcctcctgattttcttgcatcgacgttttccaacttgcaaccgcagcaacagctactgctacagtccatcttgtcgacatagttgttttttctgtcgctgcaagaggtgcaagggaaacggtgggatttattgtcggatgggttggacatttgcagttttttggtaatgagatcactataagtggagttactttctgcttctctttgaagccattttaattctgttgaaaattattaaaatgtgctctgttggaagatgcagaagctcctccgggttcatactggtaattggtgaaataaaaagcagtcttatctttctgaatgaaccttgggttcgtgtgtatttaagctggatcgttaatttattctgagataaaaccgtagcaattcgctaatgtgttcggagatcaaaccgttgcaaatttccatctggcgatat

SEQ ID NO: 221029 - DNA, 4111 bp, Zea Mays
ccctcccccacgtccgcctgctcgcgctcgagctcgagccgcatctcccaaaccctacccatataaaatattaagcccaacgcccgagtctctctctctctcaacttcccttcccaccaccctcaccctccccttcccgccgccaccaccagttcaaccctctctccctcaaaccctagccgccgccgcgctcgttccggattcggttccgatccgatggcgtccgccgaggaccaggccgcggccgccgcgctgctggggggtgacccggcggcgttcgacgcgctgctctcgacgctcatgtcgtcctccaacgccgaccgttccgccgccgaggccgccttccaccgcctccgggcctcgcacccggagcccctcgcgctgcggctcgccacctcgctggcggcgcccaccacccccgccgacctgcgcgccatggcgggggtcctcctccgcaaggtcctctccccggccccgtcttccgacgcgtcctccaacaacgccacgcccccggcgccgctctggccgcagctctcccccgcggggcaggccgcgctcaaggcgcacctcctctccgcgctccagtccgatcctcccaagcccatcgccaagaaggtctgcgacgctatctctgagctcgcggcctcgctgctgcctgagaacgcctggcccgagctgctgccgttcctcttccgcgccgcgtcggggcctgatgcgcacaaccttcaggagtcagcgctgctcatcttcgcgaggctggcggattacatcgcagaatctctcctcgaccatctcatgactatccacaacctcctcgcctcagccctggcgcatcccacgtctcctgatgttcggattgcggccctgggtgccgcagtcaaccttgttcagtgcctgccaaccaactccgacagggataagatgcaggatttgctcccagcaatgatgagggcgctcactgattgcctaaactctggccaggaagtctctgcgcaggaggcactggagctgctggtggagctcgctggcgccgagccaaggttcctgaggaggcagattgctgatgtggtaggggcaatgttgcaagttgctgaggctacacagctggaagatgggaccagacacttggcggtggagtttgtgattactctagctgaggctagagagcgtgcaccaggaatgatgcggcgactcccgcagtttgttggtaggctgtttgcagtgctgatgcagatgctgcttgatgtcgaggatgaccctgcttggcactctgctgaaactgaagatgaggacgcaggggaagggaacaactatggagtggcgcaggagtgccttgaccgcctttccatcgccattggtgggaacgcaattgtaccaattgcttctgagctgctaccacagtacctgtcttctgctgagtggcagaagcaccatgctgcgctcattacacttgcacagattgcggaaggatgtgcaaaggttatgcttaaaaatttggaacaagtcgtttcgatgatattgaatggatttcaacatccccacccacgtgtgagatgggctgctatcaatgccatcggtcagctttctacggatttgggcccagatcttcaagttcattaccaccagcaggtgctgcctgcattggccaatgctatggatgatttccagaatccacgagttcaggcacatgctgcttcagcgattttgaattttagtgagaattgtacaccggaaattttgacgccttacctggatggaattgtgaacaaattacttgttcttcttcagaatggaaagcaaatggtgcaggagggagcattgacagctttagcgtcagtagcagattcatcacaggatcacttcaagaaatactatgatgctgtcatgccatacctaaaatctatcttgatgcatgcaactgataagtccaataggatgctccgtgccaagtccatggagtgtataagtttggtaggaatggctgtgggtaaggacaagttcagagacgacgcaaggcaggttatggaagtacttatggctttgcaaggagctccaatggaaactgatgatccaattaccagctacatgttgcaggcttgggctaggctatgcaaatgtcttggacaggatttccttccttacatgagtgttgttatgcctccactgcttcagtctgctcaactcaagcctgatgttacagttacttcagctgaatcagatgacgatattgcatcagatgacgatagcattgaaacaattacacttggtgacaaaagaataggaattcgaactagtgtgctggaagagaaagcaacagcttgcaacatgctgtgctgttatgctgatgagcttaaggagggtttcttcccatggattgatcaggttgccccaacgttggttcctctgctgaagttttacttccatgaggaagtcaggagagctgctgttgcggccatgccggaacttctacgctcagcaaaattggctgttgagaaagggcaggctcaaggacgtgatgagtcttatgtcaaacagttgtctgactacataattgcagcacttgttgaagcactgcacaaggagccagaaacagaaatgtgctcatccatgctggattctttaaacgagtgtatgcagctttcgggtcttttgcttgatgaagcccaagtacgagctatcatagatgagattaaaaacgtcattatagccagtgccacccggaaaagagaacgctcggagagaacaaaagcggaagattttgatgctgatgaaggagagctactcaaagaagagaatgaacaggaggaggaagtatttgatcaggtcagtgagtgcctagggactttgattaaaaccttcaaaggttctttcttgccgttttttgaagagctctctatgtacattacaccaatgttgggaaaagataaaacacctgaagagagaaggatagctatctgtatttttgatgatgttgcagagcaatgccgtgaatcagctctgaagtattatgacacataccttcctttccttttggaggcatcaaacgatgaaaattcagatgttcggcaggctgctgtctatggtgtgggtgtatgtgccgagtttggtggtcatgtttttcgccctctagtaggagaggccttatcaaaattaaacaatgttataaggcatcctgatgcacgacttcctgataatatcatggcatatgacaatgctgtttcggcgcttggaaaaatatgccaatttcatcgggatggtattgatgcagctcaggttgttccagcctggcttagctgcttgcctataaaagacgacaaggttgaagctaaagttgtacatggacagctttgctccatggtggagagtcagtatcttcctaaaattgtttcaatttttgcagaggttttgtgcaatggaacagaacttgccactgatgaaactagaaacaggatggtgaatgtcttgaggcgtttccagcagactttgcctcctgattttcttgcatcgacgttttccaacttgcaaccgcagcaacagctactgctacagtccatcttgtcgacatagttgttttttctgtcgctgcaaggtgggggtttgttatttttcttgatgttttatcagccaattctttatgtcgtatctttttctggtggggtactttgtgaatgcattgtttgcttcaacgaactggaggctgtcaccacacatggttttgatagagtgtatattgtctgtcttgtattcgaaatatggtttgagatgtgctgcaacagaggtgcaagggaaacggtgggatttattgtcggatgggttggacatttgcagttttttggtaatgagatcactataagtggagttactttctgcttctctttgaagccattttaattctgttgaaaattattaaaatgtgctctgttggaagatgcagaagctcctccgggttcatactggtaattggtgaaataaaaagcagtcttatctttctgaatgaaccttgggttcgtgtgtatttaagctggatcgttaatttattctgagataaaaccgtagcaattcgctaatgtgttcggagatcaaaccgttgcaaatttccatctggcgatat

SEQ ID NO: 221030 - DNA, 4131 bp, Zea Mays
ccctcccccacgtccgcctgctcgcgctcgagctcgagccgcatctcccaaaccctacccatataaaatattaagcccaacgcccgagtctctctctctctcaacttcccttcccaccaccctcaccctccccttcccgccgccaccaccagttcaaccctctctccctcaaaccctagccgccgccgcgctcgttccggattcggttccgatccgatggcgtccgccgaggaccaggccgcggccgccgcgctgctggggggtgacccggcggcgttcgacgcgctgctctcgacgctcatgtcgtcctccaacgccgaccgttccgccgccgaggccgccttccaccgcctccgggcctcgcacccggagcccctcgcgctgcggctcgccacctcgctggcggcgcccaccacccccgccgacctgcgcgccatggcgggggtcctcctccgcaaggtcctctccccggccccgtcttccgacgcgtcctccaacaacgccacgcccccggcgccgctctggccgcagctctcccccgcggggcaggccgcgctcaaggcgcacctcctctccgcgctccagtccgatcctcccaagcccatcgccaagaaggtctgcgacgctatctctgagctcgcggcctcgctgctgcctgagaacgcctggcccgagctgctgccgttcctcttccgcgccgcgtcggggcctgatgcgcacaaccttcaggagtcagcgctgctcatcttcgcgaggctggcggattacatcgcagaatctctcctcgaccatctcatgactatccacaacctcctcgcctcagccctggcgcatcccacgtctcctgatgttcggattgcggccctgggtgccgcagtcaaccttgttcagtgcctgccaaccaactccgacagggataagatgcaggatttgctcccagcaatgatgagggcgctcactgattgcctaaactctggccaggaagtctctgcgcaggaggcactggagctgctggtggagctcgctggcgccgagccaaggttcctgaggaggcagattgctgatgtggtaggggcaatgttgcaagttgctgaggctacacagctggaagatgggaccagacacttggcggtggagtttgtgattactctagctgaggctagagagcgtgcaccaggaatgatgcggcgactcccgcagtttgttggtaggctgtttgcagtgctgatgcagatgctgcttgatgtcgaggatgaccctgcttggcactctgctgaaactgaagatgaggacgcaggggaagggaacaactatggagtggcgcaggagtgccttgaccgcctttccatcgccattggtgggaacgcaattgtaccaattgcttctgagctgctaccacagtacctgtcttctgctgagtggcagaagcaccatgctgcgctcattacacttgcacagattgcggaaggatgtgcaaaggttatgcttaaaaatttggaacaagtcgtttcgatgatattgaatggatttcaacatccccacccacgtgtgagatgggctgctatcaatgccatcggtcagctttctacggatttgggcccagatcttcaagttcattaccaccagcaggtgctgcctgcattggccaatgctatggatgatttccagaatccacgagttcaggcacatgctgcttcagcgattttgaattttagtgagaattgtacaccggaaattttgacgccttacctggatggaattgtgaacaaattacttgttcttcttcagaatggaaagcaaatggtgcaggagggagcattgacagctttagcgtcagtagcagattcatcacaggatcacttcaagaaatactatgatgctgtcatgccatacctaaaatctatcttgatgcatgcaactgataagtccaataggatgctccgtgccaagtccatggagtgtataagtttggtaggaatggctgtgggtaaggacaagttcagagacgacgcaaggcaggttatggaagtacttatggctttgcaaggagctccaatggaaactgatgatccaattaccagctacatgttgcaggcttgggctaggctatgcaaatgtcttggacaggatttccttccttacatgagtgttgttatgcctccactgcttcagtctgctcaactcaagcctgatgttacagttacttcagctgaatcagatgacgatattgcatcagatgacgatagcattgaaacaattacacttggtgacaaaagaataggaattcgaactagtgtgctggaagagaaagcaacagcttgcaacatgctgtgctgttatgctgatgagcttaaggagggtttcttcccatggattgatcaggttgccccaacgttggttcctctgctgaagttttacttccatgaggaagtcaggagagctgctgttgcggccatgccggaacttctacgctcagcaaaattggctgttgagaaagggcaggctcaaggacgtgatgagtcttatgtcaaacagttgtctgactacataattgcagcacttgttgaagcactgcacaaggagccagaaacagaaatgtgctcatccatgctggattctttaaacgagtgtatgcagctttcgggtcttttgcttgatgaagcccaagtacgagctatcatagatgagattaaaaacgtcattatagccagtgccacccggaaaagagaacgctcggagagaacaaaagcggaagattttgatgctgatgaaggagagctactcaaagaagagaatgaacaggaggaggaagtatttgatcaggtcagtgagtgcctagggactttgattaaaaccttcaaaggttctttcttgccgttttttgaagagctctctatgtacattacaccaatgttgggaaaagataaaacacctgaagagagaaggatagctatctgtatttttgatgatgttgcagagcaatgccgtgaatcagctctgaagtattatgacacataccttcctttccttttggaggcatcaaacgatgaaaattcagatgttcggcaggctgctgtctatggtgtgggtgtatgtgccgagtttggtggtcatgtttttcgccctctagtaggagaggccttatcaaaattaaacaatgttataaggcatcctgatgcacgacttcctgataatatcatggcatatgacaatgctgtttcggcgcttggaaaaatatgccaatttcatcgggatggtattgatgcagctcagcctggcttagctgcttgcctataaaagacgacaaggttgaagctaaagttgtacatggacagctttgctccatggtggagaggtcggatgctgaaattcttgggcctcacagtcagtatcttcctaaaattgtttcaatttttgcagaggttttgtgcaatggaacagaacttgccactgatgaaactagaaacaggatggtgaatgtcttgaggcgtttccagcagactttgcctcctgattttcttgcatcgacgttttccaacttgcaaccgcagcaacagctactgctacagtccatcttgtcgacatagttgttttttctgtcgctgcaaggtgggggtttgttatttttcttgatgttttatcagccaattctttatgtcgtatctttttctggtggggtactttgtgaatgcattgtttgcttcaacgaactggaggctgtcaccacacatggttttgatagagtgtatattgtctgtcttgtattcgaaatatggtttgagatgtgctgcaacagaggtgcaagggaaacggtgggatttattgtcggatgggttggacatttgcagttttttggtaatgagatcactataagtggagttactttctgcttctctttgaagccattttaattctgttgaaaattattaaaatgtgctctgttggaagatgcagaagctcctccgggttcatactggtaattggtgaaataaaaagcagtcttatctttctgaatgaaccttgggttcgtgtgtatttaagctggatcgttaatttattctgagataaaaccgtagcaattcgctaatgtgttcggagatcaaaccgttgcaaatttccatctggcgatat

SEQ ID NO: 221031 - DNA, 3937 bp, Zea Mays
ccctcccccacgtccgcctgctcgcgctcgagctcgagccgcatctcccaaaccctacccatataaaatattaagcccaacgcccgagtctctctctctctcaacttcccttcccaccaccctcaccctccccttcccgccgccaccaccagttcaaccctctctccctcaaaccctagccgccgccgcgctcgttccggattcggttccgatccgatggcgtccgccgaggaccaggccgcggccgccgcgctgctggggggtgacccggcggcgttcgacgcgctgctctcgacgctcatgtcgtcctccaacgccgaccgttccgccgccgaggccgccttccaccgcctccgggcctcgcacccggagcccctcgcgctgcggctcgccacctcgctggcggcgcccaccacccccgccgacctgcgcgccatggcgggggtcctcctccgcaaggtcctctccccggccccgtcttccgacgcgtcctccaacaacgccacgcccccggcgccgctctggccgcagctctcccccgcggggcaggccgcgctcaaggcgcacctcctctccgcgctccagtccgatcctcccaagcccatcgccaagaaggtctgcgacgctatctctgagctcgcggcctcgctgctgcctgagaacgcctggcccgagctgctgccgttcctcttccgcgccgcgtcggggcctgatgcgcacaaccttcaggagtcagcgctgctcatcttcgcgaggctggcggattacatcgcagaatctctcctcgaccatctcatgactatccacaacctcctcgcctcagccctggcgcatcccacgtctcctgatgttcggattgcggccctgggtgccgcagtcaaccttgttcagtgcctgccaaccaactccgacagggataagatgcaggatttgctcccagcaatgatgagggcgctcactgattgcctaaactctggccaggaagtctctgcgcaggaggcactggagctgctggtggagctcgctggcgccgagccaaggttcctgaggaggcagattgctgatgtggtaggggcaatgttgcaagttgctgaggctacacagctggaagatgggaccagacacttggcggtggagtttgtgattactctagctgaggctagagagcgtgcaccaggaatgatgcggcgactcccgcagtttgttggtaggctgtttgcagtgctgatgcagatgctgcttgatgtcgaggatgaccctgcttggcactctgctgaaactgaagatgaggacgcaggggaagggaacaactatggagtggcgcaggagtgccttgaccgcctttccatcgccattggtgggaacgcaattgtaccaattgcttctgagctgctaccacagtacctgtcttctgctgagtggcagaagcaccatgctgcgctcattacacttgcacagattgcggaaggatgtgcaaaggttatgcttaaaaatttggaacaagtcgtttcgatgatattgaatggatttcaacatccccacccacgtgtgagatgggctgctatcaatgccatcggtcagctttctacggatttgggcccagatcttcaagttcattaccaccagcaggtgctgcctgcattggccaatgctatggatgatttccagaatccacgagttcaggcacatgctgcttcagcgattttgaattttagtgagaattgtacaccggaaattttgacgccttacctggatggaattgtgaacaaattacttgttcttcttcagaatggaaagcaaatggtgcaggagggagcattgacagctttagcgtcagtagcagattcatcacaggatcacttcaagaaatactatgatgctgtcatgccatacctaaaatctatcttgatgcatgcaactgataagtccaataggatgctccgtgccaagtccatggagtgtataagtttggtaggaatggctgtgggtaaggacaagttcagagacgacgcaaggcaggttatggaagtacttatggctttgcaaggagctccaatggaaactgatgatccaattaccagctacatgttgcaggcttgggctaggctatgcaaatgtcttggacaggatttccttccttacatgagtgttgttatgcctccactgcttcagtctgctcaactcaagcctgatgttacagttacttcagctgaatcagatgacgatattgcatcagatgacgatagcattgaaacaattacacttggtgacaaaagaataggaattcgaactagtgtgctggaagagaaagcaacagcttgcaacatgctgtgctgttatgctgatgagcttaaggagggtttcttcccatggattgatcaggttgccccaacgttggttcctctgctgaagttttacttccatgaggaagtcaggagagctgctgttgcggccatgccggaacttctacgctcagcaaaattggctgttgagaaagggcaggctcaaggacgtgatgagtcttatgtcaaacagttgtctgactacataattgcagcacttgttgaagcactgcacaaggagccagaaacagaaatgtgctcatccatgctggattctttaaacgagtgtatgcagctttcgggtcttttgcttgatgaagcccaagtacgagctatcatagatgagattaaaaacgtcattatagccagtgccacccggaaaagagaacgctcggagagaacaaaagcggaagattttgatgctgatgaaggagagctactcaaagaagagaatgaacaggaggaggaagtatttgatcaggtcagtgagtgcctagggactttgattaaaaccttcaaaggttctttcttgccgttttttgaagagctctctatgtacattacaccaatgttgggaaaagataaaacacctgaagagagaaggatagctatctgtatttttgatgatgttgcagagcaatgccgtgaatcagctctgaagtattatgacacataccttcctttccttttggaggcatcaaacgatgaaaattcagatgttcggcaggttgttccagcctggcttagctgcttgcctataaaagacgacaaggttgaagctaaagttgtacatggacagctttgctccatggtggagaggtcggatgctgaaattcttgggcctcacagtcagtatcttcctaaaattgtttcaatttttgcagaggttttgtgcaatggaacagaacttgccactgatgaaactagaaacaggatggtgaatgtcttgaggcgtttccagcagactttgcctcctgattttcttgcatcgacgttttccaacttgcaaccgcagcaacagctactgctacagtccatcttgtcgacatagttgttttttctgtcgctgcaaggtgggggtttgttatttttcttgatgttttatcagccaattctttatgtcgtatctttttctggtggggtactttgtgaatgcattgtttgcttcaacgaactggaggctgtcaccacacatggttttgatagagtgtatattgtctgtcttgtattcgaaatatggtttgagatgtgctgcaacagaggtgcaagggaaacggtgggatttattgtcggatgggttggacatttgcagttttttggtaatgagatcactataagtggagttactttctgcttctctttgaagccattttaattctgttgaaaattattaaaatgtgctctgttggaagatgcagaagctcctccgggttcatactggtaattggtgaaataaaaagcagtcttatctttctgaatgaaccttgggttcgtgtgtatttaagctggatcgttaatttattctgagataaaaccgtagcaattcgctaatgtgttcggagatcaaaccgttgcaaatttccatctggcgatat

SEQ ID NO: 221032 - DNA, 4137 bp, Zea Mays
ccctcccccacgtccgcctgctcgcgctcgagctcgagccgcatctcccaaaccctacccatataaaatattaagcccaacgcccgagtctctctctctctcaacttcccttcccaccaccctcaccctccccttcccgccgccaccaccagttcaaccctctctccctcaaaccctagccgccgccgcgctcgttccggattcggttccgatccgatggcgtccgccgaggaccaggccgcggccgccgcgctgctggggggtgacccggcggcgttcgacgcgctgctctcgacgctcatgtcgtcctccaacgccgaccgttccgccgccgaggccgccttccaccgcctccgggcctcgcacccggagcccctcgcgctgcggctcgccacctcgctggcggcgcccaccacccccgccgacctgcgcgccatggcgggggtcctcctccgcaaggtcctctccccggccccgtcttccgacgcgtcctccaacaacgccacgcccccggcgccgctctggccgcagctctcccccgcggggcaggccgcgctcaaggcgcacctcctctccgcgctccagtccgatcctcccaagcccatcgccaagaaggtctgcgacgctatctctgagctcgcggcctcgctgctgcctgagaacgcctggcccgagctgctgccgttcctcttccgcgccgcgtcggggcctgatgcgcacaaccttcaggagtcagcgctgctcatcttcgcgaggctggcggattacatcgcagaatctctcctcgaccatctcatgactatccacaacctcctcgcctcagccctggcgcatcccacgtctcctgatgttcggattgcggccctgggtgccgcagtcaaccttgttcagtgcctgccaaccaactccgacagggataagatgcaggatttgctcccagcaatgatgagggcgctcactgattgcctaaactctggccaggaagtctctgcgcaggaggcactggagctgctggtggagctcgctggcgccgagccaaggttcctgaggaggcagattgctgatgtggtaggggcaatgttgcaagttgctgaggctacacagctggaagatgggaccagacacttggcggtggagtttgtgattactctagctgaggctagagagcgtgcaccaggaatgatgcggcgactcccgcagtttgttggtaggctgtttgcagtgctgatgcagatgctgcttgatgtcgaggatgaccctgcttggcactctgctgaaactgaagatgaggacgcaggggaagggaacaactatggagtggcgcaggagtgccttgaccgcctttccatcgccattggtgggaacgcaattgtaccaattgcttctgagctgctaccacagtacctgtcttctgctgagtggcagaagcaccatgctgcgctcattacacttgcacagattgcggaaggatgtgcaaaggttatgcttaaaaatttggaacaagtcgtttcgatgatattgaatggatttcaacatccccacccacgtgtgagatgggctgctatcaatgccatcggtcagctttctacggatttgggcccagatcttcaagttcattaccaccagcaggtgctgcctgcattggccaatgctatggatgatttccagaatccacgagttcaggcacatgctgcttcagcgattttgaattttagtgagaattgtacaccggaaattttgacgccttacctggatggaattgtgaacaaattacttgttcttcttcagaatggaaagcaaatggtgcaggagggagcattgacagctttagcgtcagtagcagattcatcacaggatcacttcaagaaatactatgatgctgtcatgccatacctaaaatctatcttgatgcatgcaactgataagtccaataggatgctccgtgccaagtccatggagtgtataagtttggtaggaatggctgtgggtaaggacaagttcagagacgacgcaaggttatggaagtacttatggctttgcaaggagctccaatggaaactgatgatccaattaccagctacatgttgcaggcttgggctaggctatgcaaatgtcttggacaggatttccttccttacatgagtgttgttatgcctccactgcttcagtctgctcaactcaagcctgatgttacagttacttcagctgaatcagatgacgatattgcatcagatgacgatagcattgaaacaattacacttggtgacaaaagaataggaattcgaactagtgtgctggaagagaaagcaacagcttgcaacatgctgtgctgttatgctgatgagcttaaggagggtttcttcccatggattgatcaggttgccccaacgttggttcctctgctgaagttttacttccatgaggaagtcaggagagctgctgttgcggccatgccggaacttctacgctcagcaaaattggctgttgagaaagggcaggctcaaggacgtgatgagtcttatgtcaaacagttgtctgactacataattgcagcacttgttgaagcactgcacaaggagccagaaacagaaatgtgctcatccatgctggattctttaaacgagtgtatgcagctttcgggtcttttgcttgatgaagcccaagtacgagctatcatagatgagattaaaaacgtcattatagccagtgccacccggaaaagagaacgctcggagagaacaaaagcggaagattttgatgctgatgaaggagagctactcaaagaagagaatgaacaggaggaggaagtatttgatcaggtcagtgagtgcctagggactttgattaaaaccttcaaaggttctttcttgccgttttttgaagagctctctatgtacattacaccaatgttgggaaaagataaaacacctgaagagagaaggatagctatctgtatttttgatgatgttgcagagcaatgccgtgaatcagctctgaagtattatgacacataccttcctttccttttggaggcatcaaacgatgaaaattcagatgttcggcaggctgctgtctatggtgtgggtgtatgtgccgagtttggtggtcatgtttttcgccctctagtaggagaggccttatcaaaattaaacaatgttataaggcatcctgatgcacgacttcctgataatatcatggcatatgacaatgctgtttcggcgcttggaaaaatatgccaatttcatcgggatggtattgatgcagctcaggttgttccagcctggcttagctgcttgcctataaaagacgacaaggttgaagctaaagttgtacatggacagctttgctccatggtggagaggtcggatgctgaaattcttgggcctcacagtcagtatcttcctaaaattgtttcaatttttgcagaggttttgtgcaatggaacagaacttgccactgatgaaactagaaacaggatggtgaatgtcttgaggcgtttccagcagactttgcctcctgattttcttgcatcgacgttttccaacttgcaaccgcagcaacagctactgctacagtccatcttgtcgacatagttgttttttctgtcgctgcaaggtgggggtttgttatttttcttgatgttttatcagccaattctttatgtcgtatctttttctggtggggtactttgtgaatgcattgtttgcttcaacgaactggaggctgtcaccacacatggttttgatagagtgtatattgtctgtcttgtattcgaaatatggtttgagatgtgctgcaacagaggtgcaagggaaacggtgggatttattgtcggatgggttggacatttgcagttttttggtaatgagatcactataagtggagttactttctgcttctctttgaagccattttaattctgttgaaaattattaaaatgtgctctgttggaagatgcagaagctcctccgggttcatactggtaattggtgaaataaaaagcagtcttatctttctgaatgaaccttgggttcgtgtgtatttaagctggatcgttaatttattctgagataaaaccgtagcaattcgctaatgtgttcggagatcaaaccgttgcaaatttccatctggcgatat

SEQ ID NO: 221033 - DNA, 4059 bp, Zea Mays
ccctcccccacgtccgcctgctcgcgctcgagctcgagccgcatctcccaaaccctacccatataaaatattaagcccaacgcccgagtctctctctctctcaacttcccttcccaccaccctcaccctccccttcccgccgccaccaccagttcaaccctctctccctcaaaccctagccgccgccgcgctcgttccggattcggttccgatccgatggcgtccgccgaggaccaggccgcggccgccgcgctgctggggggtgacccggcggcgttcgacgcgctgctctcgacgctcatgtcgtcctccaacgccgaccgttccgccgccgaggccgccttccaccgcctccgggcctcgcacccggagcccctcgcgctgcggctcgccacctcgctggcggcgcccaccacccccgccgacctgcgcgccatggcgggggtcctcctccgcaaggtcctctccccggccccgtcttccgacgcgtcctccaacaacgccacgcccccggcgccgctctggccgcagctctcccccgcggggcaggccgcgctcaaggcgcacctcctctccgcgctccagtccgatcctcccaagcccatcgccaagaaggtctgcgacgctatctctgagctcgcggcctcgctgctgcctgagaacgcctggcccgagctgctgccgttcctcttccgcgccgcgtcggggcctgatgcgcacaaccttcaggagtcagcgctgctcatcttcgcgaggctggcggattacatcgcagaatctctcctcgaccatctcatgactatccacaacctcctcgcctcagccctggcgcatcccacgtctcctgatgttcggattgcggccctgggtgccgcagtcaaccttgttcagtgcctgccaaccaactccgacagggataagatgcaggatttgctcccagcaatgatgagggcgctcactgattgcctaaactctggccaggaagtctctgcgcaggaggcactggagctgctggtggagctcgctggcgccgagccaaggttcctgaggaggcagattgctgatgtggtaggggcaatgttgcaagttgctgaggctacacagctggaagatgggaccagacacttggcggtggagtttgtgattactctagctgaggctagagagcgtgcaccaggaatgatgcggcgactcccgcagtttgttggtaggctgtttgcagtgctgatgcagatgctgcttgatgtcgaggatgaccctgcttggcactctgctgaaactgaagatgaggacgcaggggaagggaacaactatggagtggcgcaggagtgccttgaccgcctttccatcgccattggtgggaacgcaattgtaccaattgcttctgagctgctaccacagtacctgtcttctgctgagtggcagaagcaccatgctgcgctcattacacttgcacagattgcggaaggatgtgcaaaggttatgcttaaaaatttggaacaagtcgtttcgatgatattgaatggatttcaacatccccacccacgtgtgagatgggctgctatcaatgccatcggtcagctttctacggatttgggcccagatcttcaagttcattaccaccagcaggtgctgcctgcattggccaatgctatggatgatttccagaatccacgagttcaggcacatgctgcttcagcgattttgaattttagtgagaattgtacaccggaaattttgacgccttacctggatggaattgtgaacaaattacttgttcttcttcagaatggaaagcaaatggtgcaggagggagcattgacagctttagcgtcagtagcagattcatcacaggatcacttcaagaaatactatgatgctgtcatgccatacctaaaatctatcttgatgcatgcaactgataagtccaataggatgctccgtgccaagtccatggagtgtataagtttggtaggaatggctgtgggtaaggacaagttcagagacgacgcaaggcaggttatggaagtacttatggctttgcaaggagctccaatggaaactgatgatccaattaccagctacatgttgcaggcttgggctaggctatgcaaatgtcttggacaggatttccttccttacatgagtgttgttatgcctccactgcttcagtctgctcaactcaagcctgatgttacagttacttcagctgaatcagatgacgatattgcatcagatgacgatagcattgaaacaattacacttggtgacaaaagaataggaattcgaactagtgtgctggaagagaaagcaacagcttgcaacatgctgtgctgttatgctgatgagcttaaggagggtttcttcccatggattgatcaggttgccccaacgttggttcctctgctgaagttttacttccatgaggaagtcaggagagctgctgttgcggccatgccggaacttctacgctcagcaaaattggctgttgagaaagggcaggctcaaggacgtgatgagtcttatgtcaaacagttgtctgactacataattgcagcacttgttgaagcactgcacaaggagccagaaacagaaatgtgctcatccatgctggattctttaaacgagttgccacccggaaaagagaacgctcggagagaacaaaagcggaagattttgatgctgatgaaggagagctactcaaagaagagaatgaacaggaggaggaagtatttgatcaggtcagtgagtgcctagggactttgattaaaaccttcaaaggttctttcttgccgttttttgaagagctctctatgtacattacaccaatgttgggaaaagataaaacacctgaagagagaaggatagctatctgtatttttgatgatgttgcagagcaatgccgtgaatcagctctgaagtattatgacacataccttcctttccttttggaggcatcaaacgatgaaaattcagatgttcggcaggctgctgtctatggtgtgggtgtatgtgccgagtttggtggtcatgtttttcgccctctagtaggagaggccttatcaaaattaaacaatgttataaggcatcctgatgcacgacttcctgataatatcatggcatatgacaatgctgtttcggcgcttggaaaaatatgccaatttcatcgggatggtattgatgcagctcaggttgttccagcctggcttagctgcttgcctataaaagacgacaaggttgaagctaaagttgtacatggacagctttgctccatggtggagaggtcggatgctgaaattcttgggcctcacagtcagtatcttcctaaaattgtttcaatttttgcagaggttttgtgcaatggaacagaacttgccactgatgaaactagaaacaggatggtgaatgtcttgaggcgtttccagcagactttgcctcctgattttcttgcatcgacgttttccaacttgcaaccgcagcaacagctactgctacagtccatcttgtcgacatagttgttttttctgtcgctgcaaggtgggggtttgttatttttcttgatgttttatcagccaattctttatgtcgtatctttttctggtggggtactttgtgaatgcattgtttgcttcaacgaactggaggctgtcaccacacatggttttgatagagtgtatattgtctgtcttgtattcgaaatatggtttgagatgtgctgcaacagaggtgcaagggaaacggtgggatttattgtcggatgggttggacatttgcagttttttggtaatgagatcactataagtggagttactttctgcttctctttgaagccattttaattctgttgaaaattattaaaatgtgctctgttggaagatgcagaagctcctccgggttcatactggtaattggtgaaataaaaagcagtcttatctttctgaatgaaccttgggttcgtgtgtatttaagctggatcgttaatttattctgagataaaaccgtagcaattcgctaatgtgttcggagatcaaaccgttgcaaatttccatctggcgatat

SEQ ID NO: 221034 - DNA, 2437 bp, Zea Mays
caccatcacccaccatcagccgccaaagatcacgaaagcgacgcgcacaccccaagaaagggcggctccccactccgcctcgccgcacccctttcggcctttcttcctcccccacctcttgctcgcgtcccagctcccaacaccagtacaccacgcgccggctgcgagcgatgcccgcgatcccaacggcccccgccccctgccccgtgcgcttcctcctcgcccgccgccacagcctccacatctcctacccgtcgccttgctctaaccaccagcggctcccgccccgcctcctgcgcctgcccgctcgcccccgggccgctcccatgtcggccgaggcgcgggcacccgcgtctccggtggcgccgccggcgcaccccacttacgacctcagggccgtcatcgcgctcgccctcgcagaggacgccggcgaccgaggggatgtatcctgtttagccaccataccttctgatgtcgaagccgaagccacatttattgctaaagcagatggtgtcattgctggaataagcctagcagatatgatatttaaccaggttgatccatctttgaaggtcgaatggtttgaaagtgatggcaattttgtccacaaaggactgcagtttggaagagtatatgggtgtgcccgcagcatcatcgttgctgaaagggttgtgctaaatttcatgcagcggatgagtggcattgcgaccctaacaaaggttatttctgcccttatttacatgattaagctgctcctttgatgaaaaactgtaatgtttctccttgtttatcctagactcctagagcctttttctatcctgcagtttgaaagtcactatgtgttcctcgttttttttcttgctatgttcagcaaaagcatattattcaattcccatctatttggatacttccaggcttccagccataaagggttttttttgttgttgtctcggaacatacacctgatattgtttcttttttattgccacactagctgtcaaatgctagttcttcagattttatatttcacaatcctcctatccttttagattacatcattgtcatttgagatgtcagtaaagcttcgagccattggcaattttgccattatcatttgtgggcttcgccagtatgccatcggacccacaaatcatagacacagacggtcccaccagtcatagacacgggatggcataataacagacagccaaatttgagagtggcaaaacagcaaatttctcgtaaagcttctgttgttgttctgtccaggctatgtctgatgctgcccgtccagcatgcatattggaaacaaggaaaactgctccaggtttacgtctgattgacaagtgggcagtactgattggtggcggaaagaaccacaggcttggtttatttgatatggttatgataaaagataatcatatttctgttgccggtgggattgcaaatgcaatgagatctgttgatcaattcctgcagaaggaaaaactcacaattcctgtcgaggtcgagacaaggacaatcgaagaagtgaaagatttgttgaagtacgctgctgagaacaaaacttcattgacccgtataatgttggacaatatggttgttcctcttggaaatggagatttagacgtttcaatgcttaaagatgcagttcggttgataaacggtagatttgagactgaggcgtctggaaatgtgacagttgatacagtgaagaaaatcggagaaacgggagtcacctatatttcaagtggagcattaacgcactctgtgacggcgcttgacatctctctcaagatagacaccgagctggctcttcaggttggaagacgcacaaatcgtgcttgactcccacagcattacgttgtggacgcaacgcacgcaagtaaggtctgcctccttgtatagcttggcttctattccctccctccctctctaagccagcccttttgcttgtgtcggcaggcaggatgacagagggaccagcgtggcaaaccagcttaaatagcttaataataacttggcgctgaggcctctgactgcaactacgtgggattcattcttcagtttcatgcacaaacgaccgcaatattgatcggatcagaataattggcaggacatacaggttttgttctagcaccaagtttgggagcttgcgttctgcggcagataggcaggccaggtaggtgtacctcctcctgggcccagccacagctcgacagcaggtaccaggtaggtctactgtaaacgggggatgtcgcactgaactcgcaataccaaagacaaaataacaaaaggtggagataagatgcttatcttactgccattggtgataaaagcaacgtcaactcacatctattatttattgtatcgttccatcatcacttccagaatccatttgtatacagtgtatacgaccggtttgctcgctctttgg

SEQ ID NO: 221035 - DNA, 1800 bp, Zea Mays
caccatcacccaccatcagccgccaaagatcacgaaagcgacgcgcacaccccaagaaagggcggctccccactccgcctcgccgcacccctttcggcctttcttcctcccccacctcttgctcgcgtcccagctcccaacaccagtacaccacgcgccggctgcgagcgatgcccgcgatcccaacggcccccgccccctgccccgtgcgcttcctcctcgcccgccgccacagcctccacatctcctacccgtcgccttgctctaaccaccagcggctcccgccccgcctcctgcgcctgcccgctcgcccccgggccgctcccatgtcggccgaggcgcgggcacccgcgtctccggtggcgccgccggcgcaccccacttacgacctcagggccgtcatcgcgctcgccctcgcagaggacgccggcgaccgaggggatgtatcctgtttagccaccataccttctgatgtcgaagccgaagccacatttattgctaaagcagatggtgtcattgctggaataagcctagcagatatgatatttaaccaggttgatccatctttgaaggtcgaatggtttgaaagtgatggcaattttgtccacaaaggactgcagtttggaagagtatatgggtgtgcccgcagcatcatcgttgctgaaagggttgtgctaaatttcatgcagcggatgagtggcattgcgaccctaacaaaggctatgtctgatgctgcccgtccagcatgcatattggaaacaaggaaaactgctccaggtttacgtctgattgacaagtactgattggtggcggaaagaaccacaggcttggtttatttgatatggttatgataaaagataatcatatttctgttgccggtgggattgcaaatgcaatgagatctgttgatcaattcctgcagaaggaaaaactcacaattcctgtcgaggtcgagacaaggacaatcgaagaagtgaaagatttgttgaagtacgctgctgagaacaaaacttcattgacccgtataatgttggacaatatggttgttcctcttggaaatggagatttagacgtttcaatgcttaaagatgcagttcggttgataaacggtagatttgagactgaggcgtctggaaatgtgacagttgatacagtgaagaaaatcggagaaacgggagtcacctatatttcaagtggagcattaacgcactctgtgacggcgcttgacatctctctcaagatagacaccgagctggctcttcaggttggaagacgcacaaatcgtgcttgactcccacagcattacgttgtggacgcaacgcacgcaagcaggatgacagagggaccagcgtggcaaaccagcttaaatagcttaataataacttggcgctgaggcctctgactgcaactacgtgggattcattcttcagtttcatgcacaaacgaccgcaatattgatcggatcagaataattggcaggacatacaggttttgttctagcaccaagtttgggagcttgcgttctgcggcagataggcaggccaggtaggtgtacctcctcctgggcccagccacagctcgacagcaggtaccaggtaggtctactgtaaacgggggatgtcgcactgaactcgcaataccaaagacaaaataacaaaaggtggagataagatgcttatcttactgccattggtgataaaagcaacgtcaactcacatctattatttattgtatcgttccatcatcacttccagaatccatttgtatacagtgtatacgaccggtttgctcgctctttgg

SEQ ID NO: 221036 - DNA, 1405 bp, Zea Mays
gtcactttaggctacaagtggttgcaagtagtaaaagaaagggatgtatcctgtttagccaccataccttctgatgtcgaagccgaagccacatttattgctaaagcagatggtgtcattgctggaataagcctagcagatatgatatttaaccaggttgatccatctttgaaggtcgaatggtttgaaagtgatggcaattttgtccacaaaggactgcagtttggaagagtatatgggtgtgcccgcagcatcatcgttgctgaaagggttgtgctaaatttcatgcagcggatgagtggcattgcgaccctaacaaaggctatgtctgatgctgcccgtccagcatgcatattggaaacaaggaaaactgctccaggtttacgtctgattgacaagtgggcagtactgattggtggcggaaagaaccacaggcttggtttatttgatatggttatgataaaagataatcatatttctgttgccggtgggattgcaaatgcaatgagatctgttgatcaattcctgcagaaggaaaaactcacaattcctgtcgaggtcgagacaaggacaatcgaagaagtgaaagatttgttgaagtacgctgctgagaacaaaacttcattgacccgtataatgttggacaatatggttgttcctcttggaaatggagatttagacgtttcaatgcttaaagatgcagttcggttgataaacggtagatttgagactgaggcgtctggaaatgtgacagttgatacagtgaagaaaatcggagaaacgggagtcacctatatttcaagtggagcattaacgcactctgtgacggcgcttgacatctctctcaagatagacaccgagctggctcttcaggttggaagacgcacaaatcgtgcttgactcccacagcattacgttgtggacgcaacgcacgcaagatgacagagggaccagcgtggcaaaccagcttaaatagcttaataataacttggcgctgaggcctctgactgcaactacgtgggattcattcttcagtttcatgcacaaacgaccgcaatattgatcggatcagaataattggcaggacatacaggttttgttctagcaccaagtttgggagcttgcgttctgcggcagataggcaggccaggtaggtgtacctcctcctgggcccagccacagctcgacagcaggtaccaggtaggtctactgtaaacgggggatgtcgcactgaactcgcaataccaaagacaaaataacaaaaggtggagataagatgcttatcttactgccattggtgataaaagcaacgtcaactcacatctattatttattgtatcgttccatcatcacttccagaatccatttgtatacagtgtatacgaccggtttgctcgctctttgg

SEQ ID NO: 221037 - DNA, 1612 bp, Zea Mays
caccaaccctctctcctcatgaaatcgagccagcaccagccacgccaacagcctgccacccgtgtcatccctgcatgcgcgaagcaggtgagactggacaggagcagccagccccatgacgccctcttaagacgaggacgaggaggaggcggtggaccagttcgttcgcgttgcccgcgactctctccgtcctcctactgcccacccgactcacacgcttggcacgcgcgtgcttccacccgtccgtcgcctctctctcggctgcctgattgatttggttgccccggttccagcaatggcggtccaggcgcattatcaccaccactaccaccgcgagtcccctttcctcgtcagccggttggcggcggcgatggagctgcatcatcaggcgcagaaggaggctatggcgccgcagcaggctcaggctccgcccctcttcttggacttctcgcatggagattacggcggcgggaggaagcggcagcgcgaggcggagcccatgtcgtcgcagttcttctctctgcagcagcaaccgcaggcgcaggggcccaaggtgatcaacctggcgcaacttcagaagcggacggcgatgggcctccggctcgacttcgacgagggctcggagcacgtgtcgtgcacgtccccggcctcggcctcggcctcatgtctcctctctaaagagctcgccgcgcagcgcgatcagcacaggaacgagatggaccggctgatccaggaacatgcggacaggctccggcgcgcgctggccgacactcggcggcggcactaccgttcgctggtcggcgcggcggaggcggcggctgctcaacgggtaagggagaaggaggcggaggcgtcggaggccgcgcggcgccgcgcggacctggaggaccgggtggcgcggctgagggcggaggcggcggcgtggcaggccaaggacgcagcggatcagtccacagccgcggcgctccacgcgcagctgcagaaggcggcggcggcgcaggcgaggggcaaggccgaggaggaggacaacgtgggcgccgcggcggacgacgccgggtcctgcttcgtcgacccggacagggtcgtggaggtcgccccgccgcgcccgctggccaggccgtgccggacgtgcgggcagcgttcggcctccgtcgtgctgctcccgtgccgccacctctgcgtctgcgccgagtgcgagcccgccgtccccgctgccggcgccgtcgcggctgcctgccccatgtgccgtggcgcggtgaccggcaccgtgcaagtgttcttctcctagcaagctttaggaaaggggaaaatgctaaaagaaaaagcaagacaaaatcgttgctcctgccaaaaggaatgatccgtgaaaatggggaattgttcatgatagtccgttctctgcttcttttttttttctctccctctctcagttgtttattataatccttctattagtatataagtcgatctcttctagtactgctaggaataggattaggttcctgctttattttcccttggtttcttctggaaggcatatgatcgaccatggaccccagtacgtacattttggaaggcaatgaatgattgtgcaaaattttcacttttttac

SEQ ID NO: 221038 - DNA, 847 bp, Zea Mays
cccgctaaacctattcgacccgtcaacgaacagatccaccctcaccagccgcctgacgttcgagccgcaccagccctaaacccttccacctccagccgccataactgtaatccctttcaccatcagctgcccctccgttcgagccgtcgacgccctaatcctatcaccttctggccgcccaaatccctttcggctcctgccgccctctttttgaggcgcatgccatggagtcgttggtcttcgagtgccaggccatggcggcacagaccatggagtcacaggctatgatggcgcaggtcttagtctttaggccatggagtcgcaatcaggcgttcaagatgctctgagacttgagtcagcaacatacaatgagaggtctattaggtcacatctccgacgtgtgaaggggctactatctctgtctagtctttatgtttccctatcaacgtccttagctctgcttcaggagtccgctcaaggaaaatttgcaggacttatatatgtgttctctgttcactgatgcggctggagcgtcatgtcaactgctcaccctccccctaacaaattaaactagactgatgagtggagcttcatgttgggatgatccatgcaccttttaagttttggaacgtcgtactcaaatgtagcttgtgttagttgaacctatcgtactttcttttggaattaaattatatgatatttaaacatgtttgatgtttaatacttgtgttggatgctttatgcttcaaatatatatgcattatacaaaaagttgtgtacacttatgttgtttgatgaaattgtatgcacgatttggattgaattcaattgaatgctgattttcatt

SEQ ID NO: 221039 - DNA, 2548 bp, Zea Mays
cccgctaaacctattcgacccgtcaacgaacagatccaccctcaccagccgcctgacgttcgagccgcaccagccctaaacccttccacctccagccgccataactgtaatccctttcaccatcagctgcccctccgttcgagccgtcgacgccctaatcctatcaccttctggccgcccaaatccctttcggctcctgccgccctctttttgaggcgcatgccatggagtcgttggtcttcgagtgccaggccatggcggcacagaccatggagtcacaggctatgatggcgcaggtcttagtctttaggccatggagtcgcaatcaggcgttcaagatgctctgagacttgagtcagtgcctcgttgcagctgtccatctgtgtacttgattgtgatgataaattgaagccagtaattggaacgtcatttggttctctagaggaagtggaagaattgtacaagatatatgctcttgagaattttattggctgcaacattccagaacatatcgaaatccatccaccatccgatgttcactcccagtaaaaacatcaagaaatccaaagaactatttaaatcgtgtaaagggaaaaatagtaaagtgagacgaaggtagtcaaacagtcatattgctaaagtattacaggtaggagaaagaatccaacagcatgttgaggagcttctacagtgttattggcatgggaattttgttagcttctatagtgctattggtatgtcgagtagcttcaaccaggtatggactttttaactctagcgagagtttttagttgtcacacactaatggctgaattggggaaagtagtaactgaaaatgagagtaaccagcatcaacaatagtttgctttcaaaattcagaaggatagttccttgttttgtacaacattttttaagtataagagttttaaaatagaacatagcagcatgaaaggcttattttttccagaacatagtttaatagacttaataagtttaaacgacccataattctggtgctttattctatcttttatctgttgggtcattaaaatctatagactttagcgtcctatcttgtcatgtattagtgacgtatggaatcatttggagtcaatgggaagattaatagccaaaaatgttagaagatcatgcttgtttagacctctatgttgtacggaccagcaggtttgaaatgatgttgtcactgttccttgttctcaactgttgtattaagcaagtactaccatggggatgtggggtgggactagtccaaatgttgtagttactagttactagagttagcaagcagaggaattggtaatggtgatgcgttctcaacttcttatgtgtgcttgtcgttcgatcgtccatcagtttttagatgtacaaaacatatcaccgcattgacgtccatggctgcgagtacagtacagtggtcggccggttccaagtttacaaacagcaagcagtactagtgagtaggtgacattagcagtacaaacccttaaacctgcaactaagcacgacagagagtaggggcggagctcaggcccgttcatctcggttaggtggaagaaatggtcggcatatgtgtttctttcatgctttactgcatcctgcatttttattttgttgcactggcacgaccgcctggcactggcaccccctcgtactgatctgatgttgtaatagcaattagcatgcgttcagattagttaagatatggagctgagctcgctgccaacaaggtcaatactagcatccatttttttgcaaactaggacacaatcaggtgaaaagcttgagctgcattctttgtctatttaactttactagttctgtttgtttcatggtatgctgttatttacaagtaagcccaggagattcttttattgatgttaaacaattacttttggatgctcctgaaacatgcttctatgcatgatacaatttgatattgcatactaaagatgggttagctcatcagttagaagactacaaggaaatatctgaaatagcagatataacttctagtggatgttcactggagatggttgctacaacatacaatgagaggtctattaggtcacatctccgacgtgtgaaggggctactatctctgtctagtctttatgtttccctatcaacgtccttagctctgcttcaggagtccgctcaaggaaaatttgcaggacttatatatgtgttctctgttcactgatgcggctggagcgtcatgtcaactgctcaccctccccctaacaaattaaactagactgatgagtggagcttcatgttgggatgatccatgcaccttttaagttttggaacgtcgtactcaaatgtagcttgtgttagttgaacctatcgtactttcttttggaattaaattatatgatatttaaacatgtttgatgtttaatacttgtgttggatgctttatgcttcaaatatatatgcattatacaaaaagttgtgtacacttatgttgtttgatgaaattgtatgcacgatttggattgaattcaattgaatgctgattttcatt

SEQ ID NO: 221040 - DNA, 2609 bp, Zea Mays
cccgctaaacctattcgacccgtcaacgaacagatccaccctcaccagccgcctgacgttcgagccgcaccagccctaaacccttccacctccagccgccataactgtaatccctttcaccatcagctgcccctccgttcgagccgtcgacgccctaatcctatcaccttctggccgcccaaatccctttcggctcctgccgccctctttttgaggcgcatgccatggagtcgttggtcttcgagtgccaggccatggcggcacagaccatggagtcacaggctatgatggcgcaggtcttagtctttaggccatggagtcgcaatcaggcgttcaagatgctctgagacttgagtcaggttcgtccaacatgcatgatggattcagtacaccaaaaaaatgaatatccttctgacatcgtgcctcgttgcagctgtccatctgtgtacttgattgtgatgataaattgaagccagtaattggaacgtcatttggttctctagaggaagtggaagaattgtacaagatatatgctcttgagaattttattggctgcaacattccagaacatatcgaaatccatccaccatccgatgttcactcccagtaaaaacatcaagaaatccaaagaactatttaaatcgtgtaaagggaaaaatagtaaagtgagacgaaggtagtcaaacagtcatattgctaaagtattacaggtaggagaaagaatccaacagcatgttgaggagcttctacagtgttattggcatgggaattttgttagcttctatagtgctattggtatgtcgagtagcttcaaccaggtatggactttttaactctagcgagagtttttagttgtcacacactaatggctgaattggggaaagtagtaactgaaaatgagagtaaccagcatcaacaatagtttgctttcaaaattcagaaggatagttccttgttttgtacaacattttttaagtataagagttttaaaatagaacatagcagcatgaaaggcttattttttccagaacatagtttaatagacttaataagtttaaacgacccataattctggtgctttattctatcttttatctgttgggtcattaaaatctatagactttagcgtcctatcttgtcatgtattagtgacgtatggaatcatttggagtcaatgggaagattaatagccaaaaatgttagaagatcatgcttgtttagacctctatgttgtacggaccagcaggtttgaaatgatgttgtcactgttccttgttctcaactgttgtattaagcaagtactaccatggggatgtggggtgggactagtccaaatgttgtagttactagttactagagttagcaagcagaggaattggtaatggtgatgcgttctcaacttcttatgtgtgcttgtcgttcgatcgtccatcagtttttagatgtacaaaacatatcaccgcattgacgtccatggctgcgagtacagtacagtggtcggccggttccaagtttacaaacagcaagcagtactagtgagtaggtgacattagcagtacaaacccttaaacctgcaactaagcacgacagagagtaggggcggagctcaggcccgttcatctcggttaggtggaagaaatggtcggcatatgtgtttctttcatgctttactgcatcctgcatttttattttgttgcactggcacgaccgcctggcactggcaccccctcgtactgatctgatgttgtaatagcaattagcatgcgttcagattagttaagatatggagctgagctcgctgccaacaaggtcaatactagcatccatttttttgcaaactaggacacaatcaggtgaaaagcttgagctgcattctttgtctatttaactttactagttctgtttgtttcatggtatgctgttatttacaagtaagcccaggagattcttttattgatgttaaacaattacttttggatgctcctgaaacatgcttctatgcatgatacaatttgatattgcatactaaagatgggttagctcatcagttagaagactacaaggaaatatctgaaatagcagatataacttctagtggatgttcactggagatggttgctacaacatacaatgagaggtctattaggtcacatctccgacgtgtgaaggggctactatctctgtctagtctttatgtttccctatcaacgtccttagctctgcttcaggagtccgctcaaggaaaatttgcaggacttatatatgtgttctctgttcactgatgcggctggagcgtcatgtcaactgctcaccctccccctaacaaattaaactagactgatgagtggagcttcatgttgggatgatccatgcaccttttaagttttggaacgtcgtactcaaatgtagcttgtgttagttgaacctatcgtactttcttttggaattaaattatatgatatttaaacatgtttgatgtttaatacttgtgttggatgctttatgcttcaaatatatatgcattatacaaaaagttgtgtacacttatgttgtttgatgaaattgtatgcacgatttggattgaattcaattgaatgctgattttcatt

SEQ ID NO: 221041 - DNA, 2622 bp, Zea Mays
gaatattttacggaaaatagcttccaccaccctcgtccttctctgttttctttttatcataaaccccctccttcatcaccttgcctacccgctaaacctattcgacccgtcaacgaacagatccaccctcaccagccgcctgacgttcgagccgcaccagccctaaacccttccacctccagccgccataactgtaatccctttcaccatcagctgcccctccgttcgagccgtcgacgccctaatcctatcaccttctggccgcccaaatccctttcggctcctgccgccctctttttgaggcgcatgccatggagtcgttggtcttcgagtgccaggccatggcggcacagaccatggagtcacaggctatgatggcgcaggtcttagtctttaggccatggagtcgcaatcaggcgttcaagatgctctgagacttgagtcagctgtccatctgtgtacttgattgtgatgataaattgaagccagtaattggaacgtcatttggttctctagaggaagtggaagaattgtacaagatatatgctcttgagaattttattggctgcaacattccagaacatatcgaaatccatccaccatccgatgttcactcccagtaaaaacatcaagaaatccaaagaactatttaaatcgtgtaaagggaaaaatagtaaagtgagacgaaggtagtcaaacagtcatattgctaaagtattacaggtaggagaaagaatccaacagcatgttgaggagcttctacagtgttattggcatgggaattttgttagcttctatagtgctattggtatgtcgagtagcttcaaccaggtatggactttttaactctagcgagagtttttagttgtcacacactaatggctgaattggggaaagtagtaactgaaaatgagagtaaccagcatcaacaatagtttgctttcaaaattcagaaggatagttccttgttttgtacaacattttttaagtataagagttttaaaatagaacatagcagcatgaaaggcttattttttccagaacatagtttaatagacttaataagtttaaacgacccataattctggtgctttattctatcttttatctgttgggtcattaaaatctatagactttagcgtcctatcttgtcatgtattagtgacgtatggaatcatttggagtcaatgggaagattaatagccaaaaatgttagaagatcatgcttgtttagacctctatgttgtacggaccagcaggtttgaaatgatgttgtcactgttccttgttctcaactgttgtattaagcaagtactaccatggggatgtggggtgggactagtccaaatgttgtagttactagttactagagttagcaagcagaggaattggtaatggtgatgcgttctcaacttcttatgtgtgcttgtcgttcgatcgtccatcagtttttagatgtacaaaacatatcaccgcattgacgtccatggctgcgagtacagtacagtggtcggccggttccaagtttacaaacagcaagcagtactagtgagtaggtgacattagcagtacaaacccttaaacctgcaactaagcacgacagagagtaggggcggagctcaggcccgttcatctcggttaggtggaagaaatggtcggcatatgtgtttctttcatgctttactgcatcctgcatttttattttgttgcactggcacgaccgcctggcactggcaccccctcgtactgatctgatgttgtaatagcaattagcatgcgttcagattagttaagatatggagctgagctcgctgccaacaaggtcaatactagcatccatttttttgcaaactaggacacaatcaggtgaaaagcttgagctgcattctttgtctatttaactttactagttctgtttgtttcatggtatgctgttatttacaagtaagcccaggagattcttttattgatgttaaacaattacttttggatgctcctgaaacatgcttctatgcatgatacaatttgatattgcatactaaagatgggttagctcatcagttagaagactacaaggaaatatctgaaatagcagatataacttctagtggatgttcactggagatggttgctacaacatacaatgagaggtctattaggtcacatctccgacgtgtgaaggggctactatctctgtctagtctttatgtttccctatcaacgtccttagctctgcttcaggagtccgctcaaggaaaatttgcaggacttatatatgtgttctctgttcactgatgcggctggagcgtcatgtcaactgctcaccctccccctaacaaattaaactagactgatgagtggagcttcatgttgggatgatccatgcaccttttaagttttggaacgtcgtactcaaatgtagcttgtgttagttgaacctatcgtactttcttttggaattaaattatatgatatttaaacatgtttgatgtttaatacttgtgttggatgctttatgcttcaaatatatatgcattatacaaaaagttgtgtacacttatgttgtttgatgaaattgtatgcacgatttggattgaattcaattgaatgctgattttcatt

SEQ ID NO: 221042 - DNA, 2789 bp, Zea Mays
atcaatttccatccaccttttcataagccaacaaaagttagcatattatatagaaaacatatccactgcaatgaaggtttagtgcacatagtgcatatattaaatcctcataatccatattacatccatggtcttcccatgcatttctagtgtgcactgaatattttacggaaaatagcttccaccaccctcgtccttctctgttttctttttatcataaaccccctccttcatcaccttgcctacccgctaaacctattcgacccgtcaacgaacagatccaccctcaccagccgcctgacgttcgagccgcaccagccctaaacccttccacctccagccgccataactgtaatccctttcaccatcagctgcccctccgttcgagccgtcgacgccctaatcctatcaccttctggccgcccaaatccctttcggctcctgccgccctctttttgaggcgcatgccatggagtcgttggtcttcgagtgccaggccatggcggcacagaccatggagtcacaggctatgatggcgcaggtcttagtctttaggccatggagtcgcaatcaggcgttcaagatgctctgagacttgagtcagctgtccatctgtgtacttgattgtgatgataaattgaagccagtaattggaacgtcatttggttctctagaggaagtggaagaattgtacaagatatatgctcttgagaattttattggctgcaacattccagaacatatcgaaatccatccaccatccgatgttcactcccagtaaaaacatcaagaaatccaaagaactatttaaatcgtgtaaagggaaaaatagtaaagtgagacgaaggtagtcaaacagtcatattgctaaagtattacaggtaggagaaagaatccaacagcatgttgaggagcttctacagtgttattggcatgggaattttgttagcttctatagtgctattggtatgtcgagtagcttcaaccaggtatggactttttaactctagcgagagtttttagttgtcacacactaatggctgaattggggaaagtagtaactgaaaatgagagtaaccagcatcaacaatagtttgctttcaaaattcagaaggatagttccttgttttgtacaacattttttaagtataagagttttaaaatagaacatagcagcatgaaaggcttattttttccagaacatagtttaatagacttaataagtttaaacgacccataattctggtgctttattctatcttttatctgttgggtcattaaaatctatagactttagcgtcctatcttgtcatgtattagtgacgtatggaatcatttggagtcaatgggaagattaatagccaaaaatgttagaagatcatgcttgtttagacctctatgttgtacggaccagcaggtttgaaatgatgttgtcactgttccttgttctcaactgttgtattaagcaagtactaccatggggatgtggggtgggactagtccaaatgttgtagttactagttactagagttagcaagcagaggaattggtaatggtgatgcgttctcaacttcttatgtgtgcttgtcgttcgatcgtccatcagtttttagatgtacaaaacatatcaccgcattgacgtccatggctgcgagtacagtacagtggtcggccggttccaagtttacaaacagcaagcagtactagtgagtaggtgacattagcagtacaaacccttaaacctgcaactaagcacgacagagagtaggggcggagctcaggcccgttcatctcggttaggtggaagaaatggtcggcatatgtgtttctttcatgctttactgcatcctgcatttttattttgttgcactggcacgaccgcctggcactggcaccccctcgtactgatctgatgttgtaatagcaattagcatgcgttcagattagttaagatatggagctgagctcgctgccaacaaggtcaatactagcatccatttttttgcaaactaggacacaatcaggtgaaaagcttgagctgcattctttgtctatttaactttactagttctgtttgtttcatggtatgctgttatttacaagtaagcccaggagattcttttattgatgttaaacaattacttttggatgctcctgaaacatgcttctatgcatgatacaatttgatattgcatactaaagatgggttagctcatcagttagaagactacaaggaaatatctgaaatagcagatataacttctagtggatgttcactggagatggttgctacaacatacaatgagaggtctattaggtcacatctccgacgtgtgaaggggctactatctctgtctagtctttatgtttccctatcaacgtccttagctctgcttcaggagtccgctcaaggaaaatttgcaggtacatcaggacttatatatgtgttctctgttcactgatgcggctggagcgtcatgtcaactgctcaccctccccctaacaaattaaactagactgatgagtggagcttcatgttgggatgatccatgcaccttttaagttttggaacgtcgtactcaaatgtagcttgtgttagttgaacctatcgtactttcttttggaattaaattatatgatatttaaacatgtttgatgtttaatacttgtgttggatgctttatgcttcaaatatatatgcattatacaaaaagttgtgtacacttatgttgtttgatgaaattgtatgcacgatttggattgaattcaattgaatgctgattttcatt

SEQ ID NO: 221043 - DNA, 660 bp, Zea Mays
gtaaatcaataccactcggtccgcgacgctttcctctcccttcgcgatgccgacgatttcctcgcgttgcctcccttcgcgccgccgcctccctcgcgtcggccgtcgcctccccccacatcggccgtcacccctcaccgatgaagctcaaaggaagtgacttgtcaaattatcaatgaagaatgtcaggagcatttggtgaagagtgatcggcatatcaacttctggaagttgaattttgaagacgtttgaagtcctaagacatttctagaacatgaaaattatgaattcctaaggctagctttttttgactgactgtgttgttgactttgtgtgaaaataacccgttgtttgaaacctattatatttgctagctttatttgctattcagcaagacatataaagttgctagctttattggttgtctgtgttttcaactgtttgtgaaaataaccagtataaagttgttgtttagaacatgttatttgtgctagcgcaaagctgaaaataaaatcagtatttttgtgcgccataattttgaagttgttctttaaatcagtatttatttgctacggcagttcataattttgaagtaaaataactatttctgtgcggctgctaggcttatgtgtggctgctaggtttcattacctccaggac

SEQ ID NO: 221044 - DNA, 2021 bp, Zea Mays
ctcctttattcaattccccggtaaatcaataccactcggtccgcgacgctttcctctcccttcgcgatgccgacgatttcctcgcgttgcctcccttcgcgccgccgcctccctcgcgtcggccgtcgcctccccccacatcggccgtcacccctcaccgaacaatagagggtttcttcttaaggagtggtgagacagtgagcagaaacttcaatgcatgcctcctagcagtattgaagcttcaccaattgctccttaagaaaccagaacctatacctgagggctgcacagactttagatggaatcacttcaagagttgtttgggtgcattggatggcacacatgtaaaggtgactgtcccaactaagttgaaggggagatataggtcaagaaaaggagaaattgtgacaaatgtgttgggtgtttgtgcacctgacatgcagtttatatatgtcttacctggttgggagggttctgcacatgacgggcgtgtgcttcgagatgccatctcgaggccgaatggattacgtgtccctcaaggttgctattatcttgttgatgctggttacacaaatgcaaatggtttcttagcaccatatcgaggacagagagctaggaatattgttgagagggcatttggaaggctcaagggtcggtgggcaattttaagagacccatttgaaaatgatgaggagccagctatggatgcatcatttgaagttatggatggagaaatcagtgaaccagaatttatcacaggtgtctcaacatctaatgaatggactgatttccgcaataatcttgctcaggggatgtataatagatatagagctaggtctaataactaaggacatgaaccaattagagagctcaagtgttactcggggaagagggaaaaacaaaaggatctggacttattatgaggatgaggagttaattaaagcactatatgagatatctttagatccaaagtggaaaagtgagggaggttttaagaatgggtattgttctgttctagaaaatgaactcaaagcaaggctaccagggtgtggtctcagtgctattccacacattgagtctagagtgaggcattttaggaccaagtatggttctattgaggtcatgcttgctaagagtggttttaatcagatgacgatgcttttcgcgcttcctgagactcttaggagagaattcatcctgaacatgattgcagatgaagctcaaaggaagtgacttgtcaaattatcaatgaagaatgtcaggagcatttggtgaagagtgatcggcatatcaacttctggaagttgaattttgaagacgtttgaagtcctaagacatttctagaacatgaaaattatgaattcctaaggctagctttttttgactgactgtgttgttgactttgtgtgaaaataacccgttgtttgaaacctattatatttgctagctttatttgctattcagcaagacatataaagttgctagctttattggttgtctgtgttttcaactgtttgtgaaaataaccagtataaagttgttgtttagaacatgttatttgtgctagcgcaaagctgaaaataaaatcagtatttttgtgcgccataattttgaagttgttctttaaatcagtatttatttgctacggcagttcataattttgaagtaaaataactatttctgtgcggctgctaggcttatgtgtggctgctaggtttcattacctccaggaccatccaaacagcataaagggaatgctaaacgctaccagctttatccaaacaattggcgcttttcatttccatgtgtgactgcagatctacgaatcaattaggtgcattgtttttccaatagacatgatggcaacaggagaagatcagtgggactatgtatgttgttgtacaaatcgagactaccataatggataatggagtgaacacactaataataataatataacagctcaactattcagcggatggaactataccttgtctgtatacccggatctttcattcttt

SEQ ID NO: 221045 - DNA, 1520 bp, Zea Mays
atcaataccactcggtccgcgacgctttcctctcccttcgcgatgccgacgatttcctcgcgttgcctcccttcgcgccgccgcctccctcgcgtcggccgtcgcctccccccacatcggccgtcacccctcaccgtttatatatgtcttacctggttgggagggttctgcacatgacgggcgtgtgcttcgagatgccatctcgaggccgaatggattacgtgtccctcaaggttgctattatcttgttgatgctggttacacaaatgcaaatggtttcttagcaccatatcgaggacagaggtatcatctaggaggtttcactactcaaaacccaccacatagtgctgaggagtacttcaacttgtgccatgctagagctaggaatattgttgagagggcatttggaaggctcaagggtcggtgggcaattttaagagacccatttgaaaatgatgaggagccagctatggatgcatcatttgaagttatggatggagaaatcagtgaaccagaatttatcacaggtgtctcaacatctaatgaatggactgatttccgcaataatcttgctcaggggatgtataatagatatagagctaggtctaataactaaggacatgaaccaattagagagctcaagtgttactcggggaagagggaaaaacaaaaggatctggacttattatgaggatgaggagttaattaaagcactatatgagatatctttagatccaaagtggaaaagtgagggaggttttaagaatgggtattgttctgttctagaaaatgaactcaaagcaaggctaccagggtgtggtctcagtgctattccacacattgagtctagagtgaggcattttaggaccaagtatggttctattgaggtcatgcttgctaagagtggttttaatcagatgacgatgcttttcgcgcttcctgagactcttaggagagaattcatcctgaacatgattgcagacctatatcctttcttcagatgaagctcaaaggaagtgacttgtcaaattatcaatgaagaatgtcaggagcatttggtgaagagtgatcggcatatcaacttctggaagttgaattttgaagacgtttgaagtcctaagacatttctagaacatgaaaattatgaattcctaaggctagctttttttgactgactgtgttgttgactttgtgtgaaaataacccgttgtttgaaacctattatatttgctagctttatttgctattcagcaagacatataaagttgctagctttattggttgtctgtgttttcaactgtttgtgaaaataaccagtataaagttgttgtttagaacatgttatttgtgctagcgcaaagctgaaaataaaatcagtatttttgtgcgccataattttgaagttgttctttaaatcagtatttatttgctacggcagttcataattttgaagtaaaataactatttctgtgcggctgctaggcttatgtgtggctgctaggtttcattacctccaggac

SEQ ID NO: 221046 - DNA, 1423 bp, Zea Mays
atcaataccactcggtccgcgacgctttcctctcccttcgcgatgccgacgatttcctcgcgttgcctcccttcgcgccgccgcctccctcgcgtcggccgtcgcctccccccacatcggccgtcacccctcaccggttgctattatcttgttgatgctggttacacaaatgcaaatggtttcttagcaccatatcgaggacagaggtatcatctaggaggtttcactactcaaaacccaccacatagtgctgaggagtacttcaacttgtgccatgctagagctaggaatattgttgagagggcatttggaaggctcaagggtcggtgggcaattttaagagacccatttgaaaatgatgaggagccagctatggatgcatcatttgaagttatggatggagaaatcagtgaaccagaatttatcacaggtgtctcaacatctaatgaatggactgatttccgcaataatcttgctcaggggatgtataatagatatagagctaggtctaataactaaggacatgaaccaattagagagctcaagtgttactcggggaagagggaaaaacaaaaggatctggacttattatgaggatgaggagttaattaaagcactatatgagatatctttagatccaaagtggaaaagtgagggaggttttaagaatgggtattgttctgttctagaaaatgaactcaaagcaaggctaccagggtgtggtctcagtgctattccacacattgagtctagagtgaggcattttaggaccaagtatggttctattgaggtcatgcttgctaagagtggttttaatcagatgacgatgcttttcgcgcttcctgagactcttaggagagaattcatcctgaacatgattgcagacctatatcctttcttcagatgaagctcaaaggaagtgacttgtcaaattatcaatgaagaatgtcaggagcatttggtgaagagtgatcggcatatcaacttctggaagttgaattttgaagacgtttgaagtcctaagacatttctagaacatgaaaattatgaattcctaaggctagctttttttgactgactgtgttgttgactttgtgtgaaaataacccgttgtttgaaacctattatatttgctagctttatttgctattcagcaagacatataaagttgctagctttattggttgtctgtgttttcaactgtttgtgaaaataaccagtataaagttgttgtttagaacatgttatttgtgctagcgcaaagctgaaaataaaatcagtatttttgtgcgccataattttgaagttgttctttaaatcagtatttatttgctacggcagttcataattttgaagtaaaataactatttctgtgcggctgctaggcttatgtgtggctgctaggtttcattacctccaggac

SEQ ID NO: 221047 - DNA, 1594 bp, Zea Mays
atcaataccactcggtccgcgacgctttcctctcccttcgcgatgccgacgatttcctcgcgttgcctcccttcgcgccgccgcctccctcgcgtcggccgtcgcctccccccacatcggccgtcacccctcaccggtgactgtcccaactaagttgaaggggagatataggtcaagaaaaggagaaattgtgacaaatgtgttgggtgtttgtgcacctgacatgcagtttatatatgtcttacctggttgggagggttctgcacatgacgggcgtgtgcttcgagatgccatctcgaggccgaatggattacgtgtccctcaaggttgctattatcttgttgatgctggttacacaaatgcaaatggtttcttagcaccatatcgaggacagaggtatcatctaggaggtttcactactcaaaacccaccacatagtgctgaggagtacttcaacttgtgccatgctagagctaggaatattgttgagagggcatttggaaggctcaagggtcggtgggcaattttaagagacccatttgaaaatgatgaggagccagctatggatgcatcatttgaagttatggatggagaaatcagtgaaccagaatttatcacaggtgtctcaacatctaatgaatggactgatttccgcaataatcttgctcaggggatgtataatagatatagagctaggtctaataactaaggacatgaaccaattagagagctcaagtgttactcggggaagagggaaaaacaaaaggatctggacttattatgaggatgaggagttaattaaagcactatatgagatatctttagatccaaagtggaaaagtgagggaggttttaagaatgggtattgttctgttctagaaaatgaactcaaagcaaggctaccagggtgtggtctcagtgctattccacacattgagtctagagtgaggcattttaggaccaagtatggttctattgaggtcatgcttgctaagagtggttttaatcagatgacgatgcttttcgcgcttcctgagactcttaggagagaattcatcctgaacatgattgcagatgaagctcaaaggaagtgacttgtcaaattatcaatgaagaatgtcaggagcatttggtgaagagtgatcggcatatcaacttctggaagttgaattttgaagacgtttgaagtcctaagacatttctagaacatgaaaattatgaattcctaaggctagctttttttgactgactgtgttgttgactttgtgtgaaaataacccgttgtttgaaacctattatatttgctagctttatttgctattcagcaagacatataaagttgctagctttattggttgtctgtgttttcaactgtttgtgaaaataaccagtataaagttgttgtttagaacatgttatttgtgctagcgcaaagctgaaaataaaatcagtatttttgtgcgccataattttgaagttgttctttaaatcagtatttatttgctacggcagttcataattttgaagtaaaataactatttctgtgcggctgctaggcttatgtgtggctgctaggtttcattacctccaggac

SEQ ID NO: 221048 - DNA, 2112 bp, Zea Mays
aatcaataccactcggtccgcgacgctttcctctcccttcgcgatgccgacgatttcctcgcgttgcctcccttcgcgccgccgcctccctcgcgtcggccgtcgcctccccccacatcggccgtcacccctcaccggcgaccaacctaccctcgacctcctctgctgatgcggatccccagcgggtgctgaccgtgacgggacctccccgtgaccgtgctctgctgcgtggtgcgcgccccgctccgcgttcggctgcccggcggcggctcgcaccaaaacagttcatgttttgatgcatccatacgagcgcttcccagtcgattcaatgcatccatgttcgcgttcggttcggcggccaaaacagtcgccgtgtgctccgtcaggcatcagcatcaggcttcccaatcgaaaaatgtgcatcagcatcaggcttgtccgttagttaagttcaaagaggcattccataccagcgcgcaacatcattcagatatcccaccactactccttgtttctagtataaataaatgtgcatccaagtcactcatgaggagcaacaagctggagtagctagcaactcgagggatgaagactagttgataggctagctttctccttctgtgccactcataaaacaacagctaggtagcacctttttgttgccaagcaatgcaagatctatctgctgagatcaatctgaatacctaaaatatctatctggccggtcatcagctcgatcttaagcagtttatatatgtcttacctggttgggagggttctgcacatgacgggcgtgtgcttcgagatgccatctcgaggccgaatggattacgtgtccctcaaggttgctattatcttgttgatgctggttacacaaatgcaaatggtttcttagcaccatatcgaggacagaggtatcatctaggaggtttcactactcaaaacccaccacatagtgctgaggagtacttcaacttgtgccatgctagagctaggaatattgttgagagggcatttggaaggctcaagggtcggtgggcaattttaagagacccatttgaaaatgatgaggagccagctatggatgcatcatttgaagttatggatggagaaatcagtgaaccagaatttatcacaggtgtctcaacatctaatgaatggactgatttccgcaataatcttgctcaggggatgtataatagatatagagctaggtctaataactaaggacatgaaccaattagagagctcaagtgttactcggggaagagggaaaaacaaaaggatctggacttattatgaggatgaggagttaattaaagcactatatgagatatctttagatccaaagtggaaaagtgagggaggttttaagaatgggtattgttctgttctagaaaatgaactcaaagcaaggctaccagggtgtggtctcagtgctattccacacattgagtctagagtgaggcattttaggaccaagtatggttctattgaggtcatgcttgctaagagtggttttaatcagatgacgatgcttttcgcgcttcctgagactcttaggagagaattcatcctgaacatgattgcagatgaagctcaaaggaagtgacttgtcaaattatcaatgaagaatgtcaggagcatttggtgaagagtgatcggcatatcaacttctggaagttgaattttgaagacgtttgaagtcctaagacatttctagaacatgaaaattatgaattcctaaggctagctttttttgactgactgtgttgttgactttgtgtgaaaataacccgttgtttgaaacctattatatttgctagctttatttgctattcagcaagacatataaagttgctagctttattggttgtctgtgttttcaactgtttgtgaaaataaccagtataaagttgttgtttagaacatgttatttgtgctagcgcaaagctgaaaataaaatcagtatttttgtgcgccataattttgaagttgttctttaaatcagtatttatttgctacggcagttcataattttgaagtaaaataactatttctgtgcggctgctaggcttatgtgtggctgctaggtttcattacctccaggac

SEQ ID NO: 221049 - DNA, 1044 bp, Zea Mays
ggtaaatcaataccactcggtccgcgacgctttcctctcccttcgcgatgccgacgatttcctcgcgttgcctcccttcgcgccgccgcctccctcgcgtcggccgtcgcctccccccacatcggccgtcacccctcaccggacatgaaccaattagagagctcaagtgttactcggggaagagggaaaaacaaaaggatctggacttattatgaggatgaggagttaattaaagcactatatgagatatctttagatccaaagtggaaaagtgagggaggttttaagaatgggtattgttctgttctagaaaatgaactcaaagcaaggctaccagggtgtggtctcagtgctattccacacattgagtctagagtgaggcattttaggaccaagtatggttctattgaggtcatgcttgctaagagtggttttaatcagatgacgatgcttttcgcgcttcctgagactcttaggagagaattcatcctgaacatgattgcagacctatatcctttcttcagatgaagctcaaaggaagtgacttgtcaaattatcaatgaagaatgtcaggagcatttggtgaagagtgatcggcatatcaacttctggaagttgaattttgaagacgtttgaagtcctaagacatttctagaacatgaaaattatgaattcctaaggctagctttttttgactgactgtgttgttgactttgtgtgaaaataacccgttgtttgaaacctattatatttgctagctttatttgctattcagcaagacatataaagttgctagctttattggttgtctgtgttttcaactgtttgtgaaaataaccagtataaagttgttgtttagaacatgttatttgtgctagcgcaaagctgaaaataaaatcagtatttttgtgcgccataattttgaagttgttctttaaatcagtatttatttgctacggcagttcataattttgaagtaaaataactatttctgtgcggctgctaggcttatgtgtggctgctaggtttcattacctccaggac

SEQ ID NO: 221050 - DNA, 1205 bp, Zea Mays
cggtaaatcaataccactcggtccgcgacgctttcctctcccttcgcgatgccgacgatttcctcgcgttgcctcccttcgcgccgccgcctccctcgcgtcggccgtcgcctccccccacatcggccgtcacccctcaccgagacccatttgaaaatgatgaggagccagctatggatgcatcatttgaagttatggatggagaaatcagtgaaccagaatttatcacaggtgtctcaacatctaatgaatggactgatttccgcaataatcttgctcaggggatgtataatagatatagagctaggtctaataactaaggacatgaaccaattagagagctcaagtgttactcggggaagagggaaaaacaaaaggatctggacttattatgaggatgaggagttaattaaagcactatatgagatatctttagatccaaagtggaaaagtgagggaggttttaagaatgggtattgttctgttctagaaaatgaactcaaagcaaggctaccagggtgtggtctcagtgctattccacacattgagtctagagtgaggcattttaggaccaagtatggttctattgaggtcatgcttgctaagagtggttttaatcagatgacgatgcttttcgcgcttcctgagactcttaggagagaattcatcctgaacatgattgcagatgaagctcaaaggaagtgacttgtcaaattatcaatgaagaatgtcaggagcatttggtgaagagtgatcggcatatcaacttctggaagttgaattttgaagacgtttgaagtcctaagacatttctagaacatgaaaattatgaattcctaaggctagctttttttgactgactgtgttgttgactttgtgtgaaaataacccgttgtttgaaacctattatatttgctagctttatttgctattcagcaagacatataaagttgctagctttattggttgtctgtgttttcaactgtttgtgaaaataaccagtataaagttgttgtttagaacatgttatttgtgctagcgcaaagctgaaaataaaatcagtatttttgtgcgccataattttgaagttgttctttaaatcagtatttatttgctacggcagttcataattttgaagtaaaataactatttctgtgcggctgctaggcttatgtgtggctgctaggtttcattacctccaggac

SEQ ID NO: 221051 - DNA, 1105 bp, Zea Mays
gagatacccatacaactgtttggttagatataatctgtaatagatacctgtaatcaaatacctcctttattcaattccccggtaaatcaataccactcggtccgcgacgctttcctctcccttcgcgatgccgacgatttcctcgcgttgcctcccttcgcgccgccgcctccctcgcgtcggccgtcgcctccccccacatcggccgtcacccctcaccggacatgaaccaattagagagctcaagtgttactcggggaagagggaaaaacaaaaggatctggacttattatgaggatgaggagttaattaaagcactatatgagatatctttagatccaaagtggaaaagtgagggaggttttaagaatgggtattgttctgttctagaaaatgaactcaaagcaaggctaccagggtgtggtctcagtgctattccacacattgagtctagagtgaggcattttaggaccaagtatggttctattgaggtcatgcttgctaagagtggttttaatcagatgacgatgcttttcgcgcttcctgagactcttaggagagaattcatcctgaacatgattgcagatgaagctcaaaggaagtgacttgtcaaattatcaatgaagaatgtcaggagcatttggtgaagagtgatcggcatatcaacttctggaagttgaattttgaagacgtttgaagtcctaagacatttctagaacatgaaaattatgaattcctaaggctagctttttttgactgactgtgttgttgactttgtgtgaaaataacccgttgtttgaaacctattatatttgctagctttatttgctattcagcaagacatataaagttgctagctttattggttgtctgtgttttcaactgtttgtgaaaataaccagtataaagttgttgtttagaacatgttatttgtgctagcgcaaagctgaaaataaaatcagtatttttgtgcgccataattttgaagttgttctttaaatcagtatttatttgctacggcagttcataattttgaagtaaaataactatttctgtgcggctgctaggcttatgtgtggctgctaggtttcattacctccaggac

SEQ ID NO: 221052 - DNA, 726 bp, Zea Mays
gaggatctatggatatctgctttcctgttggtactaaggaagccaacaggaaattttggactgctacttggattaatgctcgagaaaaaaggtgcatgacatcaatattgctattctatttgttctatagaaccttatgtggaaacgtgcattacacagtcccagcctcctagagactatatacatggtatgcagtccctagggaccgagcctcagagctagaggaagttattcgtgtacatggatatggaggaaaccctgaccgccttgcatcgctggcagtgcttggggagaagacaacattgatgtctccagatgttcttgtagcccgtggtgtgccctgctgtaggttagtacagtgtcctggagagtttgtggtgacattcccaagggcataccacattgggtttagtcatgggcgtccacaggctacgccatgcctccacctccgcagatcatgcctaccctgccccgcccgcgacagcctgcaagcattaatgaagttgtctgttttgcaataactttgtggagcggtttgatcatcactgtccatgggtcggtcggtgcataggactggtgataactctagtgcacaagaatccgctgaacagggtggcgttgagctgtatgaagaggtgaacaaccgtgggctctacgctattgcccaggctgagtcgtctgctataaggttctcggtggactcgccatgagaagggcatgttatgg

SEQ ID NO: 221053 - DNA, 1168 bp, Zea Mays
cctaacattgtctgactcaggaaccaggggaatcaaatcgttctaatatttctctcttcaaaatttgttggagccagtcttgacattatttttatctttttttcaggaagaacaggcttctgtgagggagataaagtgggacgcttttaggaagtactcggaggatcgtctggaagctgagcagcagcgtgctgaggagctggaactacaagtagcagctcttaaacaacagctccaagaagctgagatccattataagcaaaaggaagaacaagtttctctaagggaggttcaatgggaagcggatcaaaatcattccctggatgagcttaacgctcagcgtcagtatgccacggacttggagaaacaaatcgaagatctgacacagaagttaacatcagctgatgcacactacaagcagaaggtgacagaagagagggacaaacttgccgaggtcaccaaagagttgagcgagttgaaacaaaaagtaagcgagagtgttgaattggagaggaaggtgcaggaccttgagcagaagctgcagctagcttattccaagtctgacgaacagtggatactgtggagtcgagatcccgtgaattcagcctggattcatcaacgagttcaggcaagcagcaagacaaaactcaggctgtctcaccaaacccaaccctgcaaggagtgcaagaaccttccggcatcatggccttcaagttcatcctgggagttgccctgctgtctgtcctaatcggcgtgtttcttgggaagcggtactagcgctcaggtcgtgctgaaagggctcagccagcggcaagtttgaaaggattggtggccttgatggtaatggttcgacgacttcctgggagaagggctcatcggcgtgtttctttttgccgtaattttcacttttcgggtaagggtaggggggccaaggaatttgatttttgatcattcctaccctttcatgcaaatggccaactgcatgcgactggttttgcctacagcaagtttccgtatacatttcttgtccgtaaagatcacaagtccagcgacgaaacatgaagcatttgctactatatgtctgtctatatgctcgtatggagagagtgcaagttttgctaccttgtacagattccaccaatccagtgcttttgatgattcagattct

SEQ ID NO: 221054 - DNA, 1105 bp, Zea Mays
aaatttgttggagccagtcttgacattatttttatctttttttcaggaagaacaggcttctgtgagggagataaagtgggacgcttttaggaagtactcggaggatcgtctggaagctgagcagcagcgtgctgaggagctggaactacaagtagcagctcttaaacaacagctccaagaagctgagatccattataagcaaaaggaagaacaagtttctctaagggaggttcaatgggaagcggatcaaaatcattccctggatgagcttaacgctcagcgtcagtatgccacggacttggagaaacaaatcgaagatctgacacagaagttaacatcagctgatgcacactacaagcagaagaagagagggacaaacttgccgaggtcaccaaagagttgagcgagttgaaacaaaaagtaagcgagagtgttgaattggagaggaaggtgcaggaccttgagcagaagctgcagctagcttattccaagtctgacgaacaggcagtggatactgtggagtcgagatcccgtgaattcagcctggattcatcaacgagttcaggcaagcagcaagacaaaactcaggctgtctcaccaaacccaaccctgcaaggagtgcaagaaccttccggcatcatggccttcaagttcatcctgggagttgccctgctgtctgtcctaatcggcgtgtttcttgggaagcggtactagcgctcaggtcgtgctgaaagggctcagccagcggcaagtttgaaaggattggtggccttgatggtaatggttcgacgacttcctgggagaagggctcatcggcgtgtttctttttgccgtaattttcacttttcgggtaagggtaggggggccaaggaatttgatttttgatcattcctaccctttcatgcaaatggccaactgcatgcgactggttttgcctacagcaagtttccgtatacatttcttgtccgtaaagatcacaagtccagcgacgaaacatgaagcatttgctactatatgtctgtctatatgctcgtatggagagagtgcaagttttgctaccttgtacagattccaccaatccagtgcttttgatgattcagattct

SEQ ID NO: 221055 - DNA, 1108 bp, Zea Mays
aaatttgttggagccagtcttgacattatttttatctttttttcaggaagaacaggcttctgtgagggagataaagtgggacgcttttaggaagtactcggaggatcgtctggaagctgagcagcagcgtgctgaggagctggaactacaagtagcagctcttaaacaacagctccaagaagctgagatccattataagcaaaagaacaagtttctctaagggaggttcaatgggaagcggatcaaaatcattccctggatgagcttaacgctcagcgtcagtatgccacggacttggagaaacaaatcgaagatctgacacagaagttaacatcagctgatgcacactacaagcagaaggtgacagaagagagggacaaacttgccgaggtcaccaaagagttgagcgagttgaaacaaaaagtaagcgagagtgttgaattggagaggaaggtgcaggaccttgagcagaagctgcagctagcttattccaagtctgacgaacaggcagtggatactgtggagtcgagatcccgtgaattcagcctggattcatcaacgagttcaggcaagcagcaagacaaaactcaggctgtctcaccaaacccaaccctgcaaggagtgcaagaaccttccggcatcatggccttcaagttcatcctgggagttgccctgctgtctgtcctaatcggcgtgtttcttgggaagcggtactagcgctcaggtcgtgctgaaagggctcagccagcggcaagtttgaaaggattggtggccttgatggtaatggttcgacgacttcctgggagaagggctcatcggcgtgtttctttttgccgtaattttcacttttcgggtaagggtaggggggccaaggaatttgatttttgatcattcctaccctttcatgcaaatggccaactgcatgcgactggttttgcctacagcaagtttccgtatacatttcttgtccgtaaagatcacaagtccagcgacgaaacatgaagcatttgctactatatgtctgtctatatgctcgtatggagagagtgcaagttttgctaccttgtacagattccaccaatccagtgcttttgatgattcagattct

SEQ ID NO: 221056 - DNA, 1019 bp, Zea Mays
tttcaggaagaacaggcttctgtgagggagataaagtgggacgcttttaggaagtactcggaggatcgtctggaagctgagcagcagcgtgctgaggagctggaactacaagtagcagctcttaaacaacagctccaagaagctgagatccattataagcaaaaggaagaacaagtttctctaagggaggttcaatgggaagcggatcaaaatcattccctggatgagcttaacgctcagcgtcagtatgccacggacttggagaaacaaatcgaagatctgacacagaagttaacatcagctgatgcacactacaagcagaaggtgacagaagagagggacaaacttgccgaggtcaccaaagagttgagcgagttgaaacaaaaagtaagcgagagtgttgaattggagaggaaggtgcaggaccttgagcagaagctgcagctagcttattccaagtctgacgaacaggcagtggatactgtggagtcgagatcccgtgaattcagcctggattcatcaacgagttcaggcaagcagcaagacaaaactcaggctgtctcaccaaacccaaccctgcaaggagtgcaagaaccttccggcatcatggccttcaagttcatcctgggagttgccctgctgtctgtcctaatcggcgtgtttcttgggaagcggtactagcgctcaggtcgtgctgaaagggctcagccagcggcaagtttgaaaggattggtggccttgatggtaatggttcgacgacttcctgggagaagggctcatcggcgtgtttctttttgccgtaattttcacctttcatgcaaatggccaactgcatgcgactggttttgcctacagcaagtttccgtatacatttcttgtccgtaaagatcacaagtccagcgacgaaacatgaagcatttgctactatatgtctgtctatatgctcgtatggagagagtgcaagttttgctaccttgtacagattccaccaatccagtgcttttgatgattcagattct

SEQ ID NO: 221057 - DNA, 1011 bp, Zea Mays
gggttttttaacagcccattgcatagcctatcgagcgacgccccacgctcaaaaagcacaaatcgcttcccgcgccgccgccgcgccgccgaccggcgctcctcacctctcccgccgcacccatcgtctcccgttcccggctaaaccctgcttgagccctagacaccgcccgcctccgggaggtagagagcatgcacgccaggttcctcagcgcgccgtcccctgcctccgccgccccctccccgtacgttcgcttggccttcacgggcgcccgcccgcgccgcgcgtgttggaagccgcgaggccccgcgtccgcgtccgcgccgccgcctcggcctctccactcgctgtgcgcccgggcctccatgcagcccgcctctcccgcgcacgacgggcatggtggtccgccggtgcacggcgtctccaacaccgtcatcggggtcctggggggcggtcagctcgggaagatgctctgccatgcagcgagtcagatggggattagaattgtcatcctcgaccctcttcccggctgccccgcgagctcggtttgcgatgagcacgtcattgggagcttcaatgatgaggacacggtccgggagttcgccaagaggtgtggggtcctaacagtggagattgagcatgttgatgtcaccacactggagaaactggaaaaacagggcgttgactgcgagcctaacgcctccacaatcatgattattcaggacaagtacaggcagaaaaagcatttctcaagatgcgagatcccattgcctgacttcatggaagtagatactttacgcagtatagaggaggctggagaaaagtttggctatcccctaatggtcaaaagcaagagattagcatatgatggtcgaggaaatgctgtagccaagaacaaagaggagctaccttctgttgttgcttcactaggtgggtttgagcggggcttgtatgttgagagatggactcctttcgtaaagctttctgtaatcgtggcaaggagcagagaca

SEQ ID NO: 221058 - DNA, 1063 bp, Zea Mays
gtgattggttctcttccctgtcgatcctggctcacgctagtcagccaggctataggtggcctggtttcatctatgcaattgttcaatgtttggttacttgatttaatttagcctggctactatgagacattgtttggttgcttgtatcaaaacatgaaccaaagaaaaatttacaaataaatcttcaaattttatacaacatatatgatctagttttgtccgaaaaaatatcaaaaatacaaatacgaaatcggttcagtgattaaatcttttaattggaaaatataattaaaaaacaaactaaacaatcttttagtagaacgtgtcgctgcatcccactgtcctggccgcgcgcagatgctcagattgggcatcgccagccggcctggctcaggcctcctatttgcatctatgtagcctgacttagtagagatatcaaccaaactaactatgttttaaagatccgcggctgcagcttctgcactcagccacccaaccaaacacacggcatggtggtccgccggtgcacggcgtctccaacaccgtcatcggggtcctggggggcggtcagctcgggaagatgctctgccatgcagcgagtcagatggggattagaattgtcatcctcgaccctcttcccggctgccccgcgagctcggtttgcgatgagcacgtcattgggagcttcaatgatgaggacacggtccgggagttcgccaagaggtgtggggtcctaacagtggagattgagcatgttgatgtcaccacactggagaaactggaaaaacagggcgttgactgcgagcctaacgcctccacaatcatgattattcaggacaagtacaggcagaaaaagcatttctcaagatgcgagatcccattgcctgacttcatggaagtagatactttacgcagtatagaggaggctggagaaaagtttggctatcccctaatggtcaaaagcaagagattagcatatgatggtcgaggaaatgctgtagccaagaacaaagaggagctaccttctgttgttgcttcactaggtgggtttgagcggggcttg

SEQ ID NO: 221059 - DNA, 348 bp, Zea Mays
  misc_feature (347)..(348): n is a, c, g, or t
cttttttatttaatagaatacacaagtaaaaatgtaaaataatgacggatccgaccgtcccggccagcggcgacggcgagctgccttggggcctggcactccggcagagtcgcagagaacaaacggctgccacagtgccacggcttgctctgcggcgagccttgggcaccgaggcgcctcccatcctctaagctccagttccttcttctcggggaaatcgatccggagagaatggaagagccggattgcccagaaggttccgttcccgaccgcggaggagagcggcggacggcttccctgccgctgccggccgccttcctcgagttcctcagcgagaacggcctggnn

SEQ ID NO: 221060 - DNA, 6281 bp, Zea Mays
aaaaaatggtattgtgttgccgcggagctgctggagattcatctggcaacggcgaaactgtccgtttttttaagaccgtttgtagctgcgtctgccctagttgaagggcggtccaatcgcagtttcacactgccgccgccacggcccacggcgccacgccctgttgcccgtttcgtctcccgtccccttcctagtctccccccaaaacaagaagcgggctggcggctgcagtttcccgcctgctcgcacattggcgcgaaatttgccgagctaccttgcgcgctcccttcccgcatcccagcaataacactatctacagtgtaagccaaagttcctagtccccctcccctccgctcccttctctctcctcctcacggacgtcagagctccttccccattccggcgttgccaagaaggccggtttccgggccctgtcttccgctacctcgccggccgcctttcaccgtcatacaaggaaataggaaatatttttctgtctgtaccattgctttccagacccacaatgcctgcttctgctcacaaaaatctcgattctggttgtcctaggagatctacaaggtttaaggatattcatgtagtttatgaagattctgacagggatccttcttcttttaagaggatcaaaactgaagtaattgattctgaactaagtgttggttctgtcagtgacaaggatagtgaacacaattgtcatgatgtattactcaaggatctcaggactcagtgtaaagctaagaatcggaagatttcaaaaatcacattggaaggatgtggcattaagaatcaggttaaaacagaagatgacattgatcttgataagcctattgttgcattgaaacagaagaggctgaaaacatctcctgctaaggctaatataaagatggatgcgctaagatcttctccatgtgctgctaaagagaaagatacaacatcagccagagacaagattcttagttctgcacagactttcctgctgaaagcaacaatgcaagaccgaggattagagaagcctggaaggagaattgcagaactggagcagtctaaagttgttattgattctgctgaagaaatagttggggagcaaatttattgtgctgaagtgaacaatacagctggagttctagcgggttgtgtaaaacctgatgtactatatgaaataaaaactgaagatacaaattattctgaatttggaacttctatgtgttccataaagaatcctgatcattcatcctttgagctgcaacagaagctggtggatgatgatgactgtgtgcctccattttgtttcatgacccgaccagctcaattagctgatgtttctgatcattcctgcgaacaaacctgcagttccaaagaaaacaattctgatgacattacagctgcaaaggcaactgatgttgtttcttcattggatctcactgatgaagtgagaaatcatcagaaaacatctgaaaatataactaatttagatgtggataagtcttctactgcaaatggacttatggcttctttcagtgagtcctgccatgaccgtatagataaagatgagcaatggaatttatttgcccatggggaatgaacctgcaaagattttggaagagttgtctcctattgatgagtctagcacagatactcaatctgatttgtgtagaagcacagaaatgaatttcacttcacttgagggggttgtacggatggaggctgagggccaattggattcaatagtctgctgtggtgtaagaccaaagcatatgttactagatatggaaattggacatacagccactggtacattcacctttgacaagactatcgacttagctcatcctgccaattttgttgcacaagatggaaggctagaaagtatagtatatgatgttttgaataatcatgcacaaaggacaacctctaaaagtaaatcttctgttggacttccagatactgctgtgcttcagagctcacttattgagttcactgacaattgtctggaagataaaagggcttcagatgataaattttcacatcccaataatgtggacttgccattgaaggatacgttaaattctacaatagactatgacatttgtagatctattaataatgaaggatcagaagaagaaatagtgcctcaacatcagttataccagtcatgtagtgataagttcaaccttagcagtgtcatgccagagatctctaatgctgaaaaatcacaaaaattatctgctggaactcaaaattcttctgctacttctttggaaactgacggacgaattaaaaggccaaatttttttgtggatgaggaatcaattgaagaacatgctccaaaagtattactgtccaagagaaagattatgtcaccaacgtctcaggagaagctttacagtgctgtgactggtattgatttgtgtgatggagtccaaagatcgaatagcaaaatcattattgaagattgtgacaaaactacaatatcattgcctcagccagcacacatgcaaggcaaatcaatgttccacacagacaggagacttaaggacaggacatctgtctcccctacaagcaaaggacttctgaagtcaacaggatccccgcccaatcaacagacttgttcttgcatgagaagttcgccagtggtcttagacactgagaaagctgttgagttttcacaaagacagatgcatgatatagaaaatattgctgcaaagcttatcaggagcttgaaacacatgaaaagtatagtggatgaaagtttgtcaacagaagcatactctttacttcctaattttaacattgcccagatcagagcagcctctgaggatgcattagaagtggagaggactacgaggaaatggctgtcgataatgaacaaagactgcagtcgcttttgtaaaatattgagcctagcaaagaagaatgatgtttctcatcctgaagcgccaaggaaacaaagaaaaataacgtttgcagatgaagctggaggaatgctctgccatgttaagttttttaaggatggacaagcctctctttctgaatgccagagtgatttataggcactaagctggtcttcatcatgaaatttgatcagaaaggaaaccttgttgacaacagaatataatcaaacaagctgctcagctcagatggaccaaaataatgaacgcacgcacagtatattgaaccaaaatagtgaacgcacagtagaaaacagacggagaagttagcgcatgttgaacgcacagtatgtattttactgtaaattaattgatgacattgttgtcccaactcaggtattatccttgtatgttgagttcaagagtccatgtaaagcggcaatttttacaatgttcgctgaggccacaagtatttgtaacccagaattgtagcctctgtaatacaattattggatactgttggtccaaagtgctttatttgaaggaactatttaagtttcagtaataggaatattctcttttaagttatactaagttttagattagtacgtaataaaaataaatctctactactaattataagcataacgtaggcgtccacacccccacggtggtgcacgttctgccgcccgcgcatcccgcccgcggccgcaccttgccccgcatcacgcagtccaggcgcaattcctgctcgcgaaggtttcgggaaaggttgaacaccgcatttcgcctccggtgtctgtctgcctgcctggctcgtgctcctcggcgtcgccctcacccccatctcgaggccgccaccccgccgccatcctggctcaccccacgacgcaaatctgtgtgccgcccctcccctcccatatcgccatctctcctcccctccccggtcaccacccatacctcagccacctcggcggttgtgctaggggcgatggtggtggaggctgcggtcgcagctgtgttagtggaggagatgtggtggcggcagctagacagcatcgtgagcgcggtgtcgtttgggctcatgtccatgttccttgccattgccatcctcgagcacttcctccgccccctggcccacacgctcgagcacgcgccgccccgggggatccgccaccgcctcctcctcttcctcagccgtggcggtgagcgcagcgccgcccccagtttagatcttgaggcggcgacgaagcttcaagcccacgcgcccctcgagatggggccgatgcggacgcggatccgaaactggaccatggggccgacggggtggccgcgtggtgggtgtgggtcgcgctcaccgtctgcgttgatgtcgtcggcgtcggtctcgcgctcgtcgggttcctctactgaacaaggtttctagggattccccggtttctaggaattccgtcgtcgcttggcgctgccctgttatcgtaggtgtcgccagctgccggtcctgtggcccgtgcaggtgcagccatgcccttccatggtgtgccacaccagctctcggaggtgcacaagaagcgcacgctctaccatcccgagttgccctctgcctccaggtacgcacctcctcgttacggcggtcgaaatgttcatgaacgcgagctctcagaggtgtagaagaagcgcacgctcagaggtgcagaacagatacgcacctcctccagagcatttcgtttgttactcatccatcggacatgcatttggtcccaaaaaaagggtcaagctcctatcactgttcatcatttggaatctttgagaactacaagtttgtagcggctcatttatctcttcaaaatcctaccagcacgtggtagtaaaatatagatgataatttagttgtttgtcaggatgaagcttgctaacgaacaaaactagatatctccgccactagcactgatggcgagaccgccccggtgcatcttaaggggcgagagggcaggggaaaagcagcagcagcaaaactggtcaggggccagcacaccgagatccaagcatttcactatcgagcagcggagaaggacaacgataaatgacaggtatgcatcttgactagctcgctgagggggatggcttggtggatctaatgttcgtttgcttgtatcgctactaggcctgctgttgatcgaaaggagcaagcgagcaacaccagtggactacccttgaaaattgtgacctggcaagtctagtaagtgatgcttgcatcataatacattcacttgagactacatgaatgccccctaatattttagggatgaggcgacagggaatagccctttcactgtcttcatctacttttgttctccagatgacacgatggccatcttcctggcgctgcggtcgccgaagctggaggtgttgggcctcaccactaccttcggcaacgtccacaccgccctcgccacgcgcaacgcgctccacctggtgccgccgcctaccttccttcctctctctcccccaccctgctcgtctgttccacccactccgaccgcggctcacatttgcttctgatgtgtgtgcttgagctggaggctgttggcaggactgacatccctatggcagagggatcccatccaacgatcaagaaagccaccaagctgaggatcgcaagctttgtccacggttcagacggcctgaggatcgcaagcttcgtccacggttcagacggccactgtggatcgaggtgcggcaggtcggggcgccgccgcggattgtaggctcgaccgagactacttcgtcaccaacgtcctcgtatgcttcaatgttaaacattgtcacaggttctcatatatgggtggaagataaagatttgtcctgggttgatggtgaggtatttcgaattgatggccaaaacgcccatgttcgcacaaccaaggggaaggcgggatggcgtattgtggcggctacgagggaccgatgttcctgtgtggcagtgacaacgataccgtggagccaaggcaatgtcagcaagctgatttttcagattggaatctatggttctttttaaagatcgaatatgttctagcatcttaaaaagatttgtcagaatgtaaacatttgttctgaggtcatttaggcctcaaacagaatttcttggacttatttcgttggagggaatgggacatcttgagatctaaatgtgtatagaagatccaaatgtgtatagaacatatatttttatgggtatcaaacatgattgtgtgcaaagcacggacatggtactataacaatgaaacacatatttgtacataattcatcatggtattatatgttgccgttgcaacgcacgggcactcacctagtatcttataatttagaaaggag

SEQ ID NO: 221061 - DNA, 2160 bp, Zea Mays
caccggcgctcgttcttgtcttcgtccatgcactgtacactacacatcaccgactgtaccgcacccgcacatgcgggaagccgcctcatcctcttcgtcgccgtgatccatccatccacatcactgatcagacccgtgccgtgcagttccaccacacttgggggaggcagagccccaagcgcgcgtccgacctctggacctccgcaggcggaacctattgctccctgcaggttctctcgcgggcctagccgtgcttcttccccacccggaatctgatgggatcgctcacgcgggtgccggcggaggacccagcagcggcggaggaggagtggtccgacgaggcggtcatctacgtcaacggcgtccgccgcgtgctcccggacggcctcgcccacctcaccctgcttcagtaccttagagatattggccttcgagggacaaagcttggatgtggtgaaggtggttgtggagcttgcactgtcatggtctcttgctatgaccgaattacaaagaaatcactgcattttgcaatcaatgcatgcttggctccactttattccgtggaaggaatgcatataatcacagttgagggaattggagatcgtcagcgaggtttgcacccagttcagccaaggcacatggttcacaatgtggattttgcacccctggttttgtgatgtctatgtatgcactgctgagatctagcaaacagcctcccactgaagaccagattgaagactgccttgcaggaaatttatgtcgttgtactggctaccgaccaattatagatgccttccgtgtgtttgccaaaacagataatttggcatacaccaattcatgttcagaagatgcaaaggaccaagctatctgcccttctactgggaaaccatgttcctgcaggaatgagacagatgtcaatgttaatgagtcctcgttatcatcgtctgtggaaagatattcaccttattcatacaatgaaattgatgggagtgcatacaatgaaagggaactcatcttccccccagaacttcagttgagaaaagttatgccacttaaattaaatgggtctaatgagatcaagtggtataggcctcttaaactaaagcaattactacatttgaaatcttgctacctggatgcaaagcttatcattggtaactcagaagtgggagtcgaaacgaagtttaagaatgcccaatataaggtcttgatcgcagttactcatattccagagcttaataccctcaaagctaaagaagatggcatacacattggttctgctgtaagacttgcacaacttcaaaattttcttaaaaaggttgtagcagaacatgatttgcctgaaacttcgtcatgccaggcaatagtacgtcagttaaaatggtttgcgggtacacaaatcaggaatgttgcatccattggtggtaacatttgtactgctagtccaatatcagacctaaatccactttggatagctgtaggtgcgaaattccatataatagatgtgaacggtaatgttagaactacccttgcaaaggacttctttcttggttatcgtaaagttgatataaaaccagaagaaatattgctttctattatactaccatggacaaggccttttgaatatgtcaaagaatttaaacaggcacatagaagggaggatgacattgctttggttaatgctggaatgcgtgtgtatttacaagaaactgaacgaaattggataatatctgatgtttcaattgtctttggtggggtagcagcagttccacttagtgcttcaagaactgaaaacttccttactggaaagaaatgggactctgggttgctggatgatactttcaatttattgaaagaagacatctctatttcagagaatgcacctggtggaatgattgaatttcgcagatcgcttactttgagtttctttttcaaatttttcctgtctgttacccatgaaatgaaaataaaagggttgttagcagatggattgcatgcagatcatctgtcagctgtacagccttacagtaggcctgttactgttggaactcaaagttatgaattagtaaggcaaggagcttctgtaggtcagccaatggttcatatgtcagctatgcttcaggtcactggtgaggctgaatacactgatgacacaccgac

SEQ ID NO: 221062 - DNA, 542 bp, Zea Mays
gcggcgggggagactttgcgcgccgacgcggccgcgccgtctcatctgtatggcgcccggtgtctccacgcgctctccactctcccgcagcccgcaggagtgcaggacccggctgccgcaaccgccccgtcgcagcgccaaacatcggtctctgcccccctcctgattttcccaagctagcagcttctactgattctgcaagaatcacaagattcaacaatgaaaatgaagctcaagctgatgcgctgaacttcggacagtcttcaggttggaagttggcctcttctgatgaacactcggtattgtggcagtcattggattctcgtctatagaagggcaccatgcaagcatgtgccgcttatttctttaatttggttccctggctcttgtggagtaattctagcactcagaagatgtttctcttgatgatatatatatacactgtcaccagcaaaacagctgaacttctcatcctagatcatgtccaaaggcagtctaggttcagtgcagatttgtattcatgcaagcatacaatgatatga

SEQ ID NO: 221063 - DNA, 708 bp, Zea Mays
ttttcccaaggttggaagttggcctcttctgatgaacactcggtattgtggcagtcattggattctcgtctatagaagggcaccatgcaagcatgtgccgcttatttctttaatttggttccctggctcttgtggagtaattctagcactcagaagatgtttctcttgatgatatatatatacactgtcaccagcaaaacagctgaacttctcatcctagatcatgtccaaaggcagtctaggttcagtgcagatttgtattcatgcaagcatacaatgatatgataatactaacatagtatacgctgctgccagagacaattaagactgaacagttttttttttttgggaacagatagatttgaccacattgttttttgagtagaaccctgaccagtttataaagatgatgcatatatttccatcacatagctcgcagaaaaaattacagagcatgcatgcaaatatgccaaatgagaaacatcaccgtctaacattgtgctggtttatttaggctaaaaataatattaacaaagaagtctgccttcttctctacaagctgaaacttggcccagaacgaacaagcctgaactccttccacaccacaatccgcagacagcactgaagggaaaacagaaacgaaggctattagcttaaaccggtttctaagggggtgtttggttagaggaactaaagattagtctctag

SEQ ID NO: 221064 - DNA, 3688 bp, Zea Mays
tgcagaagagctgcatatcatttctttaaagctgcaatgattgacgagaatattgaagagaatctgttcagtatgcttgatgaggagaccgattcagaaacagcgatgttggttcgtgcaactattattcgcttattgtatacatcatgtccagtatgtccatcacggtggctggcagttttacgaaatattgttcttgctacgtcaattagaagaaacacaggtgaagttctgtcatgttttgggcataatcctcctgatagtacatctgagaatgatgtgtactatggagaagatgaagacaacatgatttccagctcaaagcagcagcaaatccgctgtgctggttctatatccagccagtttcctccaaggaataaacacctcagatatcgtaccagggtttttgctgcagaatgcgttagccatgtaccaattgcagttggagcagaacctgctcattttgacctcttgttggcaaggagcgcaatatctcaaggcacttatttgtcaaatgattggctagtgcttaaactacaggaactggtctcactttcataccagattagtactgggcaatttgaaggaatgcaaccaataggtgtgaagcttttgtgtttgataatggacaagttcggcaaggcagtagatccggaatttcctggccatatcttgctggaacaatttcaggcccaacttgtttctgctgttagaatggctataagcactgcttctggtccacttcttttggaggctggacttgaactcgctacaagggttatgacgagcagcataattggtggggatagactagctcttagtcgcttgttttctctgataacacgcccgttaagtgacatagagggcctactatatccatcttttgctgactgggtagtgtgcaagataaaagttcgccttctaactgcccatgcagcagtcaagtgtaacacctatcaattcttgaggatgagggaaaatgctcctaatgaataccagcaattggcaccttcacttgtaaacagttcaactctattaggaaaatactggattcgagcactcaaggattatgtttctataagttttggtttgcactcaaaaatcaattacaagccattccttgatgggattcagtcattattagtcttgtccaaggtgcagaggtatcttgatgaagtttggttattaattcttaaagcaacagctcttgatgccgcgcctttggattttgatgagaataatcctaaaaatttactcgaacaaacatttatatctgggcattgtatggtcaaattggacagaactgaattccaatttctttgggggttatctatccttgtgctgttccattcctgccaatcaatgaagaataattctttgaagatcaaccttgactttaaacaagacaaaaactttggggaatttattgttcatggacttgatgacaaaagaccgtgtgatcaggtcttacgcgtgctttcgtccctcacaacagaagtctttttcagcaataattttatttcagtggatatttgccagcaactcctccaggcacttacatatgcagattgttcaagcgctcctatcatccacctattcacccagattatcagattctgccctgacaatttttttgaggttgaagcctttgtcttctctgcaatagagttattgtctcagtatctgggtctgatacttcaatgtagggatgggagttctcagaataattcaagtaacactttgatttctgagttgtctattgcaagcgagacgatggcttatcggatcaaaggagagtatttgtggaagctggtgatgttagtggtatctacttcacaccaatcatttcaacaagtttcaactaatttatgcttctcaaatattatatgcttcctccaaaatatcttccctttcatgaggaaaatttttagagaaagagtcgaatcagatggtgagtgcacaagtcctaaagttgtctttggtgctatggttggcctagtgggatacttctatgtagagtgtgataaaaagatctcattgctcgaaaacaagatttctgattcctacaagctgttgaataagatactacttttttgcttgggagaagccactgctcttgcaaaacttgttcctgagatcatttatcgaagtgaaaatgtaagtaacaatgatgtgctcctttggggcagcttcaggctgtgcgtacaggttattcaaggttcatttcgtagtaccaacatacaggtgcacatgctgggtctgcaagtactgagaagctatgcacagaaggagctaactgaaggttcagaaacaaagttggattcttttatgatgttgcttacggaattgttgggagacttgtttttggtgatggagactacattgaaggaatgttcaaacaaaaaatctgtcagtgtcgttgatgaatgtttgaaacttgttttcctcttccacacactagcacaatcaaagaaataccgacaagatgctacaactcttctgctggaggccttgctgatggttttctctctgtccagtgatactgtttcacaggagcttgctgaagtgaacaccatttccagaaagttgttctctcattttattcagattccgtctgtggctatacagatcaaagacataatgctttctgcaccagctgaaaggagactacagcttcaggacatggtccgagcttcagtcagtcaagggcagataacggtgccagtggctacgagtgcacactcagaacagaatattcaggatagttgcagtaaaaaccctgggtccacatctgaagcttctgattgtgttgcaactcacgggaataatgacaatgaagttgttgatgatgactgggatgacgattgggatgctttccaatctcttcctgcaattgcaaatgatggtgttgattctggagaaatctctcttacaactaggtacaatgaacagatccctcaagaaaatagcagttacggttcttgtaatgcggatattacagctcgtgctatggaagacataacttgtgtggacaaggaacttgaggagccctctgatttgcaattctcaagtactgaacaacagcctaaacatgatttaccagggtcatcccacgaaggttgtgctaaacttgaaagacatccatctgttgattgcaaagagcaattagctgatgatgagacagcagatgaactgcagcagcaggttcatgaagacactgatcatgtaaataaagatagcgaagttctctctgcagaaattcatggggttaaattggatatccttgatgaagatgttgaagatgattccccaatgaattcaaacaatctatcagatatcgcagaggaagagtcctagggttggtacaatgcaacgagggtggaccgcaagcttgtcgagatagtagagaagagctgtccggttcctctgatgctggcataccagattttagtatgtcaggacacgtgatgagcaagagcggaggaaatgagcaaaatgttattttgcctgtatcaatatatattgcacgagataaaaataatataaggttacaaccatgatttttattttgtgccttcctccgcccctccgcttctaaataaatagttacctttgaatgaatttcaagaaaacccaatcaagacttatgacatcaaattaatatcattaaatctaacatagaatatat

SEQ ID NO: 221065 - DNA, 3024 bp, Zea Mays
gcgcggcatccaaatgaccccctgccgtccgtccgctttggtcgtcagccgtcgcgcctcacctccccggcaaagcaggtcgccactaggaccgcgaggaggctctggctcgctgcccgatatattgattaattaatcgcccgttaattgcccgctaatcctctgccggccgctgccgcctcgctttttctcgcttaaataattgcctagtcaagctgatccagctcggcgggctgcgggcggacttggggagacagacaaacatacagagagagagagaggggcagaggcagcccgggatccgatcgggcggtcgatgctacggccggtggcgggcgtcgtcggggcatggctagccaggctgcgcggcgaggaggcgcgatgagaccaccgagcagcggcgtgcgcacggcggccgcgcggccgccggccgcctcgttcctgctggccacggcggccacggcggcgctcgtcggagggttctacttctggttggtggtctcgtcgttccggctccccgactcgggcgccgtcgggtgccgccccgacggcgaggggtcgtgggcggtcggcatgttctacggcagcagccccctcgcgctccgtcccatcgagctggaagggaggagcaatggcaacagctcggcgtggccggtggcgaaccccgtcctgacctgcgggactgcgacggaggcggggtacccgagcaactttgtcgccgacccgttcctctacgtcgagggggacacactatttattttctttgaaacaaaaacaacaacctcaatgcaaggtgatattggagttgcaagaagcttcgaccaaggtgcaacgtgggaatttcttggcattgcactagatgaggcatggcatctgtcatatccttttgtgttcaagtatgagaacgagagggaaacaagaagaaggagctgcgcctttatcgtgctactaagtttcccctcgaatggacattggagaaggttcttgtcaataagccacttattgatgcctcgttagtccaatttgagggatactggtggctatttgcatctgattttacacggtatggtgttgagaagaatgcggagcttgagatttggtacagcaattctcctcttggtccttggactgagcacaagaaaaatcctatctacaaatcagacaaaagtttgggagctcgaaatggtgggagactcttcatttttgaagggtcattatatcgccccggccaggattgcagtggtacttatggccggatggttaagttgcacaaggttgaaaagctaagcaaggaggaatacaaagaggtccctgtaaatcttgggatagaggagccaaagaaagggagaaatgcatggaatggcatgaggtaccatcacatggatgcacaacaactcgcatctggtggatggattgctgtaatggatggtgatcgagttccttcaggtgattcaaccagacgctctctcattggttacttagctttcctgttggccagtgcccttgtcgtttttgtgggttttatgaaaggtgcaatcagttgttacgttcctcccagtttatgggttcctctcacaaggagaacagaattatcccgtatcttctacgtgcaccgcttcaaccagaaagtccgcagatattctaccagcatcagcagatatatctctgctgctaaaaccaagctcagcgaaaagacttggtccaacgtgcttttcttctgtgtagttgctctatttggtgccataaatgtctgcattgccgtgcatttcttatgtggcggcaatggcgctgaagaggcgtacacatatcaagggcaacactcccagtttacgatgatcacaatgacatatgaagcccgtctctggaatttgaaagtgttcatcgaacactactctagatgtgaatcggttagggagatagttgttgtttggaacaaaggtaaccctccaagtagtgacgcgtttgactccactgtgcctgtgaggatacgggtcgaggagaccaattctcttaacaacagatttagggtggatcctctgataaagaccagagctgttcttgaactggacgatgatatcatgatgacttgcaccgacttagagaaaggatttagggtctggagagaacaccctgagcggatggtgggcttctacccccggatgatagatggcaaccctatgcagtacaggaatgagaggtacgctaggggtaagaatggatacaatctgatactcacaggtgctgccttcatggacaaagagtttgctttcaagacttactggagcgagaaggctcgtgaggggagggactatgtgcacaagaacttcaactgcgaggacttgctcatgaattttctgtatgcgaatgcaagctccaccacaaggaccgtggagtacgtccaccccgcatgggctatcgatacgtccaagctttcttctgttgccattagccgggacacccagaagcactatgacatcagaacgcattgcttggcaaacttttcctccatatatggccccctccctcagaaatgggagttcggcatgcgtgaagaccgttgggacaaataggatggcgacggtggtacacgacggacaaacacatgatggtgaaaccttctcttttttttttgtcaatcccctggaaagttttgtagcttcgggcgaaggtataggtccttggggcagaagtgcccctggtttgtgatgtgcctattagatctggctagaagcttagacctgatcaggatagaccattgttcaaaagttgaggatagaccaaaggcagtgcagtgtatgtgtatgtgaattgtggaaggcaaagagggaatttgagaactgcatagtgggtggaaagtttagactgttgggttcccttctctgtagtttgtgtacatctcttcctttctaagattcagctagcatgttgtgtgattatttaccgtaaggattctttttacagctcgtagtgtttattatttcagtctaatgaggactttctgaatctttcttttctgagatccgc

SEQ ID NO: 221066 - DNA, 3349 bp, Zea Mays
cgacgatgcttccccacaactcgagcccctcgtagcttccacccggcccccatccgcggcctccctcctccgttcccctttcccgttttcctcctccgcttcccgattcaactcgcaacgccgccgccttcgctgacccatgagcgggcgcgagccgatttaggcccgccgctacagagatttcgagagaatttttgggctagcggggtgtgaacagaaacttggtgccccgctgctctgccttttgtcgtccactgtttcgcgtcaattctcgcgcgaaaagggatgggcactggagaggggtcgccgccggcgaggcggggcatcagcggtaggcgccgtcgatggccggacgaggacgacgacgagtatgtgctggaggaggaagaagaagaggattatgtggaggagctctccgcctcgagcgccggcgaggagggggtggattcagacgccgagtaccaggaggcagaggaggaggacgagatcgagaagccgcgcccaaagcgaccagcgaagggcatcacatcgagcgccggcgagaggggattggattcagacgccgaataccaggaggcagaggaggacgagatggagacgccgcgcccaaagcgaccggcgaaggacagcacatcgagcgccggcgaggatgggttggattcagacgccgaataccaggaggcagaggaggaggacgacgacgaaatcgagacgccgcgcccgaagcgacgggcaaagggcagcaacagagtacggaaaggaaaggtggatctggccgccgcacgatctcgacgccggaagtatgaggaggacgaggactacgaggaggaggttgacgaagacgacgaggtggaggaggagtaccatgatgaccttgaggaggtcgaggaggaggaagaagtggcaccacagcggccgaagagcattgtgaaatgcggtgcccgtggccggaatgtgaagctgtctctggcagcgaagcgatctcatcagcggaagcaggaggatgatgaggatatggattttgacccagagttggatgacgaggaggtcgagatagatgaggatattgattttgatcccgatgtcgatggtgacgaggaggatgagtatcaagacgaggaggaagaggaactggttcctgcccgtgccagaaaggtaactgtaaagaatccggtgaagcgaaagtccatttcaaagaggcgaacaccaaagaagaagaagaaaaataggggatctaaggtttctaggcggaagggggcttcagctaaagtgaagaaatcagcacctgttaggaggcggagaaagcgttcagtgatagatgattacgaggatgaggatgtggatgatgacgatgacgacgacttcattgtcgacgatgaggtcattgtgaatcggcaccccaagaagaaggccaggatagggagtgggagggagacagtggtggaccctcaagtatctattgaggaagagacatggccagaccttgagtcagactcatcggactttgagtttgcgacgtccgatgaagaacctaacaatgttgaaacacctgtagctgagcagactacagtcagaaaagggaggaagaagaggatatctgagtcagagtcatcctcagattctgaatttgttgtatcaggtaaggaattggaagaattgagggagcctgagcctccaaaggctgcaccaaatctgcatgtgtccttgagaaggatttgtattacaaggcatggagaaggcaagggaaaggagaaacaggaacaggaggaggctgggaagccaatatgcgggatctgtctctcggaggagctgagagctactgtacaaggtgtcctcaattgttgctcacactatttttgcttcgcatgcatcatggaatggtctagggttgagtcgagatgcccattgtgcaagcagcggttcactacaatcaccaagtcatcaaaggtagatcttggtcttggagtgagaaaagctgtagtcaaggtcgaagagcgtgatcaggtttatcagcccactgaagaagaaataaggcgttggctagacccatatgaaaatgttgtttgtatagagtgcaatcaagagaagtgcccgaaggaaactggtactgtggaggatgtagactcggtgacgagggaccatcatatactggaattcagcgtacagtagcttatgaaagacaaaattacagaagtcatgtcggtagttctgtaagttttggcatggctgtaccaggcggtacatttgaaaggccgtcatcaatcaatcctcgccattcttttcaagggattgatctaaatctatctccaagagagtttcccggagaatcacatcctgctgaatcacaagtttcaactgatagcgtatcaactcccactggaagagctggaagaactatttcaggaaggcgtgaattacaacggtacattcagagtttgttcagaccaagtctacctagtagaccagacacgtaccacaatattgcgcagaacagtggtggtgtatcaagaaatgaaccgaaccgctggaacttcccttcttcatcagaagcaaacacatcacagaatctgcctgatggcattcagaaccatcacagtgaccttccatttgttcaagctcacagcaattttgctccatttatgtccccagatggggatgatttccagcaaattgagggtgtcaagagcaacctcaggaacatgcagtagagcccttacggcgttactagaagctcgattctaccctgtgaagcttaccaagggggcaacatgtgccgttttaatggcttgtggaactgaacataacaaaagcttgtgcctgttgcattctcccagaaattgatgtggttcggctcatttgcggagatgtgatgtggtcaacgatataagatacatgctctctttgtttaagtttaggcattttttgttgtcgtcattcttattcattcagtcattaagcacaacctcagattacacagcgaaggcatttctgaatgtcttgatagcttcaaatttatacattgtaatattgtggtaacaccaatttcattaggctgaccattcttttcctcgcgagatgctcttttgcctactaggaatgctgataactgagcttcccagcctcttctataatcatataccgcgcggtggcaaactagcctcgttcgggtactggctttctgttctattagcatactggtctagtggatcaaccgagaaaagctatcaacaatcttagtactaacaatctatggtctgaagactcgtcttctttaagtgttttgttgtatagcgcagctgctttttgtacagatgaatgtttgttccatattgcttaagtttgtatccag

SEQ ID NO: 221067 - DNA, 3283 bp, Zea Mays
cgcgacgatgcttccccacaactcgagcccctcgtagcttccacccggcccccatccgcggcctccctcctccgttcccctttcccgttttcctcctccgcttcccgattcaactcgcaacgccgccgccttcgctgacccatgagcgggcgcgagccgatttaggcccgccgctacagagatttcgagagaatttttgggctagcggggtgtgaacagaaacttggtgccccgctgctctgccttttgtcgtccactgtttcgcgtcaattctcgcgcgaaaagggatgggcactggagaggggtcgccgccggcgaggcggggcatcagcggtaggcgccgtcgatggccggacgaggacgacgacgagtatgtgctggaggaggaagaagaagaggattatgtggaggagctctccgcctcgagcgccggcgaggagggggtggattcagacgccgagtaccaggaggcagaggaggaggacgagatcgagaagccgcgcccaaagcgaccagcgaagggcatcacatcgagcgccggcgagaggggattggattcagacgccgaataccaggaggcagaggaggacgacgagatcgagccgccgcgcctgaagcgaccggccaagggcagcacatcgagcgcgggtgaggaggggttggattcagacgccgaataccaggaggcagaggaggacgagatggagacgccgcgcccaaagcgaccggcgaaggacagcacatcgagcgccggcgaggatgggttggattcagacgccgaataccaggaggcagaggaggaggacgacgacgaaatcgagacgccgcgcccgaagcgacgggcaaagggcagcaacagagtacggaaaggaaaggtggatctggccgccgcacgatctcgacgccggaagtatgaggaggacgaggactacgaggaggaggttgacgaagacgacgaggtggaggaggagtaccatgatgaccttgaggaggtcgaggaggaggaagaagtggcaccacagcggccgaagagcattgtgaaatgcggtgcccgtggccggaatgtgaagctgtctctggcagcgaagcgatctcatcagcggaagcaggaggatgatgaggatatggattttgacccagagttggatgacgaggaggtcgagatagatgaggatattgattttgatcccgatgtcgatggtgacgaggaggatgagtatcaagacgaggaggaagaggaactggttcctgcccgtgccagaaaggtaactgtaaagaatccggtgaagcgaaagtccatttcaaagaggcgaacaccaaagaagaagaagaaaaataggggatctaaggtttctaggcggaagggggcttcagctaaagtgaagaaatcagcacctgttaggaggcggagaaagcgttcagtgatagatgattacgaggatgaggatgtggatgatgacgatgacgacgacttcattgtcgacgatgaggtcattgtgaatcggcaccccaagaagaaggccaggatagggagtgggagggagacagtggtggaccctcaagtatctattgaggaagagacatggccagaccttgagtcagactcatcggactttgagtttgcgacgtccgatgaagaacctaacaatgttgaaacacctgtagctgagcagactacagtcagaaaagggaggaagaagaggatatctgagtcagagtcatcctcagattctgaatttgttgtatcaggtaaggaattggaagaattgagggagcctgagcctccaaaggctgcaccaaatctgcatgtgtccttgagaaggatttgtattacaaggcatggagaaggcaagggaaaggagaaacaggaacaggaggaggctgggaagccaatatgcgggatctgtctctcggaggagctgagagctactgtacaaggtttatcagcccactgaagaagaaataaggcgttggctagacccatatgaaaatgttgtttgtatagagtgcaatcaagagaagtgcccgaaggaaactggtactgtggaggatgtagactcggtgacgagggaccatcatatactggaattcagcgtacagtagcttatgaaagacaaaattacagaagtcatgtcggtagttctgtaagttttggcatggctgtaccaggcggtacatttgaaaggccgtcatcaatcaatcctcgccattcttttcaagggattgatctaaatctatctccaagagagtttcccggagaatcacatcctgctgaatcacaagtttcaactgatagcgtatcaactcccactggaagagctggaagaactatttcaggaaggcgtgaattacaacggtacattcagagtttgttcagaccaagtctacctagtagaccagacacgtaccacaatattgcgcagaacagtggtggtgtatcaagaaatgaaccgaaccgctggaacttcccttcttcatcagaagcaaacacatcacagaatctgcctgatggcattcagaaccatcacagtgaccttccatttgttcaagctcacagcaattttgctccatttatgtccccagatggggatgatttccagcaaattgagggtgtcaagagcaacctcaggaacatgcagtagagcccttacggcgttactagaagctcgattctaccctgtgaagcttaccaagggggcaacatgtgccgttttaatggcttgtggaactgaacataacaaaagcttgtgcctgttgcattctcccagaaattgatgtggttcggctcatttgcggagatgtgatgtggtcaacgatataagatacatgctctctttgtttaagtttaggcattttttgttgtcgtcattcttattcattcagtcattaagcacaacctcagattacacagcgaaggcatttctgaatgtcttgatagcttcaaatttatacattgtaatattgtggtaacaccaatttcattaggctgaccattcttttcctcgcgagatgctcttttgcctactaggaatgctgataactgagcttcccagcctcttctataatcatataccgcgcggtggcaaactagcctcgttcgggtactggctttctgttctattagcatactggtctagtggatcaaccgagaaaagctatcaacaatcttagtactaacaatctatggtctgaagactcgtcttctttaagtgttttgttgtatagcgcagctgctttttgtacagatgaatgtttgttccatattgcttaagtttgtatccag

SEQ ID NO: 221068 - DNA, 3839 bp, Zea Mays
atgaatgaaaaacgattcgtcgtcgctctctcccaaacgttggttcgaaccgggacgaaaccccagtcccctatgcgaccgcggcaaaggttcgaccgccgcatcaaacacgcaatcgccgccagctcggtctgcggccccgcaccggtgttctaccgtttggatgccaaggtgaacgccggccgccatggcctccatcgagccccgcaatcctacgccggcagaacaccggtgcggggccgcggccgccgctcaccaaccggcccgcgacttcctcgcccaccgcgacggcgtcgacaagctcctcaagatcttccgctacgccacgcccctcgcactcgccgctggggccccggcgcctccgcccgcctcaagtctttcgagtccagcgtcgtcctcagccgcaagggtttccgtctcggcaagttcgtgcagtccctccgcgcccacccgcaccttcccccggcgcttgcgctactcgcctacggcagtgagggcgtctactacttcgtcgagcagttcgtctggctcgccaaggccgggatcctgcctgcgcacctgctcgccaagttattgttgaagcctgaagggatgggcactggagaggggtcgccgccggcgaggcggggcatcagcggtaggcgccgtcgatggccggacgaggacgacgacgagtatgtgctggaggaggaagaagaagaggattatgtggaggagctctccgcctcgagcgccggcgaggagggggtggattcagacgccgagtaccaggaggcagaggaggaggacgagatcgagaagccgcgcccaaagcgaccagcgaagggcatcacatcgagcgccggcgagaggggattggattcagacgccgaataccaggaggcagaggaggacgacgagatcgagccgccgcgcctgaagcgaccggccaagggcagcacatcgagcgcgggtgaggaggggttggattcagacgccgaataccaggaggcagaggaggacgagatggagacgccgcgcccaaagcgaccggcgaaggacagcacatcgagcgccggcgaggatgggttggattcagacgccgaataccaggaggcagaggaggaggacgacgacgaaatcgagacgccgcgcccgaagcgacgggcaaagggcagcaacagagtacggaaaggaaaggtggatctggccgccgcacgatctcgacgccggaagtatgaggaggacgaggactacgaggaggaggttgacgaagacgacgaggtggaggaggagtaccatgatgaccttgaggaggtcgaggaggaggaagaagtggcaccacagcggccgaagagcattgtgaaatgcggtgcccgtggccggaatgtgaagctgtctctggcagcgaagcgatctcatcagcggaagcaggaggatgatgaggatatggattttgacccagagttggatgacgaggaggtcgagatagatgaggatattgattttgatcccgatgtcgatggtgacgaggaggatgagtatcaagacgaggaggaagaggaactggttcctgcccgtgccagaaaggtaactgtaaagaatccggtgaagcgaaagtccatttcaaagaggcgaacaccaaagaagaagaagaaaaataggggatctaaggtttctaggcggaagggggcttcagctaaagtgaagaaatcagcacctgttaggaggcggagaaagcgttcagtgatagatgattacgaggatgaggatgtggatgatgacgatgacgacgacttcattgtcgacgatgaggtcattgtgaatcggcaccccaagaagaaggccaggatagggagtgggagggagacagtggtggaccctcaagtatctattgaggaagagacatggccagaccttgagtcagactcatcggactttgagtttgcgacgtccgatgaagaacctaacaatgttgaaacacctgtagctgagcagactacagtcagaaaagggaggaagaagaggatatctgagtcagagtcatcctcagattctgaatttgttgtatcaggtaaggaattggaagaattgagggagcctgagcctccaaaggctgcaccaaatctgcatgtgtccttgagaaggatttgtattacaaggcatggagaaggcaagggaaaggagaaacaggaacaggaggaggctgggaagccaatatgcgggatctgtctctcggaggagctgagagctactgtacaaggtgtcctcaattgttgctcacactatttttgcttcgcatgcatcatggaatggtctagggttgagtcgagatgcccattgtgcaagcagcggttcactacaatcaccaagtcatcaaaggtagatcttggtcttggagtgagaaaagctgtagtcaaggtcgaagagcgtgatcaggtttatcagcccactgaagaagaaataaggcgttggctagacccatatgaaaatgttgtttgtatagagtgcaatcaaggtggcgatgataatctcatgctactatgtgacatttgtgattcctcagcacatacttattgtgttggcttgggtagagaagtgcccgaaggaaactggtactgtggaggatgtagactcggtgacgagggaccatcatatactggaattcagcgtacagtagcttatgaaagacaaaattacagaagtcatgtcggtagttctgtaagttttggcatggctgtaccaggcggtacatttgaaaggccgtcatcaatcaatcctcgccattcttttcaagggattgatctaaatctatctccaagagagtttcccggagaatcacatcctgctgaatcacaagtttcaactgatagcgtatcaactcccactggaagagctggaagaactatttcaggaaggcgtgaattacaacggtacattcagagtttgttcagaccaagtctacctagtagaccagacacgtaccacaatattgcgcagaacagtggtggtgtatcaagaaatgaaccgaaccgctggaacttcccttcttcatcagaagcaaacacatcacagaatctgcctgatggcattcagaaccatcacagtgaccttccatttgttcaagctcacagcaattttgctccatttatgtccccagatggggatgatttccagcaaattgagggtgtcaagagcaacctcaggaacatgcagtagagcccttacggcgttactagaagctcgattctaccctgtgaagcttaccaagggggcaacatgtgccgttttaatggcttgtggaactgaacataacaaaagcttgtgcctgttgcattctcccagaaattgatgtggttcggctcatttgcggagatgtgatgtggtcaacgatataagatacatgctctctttgtttaagtttaggcattttttgttgtcgtcattcttattcattcagtcattaagcacaacctcagattacacagcgaaggcatttctgaatgtcttgatagcttcaaatttatacattgtaatattgtggtaacaccaatttcattaggctgaccattcttttcctcgcgagatgctcttttgcctactaggaatgctgataactgagcttcccagcctcttctataatcatataccgcgcggtggcaaactagcctcgttcgggtactggctttctgttctattagcatactggtctagtggatcaaccgagaaaagctatcaacaatcttagtactaacaatctatggtctgaagactcgtcttctttaagtgttttgttgtatagcgcagctgctttttgtacagatgaatgtttgttccatattgcttaagtttgtatccag

SEQ ID NO: 221069 - DNA, 3063 bp, Zea Mays
tgaacccacgccaaagcagagcaaccacctctctctctctctcccaccagggaggcagggaccggtctccacagtccacacacacacagaggaaccaagtcacgaagacgaagagacaagggagcggttgcccggcgctggtttccctttccccgattcccagttaagcgcagcgatttggcgtctgatgattgcgcaatcgagcagcggcgcggggaggcaacaggacgcaccgaaaagggggcgcctttacaggacacgggcctcgcctttcccttgaatctcgccgcgccgcgcctcctttcgttttcccgcccgtcgcgacctttgcaactgcaaccacagcgagcgagccacggagggggcagagcggagccagaggtctctgacgcggcgcaggatcgcggcggcggaggggagcaagcagaggaggccaagaggtccgagggcctcgccgaagcgcgtgcggcgtagtccgcctctgtccgtccgggtccggcaacggcggcgagatggaggcggccgccgacctgctggagtacgagctgcagagggagatctccggcatcttgattcagaactacgtctgcggtttgcgccaggagtatgagatgaagttgtgggagcaccggaactgcatcagcgctctgaacaggaactgggcggaaaaggtttctgagatcacggcgctgcgagacgagcttcgcgatgttctctgtacttctgaacctgctactcatcatcaccatcaccgctcccacgggagtctagaagacgagacgatcattgcgaagacggaaggtgacagtgagcctccggtaacagagaaatcttctgagtctacgctcgagatcccagatttttccctcctgaagcacatgcacggcgaagaaatcacgagttttctcaggacagaatggctaaagctgcgaaggcagcacgagtccgagcttcacgagaagacagaggagctgttcagggtgaaaagggaacacgcaaaggagaaagcttcgttgcctcttaagaaagagcgggagcttgagctccacaggtcgaagctgctacagaccatcgctaggctgggcgagatagcctccaggaaagaggaatcttgctctgactgcaacgaggatgaggagatgtgcagattgaaggacaggatcggcgtgctactacaagaaaacaatcgtctccgaggcttgctggctgataagaagcaggaggttaaacatctctctttgcaagtgtcagattcaaggagcaaaatagcccagtactcactgccagagtcaaaactgtcgaataattgtgagaagcttagggctgaacttgaagattttaagatagagaggcacttgaacgatttattggactcatctgtattcagggaagtttgtcacaattatgaggatcagatatgtgatttgaatcaggagggatccttcctcagagacctgcttgatgaaaaagaagaccagctaagtatcatgtacgaagatagacagaagctcaagcatgaaaacgatcaactcgtatcgattgcagggtcaattatacagcatcatgaccaagccaacttggttcatgacgagcttatgatatataaggagaaattgtgcgagcaagaacttttgatattggagtcaaagggcgaatataactccatgaaaaggtgcctgtatgaggctatgcagcaaatccaggtatgcaagcaagaaattctaggcctgactgagaatttaacttctatgtctattgctttggagaaagccaaggaacagaatgcctcacttgacgccacaatccgagagatgaagaaaacaccagggcaaagcattggcagtcattgggggcaaactggggaatttgatcttaccagtatggagaagttatcaaagacatgtagtgacttcgaaagcagattagtagaaacaatgaaaagaaatgaaaccaggttgactagtatagtttgtcagtttagcccactggtgcagcaagttgctctcttaaggaaaaaagaattctggtataagcaaatactcgagattaaatgctcaaatctttggaaagcagaagccgaggttgatgtacttggtgatgaggttgacacccttctaagtgtgctgggaaaaatttatattgcactcgaccattattcgccagttttgaagcattaccctggggtaaggttacagagattttgatgcttgtgcagaaggtgttgaaaggagaaagcgtttaacaccgaaccactatgtgaaaatcttgacagatttcatgtccatattacaaacagtagcgcaagaccctaagaagagttagggcaatgtgctgtgggagaatatttacacgtacttactgcaaaggagcttcctagattagatttttttttttacgaacagtcgaagtactgaagtagccatgggtccaattaaatggtgtagagtaaccggttttcagcttgctagctagctttatttgtattacctccgttctcgaatatttgtcgctggctagctcatttttaaactaaaacacgacaaataaaaaagaacagaggtagtattagtgtgcagttatagttgaattcagactaggaattcaaaaggttggtttaacgatggtagctttacagtattagtgtttgggtagtataaatgtgtatgtaacggttgtaggtttaggttggatgatgctctggtgattattatttcaaggagcatagcttcttgtagtcatatggagtattgtatgcttgcagtgggtagggaagatggacttgtaacagctgcgtcccattcgttgcagttaaaatatacatgcagattctttgtgttgacaggaggtattgaaatgaacatgcttgactgatacattgcaaatgtctacggtatcatggatattccttcactgctaactcagcgcaaattcatggtctatttttgctcattaactatttggtatgaagtagcgcatggtttagcttgaggaaattaagaggcataataacagcatttttagcaaatatattaattaaaaaggcattcctagctgttacaaaat

SEQ ID NO: 221070 - DNA, 3068 bp, Zea Mays
tgtgaaccactgaacccacgccaaagcagagcaaccacctctctctctctctcccaccagggaggcagggaccggtctccacagtccacacacacacagaggaaccaagtcacgaagacgaagagacaagggagcggttgcccggcgctggtttccctttccccgattcccagttaagcgcagcgatttggcgtctgatgattgcgcaatcgagcagcggcgcggggaggcaacaggacgcaccgaaaagggggcgcctttacaggacacgggcctcgcctttcccttgaatctcgccgcgccgcgcctcctttcgttttcccgcccgtcgcgacctttgcaactgcaaccacagcgagcgagccacggagggggcagagcggagccagaggtctctgacgcggcgcaggatcgcggcggcggaggggagcaagcagaggaggccaagaggtccgagggcctcgccgaagcgcgtgcggcgtagtccgcctctgtccgtccgggtccggcaacggcggcgagatggaggcggccgccgacctgctggagtacgagctgcagagggagatctccggcatcttgattcagaactacgtctgcggtttgcgccaggagtatgagatgaagttgtgggagcaccggaactgcatcagcgctctgaacaggaactgggcggaaaaggtttctgagatcacggcgctgcgagacgagcttcgcgatgttctctgtacttctgaacctgctactcatcatcaccatcaccgctcccacgggagtctagaagacgagacgatcattgcgaagacggaaggtgacagtgagcctccggtaacagagaaatcttctgagtctacgctcgagatcccagatttttccctcctgaagcacatgcacggcgaagaaatcacgagttttctcaggacagaatggctaaagctgcgaaggcagcacgagtccgagcttcacgagaagacagaggagctgttcagggtgaaaagggaacacgcaaaggagaaagcttcgttgcctcttaagaaagagcgggagcttgagctccacaggtcgaagctgctacagaccatcgctaggctgggcgagatagcctccaggaaagaggaatcttgctctgactgcaacgaggatgaggagatgtgcagattgaaggacaggatcggcgtgctactacaagaaaacaatcgtctccgaggcttgctggctgataagaagcaggaggttaaacatctctctttgcaagtgtcagattcaaggagcaaaatagcccagtactcactgccagagtcaaaactgtcgaataattgtgagaagcttagggctgaacttgaagattttaagatagagaggcacttgaacgatttattggactcatctgtattcagggaagtttgtcacaattatgaggatcagatatgtgatttgaatcaggagggatccttcctcagagacctgcttgatgaaaaagaagaccagctaagtatcatgtacgaagatagacagaagctcaagcatgaaaacgatcaactcgtatcgattgcagggtcaattatacagcatcatgaccaagccaacttggttcatgacgagcttatgatatataaggagaaattgtgcgagcaagaacttttgatattggagtcaaagggcgaatataactccatgaaaaggtgcctgtatgaggctatgcagcaaatccaggtatgcaagcaagaaattctaggcctgactgagaatttaacttctatgtctattgctttggagaaagccaaggaacagaatgcctcacttgacgccacaatccgagagatgaagaaaacaccagggcaaagcattggcagtcattgggggcaaactggggaatttgatcttaccagtatggagaagttatcaaagacatgtagtgacttcgaaagcagattagtagaaacaatgaaaagaaatgaaaccaggttgactagtatagtttgtcagtttagcccactggtgcagcaagttgctctcttaaggaaaaaagaattctggtataagcaaatactcgagattaaatgctcaaatctttggaaagcagaagccgaggttgatgtacttggtgatgaggttgacacccttctaagtgtgctgggaaaaatttatattgcactcgaccattattcgccagttttgaagcattaccctggggttacagagattttgatgcttgtgcagaaggtgttgaaaggagaaagcgtttaacaccgaaccactatgtgaaaatcttgacagatttcatgtccatattacaaacagtagcgcaagaccctaagaagagttagggcaatgtgctgtgggagaatatttacacgtacttactgcaaaggagcttcctagattagatttttttttttacgaacagtcgaagtactgaagtagccatgggtccaattaaatggtgtagagtaaccggttttcagcttgctagctagctttatttgtattacctccgttctcgaatatttgtcgctggctagctcatttttaaactaaaacacgacaaataaaaaagaacagaggtagtattagtgtgcagttatagttgaattcagactaggaattcaaaaggttggtttaacgatggtagctttacagtattagtgtttgggtagtataaatgtgtatgtaacggttgtaggtttaggttggatgatgctctggtgattattatttcaaggagcatagcttcttgtagtcatatggagtattgtatgcttgcagtgggtagggaagatggacttgtaacagctgcgtcccattcgttgcagttaaaatatacatgcagattctttgtgttgacaggaggtattgaaatgaacatgcttgactgatacattgcaaatgtctacggtatcatggatattccttcactgctaactcagcgcaaattcatggtctatttttgctcattaactatttggtatgaagtagcgcatggtttagcttgaggaaattaagaggcataataacagcatttttagcaaatatattaattaaaaaggcattcctagctgttacaaaat

SEQ ID NO: 221071 - DNA, 1297 bp, Zea Mays
gttatgatggactttgtcttctctgagtcagaaggtggaatatatgacaataggaatgggatggactatcatattcctgtgtctgattctgttgcaagggaacctccaatgcatattgtacacattgcagtggaaatggctcctatcgcgaaggtcggaggccttggtgatgttgttacaagcctttcacgagctgttcaagatttaggccataaagttgaggttattctgccgaaatatgattgtttaaaccttaacagtcgtctttttcacttcaatgaagttgagttcatttagttttaaaagcacatgaatttatggagggagaatattcttaatgtgtgctctttcatatttaatctgcagtacctttttatgttatttgtggagagtttcatgtgtatggatggatgaccaatggtagttggtggataccaattttcttcattatgttggcgtccttcggttgcaggtgaaggatttacgctaccaacaaagttttacttggggtggcacagagataaaagtatggtttggaaaggttgaagatctccctgtttatttcttggaaccacaaaatgggatgttttgggttggatgtgtctacgggaagaatgatgagagtagatttggcttcttctgtcattctgctctggagtttttgctccaaaaaggatcttctcctgatatcatacattgtcatgattggtcaagtgctcccgttgcttggctgtacaaggaacattatgctcttaatgggatcggaaatggtcggattgtatttaccatccacaatcttgagtttggagcgcatcacattggcaaggcaatggcacattgtgacaaagctacaactgtatccgatacatactcgaaggaagtggccggacatggagctattgcacctcactactataaattccatggaattcgaaatggaattgatcctgatatttgggatccatatactgacaaatttattccggtccattatacatcagagaatgttgttgagggcaagagtgctgcaaaaaaggcattgcagcagatgcttggattacagcaaactgatacccctgttgttggaatcatcactcgtctaacagttcagaagggaatccaccttatcaaacatgcaatgcatcgagctcttgaacgcaatggacaggtggttttactgggttctgcaccagatcctcgcatacaaagtgactttacaaatttggccagtaagctgcatggtgaataccatggccgagtgaagctatgtctaacctatgacgagccactgtcacat

SEQ ID NO: 221072 - DNA, 1514 bp, Zea Mays
attgaatatgtggaatgattatagtcaacatcgttcatgatatatcaagaatgtttggaagaggatctcctaggatgaacttgatccaagctgcaactatgaaaaaaatatcccccagatctactactaacaagcgcaagaagagaacatcaccaaaagataaagagaaagagttaaagagagactacaaggctcttaaagaggcaaggcaacaaagcggggtatcatgggatgagaggttgtgtagaatagaagcagaagaacccatttggaataacctcaccactagtaacgagagacttaagaagtttcggactaaatctttcccactatttgaggctttaggagagctatatgatggaaatattgctgagggaaccatgaattttacttctattgagccttctcgacctcctgtcacacaaccttgtcaaggtgctgctacacagccttctcaagctgctttcacacttacacaaccttctcaaatcgctttcacacaaccttctctagctgctttcgcacgaccttctcgaaccgcttttagacatccttctctagccgctttcccacagccttctcaagccgcttttgcacagccttctcaaaccattttcacacagccttctgaagccactttcacacagccttctgaagccactttcacacagccttctgaagccactttcacacagccttctcaagccgctttcacacaaccttctcaagctaatatctcacaagccatttgtgatgaagatgatgagctcagagtattggatccaccagcccctgcatcagtgagcaaaagggcaaaaaatgttggtactggtaattcaagaacaagaattaacaagcgtacacaagatgggaatgtggttgagatgatgggaaggtttctagaaatgaaagaaaaacaagctgaggcggatgaaagggccacaactaatgcaaatgaggatgatttccctattcaaacatgcattgctattgtggatggaatggaagagttttctgatgatgagaaggttgattcttatgatgtttttaaggatgcccaaaaccgggccattttcatgactgccaaagatgctacgcgcataaaatggttgaggaagaagattgcaagaacatgatatgatatatgaagctaaagtaatgaaggatgattttgtagtatcgtccagcataaagaaagaaagctgcaatttgtgctattgtcagagatggatatttaactttagcaatttgcaacttttaagtaatctgttaaattaaagatgagatcttgcagacttttcttattacctaatggattctcttattagctgattcaaatctaatcatgcatattgtagtaaggactatgtatgttgaatcaatgactctggttcaattttaaatatcacatgtgttttaagtttcttaattttatggcttatcttctgattttattttcttttatttttatctagcggattttttagtaatatgatcattgtttttaagtgttt

SEQ ID NO: 221073 - DNA, 2207 bp, Zea Mays
cagaaaagcaagccccctataggaatcgaaaaggcacactaagtcaaaatgattccatgttcccgagggaaaatattatcttgtcgatggaggatatgctaacacaccatcattccttgcaccgtatcgtggtgttagatatcacttgaaagaatttggccatggtcaccaacggccaagaaactataaggaattgtttaatcaccgacatgctttattgcggaaccacatagagagagcaataggagttttgaagaagcgttttctcattctaaaagttggaacacaccacccaattaggaaccaagtgaaaatagcagctgcggcagtgttgttccataatattatacggatgcacaacggggatgaaggttggttgaatagccaaacaagtaacatatcgccagaaacttttgttgatcttcctggaggagacaattactatagcaatgatgttgtgtcacttaatagccaagtggataatgggaactctgttagagatatgattgcattgaatatgtggaatgattatagtcaacatcgttcatgatatatcaagaatgtttggaagaggatctcctaggatgaacttgatccaagctgcaactatgaaaaaaatatcccccagatctactactaacaagcgcaagaagagaacatcaccaaaagttggtcgtcttagagcaaactggaatagtggactagaaaagggtttagttgaaattcttcaagatcacaacaatgattgttataagggtcaaaatgggtggtcatcggaagcatggaatagaattgtcaagttattccatgagaaattctcttatgtcacatttacaaaatgccaaatccaagataaagagaaagagttaaagagagactacaaggctcttaaagaggcaaggcaacaaagcggggtatcatgggatgagaggttgtgtagaatagaagcagaagaacccatttggaataacctcaccactagtaacgagagacttaagaagtttcggactaaatctttcccactatttgaggctttaggagagctatatgatggaaatattgctgagggaaccatgaattttacttctattgagccttctcgacctcctgtcacacaaccttgtcaaggtgctgctacacagccttctcaagctgctttcacacttacacaaccttctcaaatcgctttcacacaaccttctctagctgctttcgcacgaccttctcgaaccgcttttagacatccttctctagccgctttcccacagccttctcaagccgcttttgcacagccttctcaaaccattttcacacagccttctgaagccactttcacacagccttctgaagccactttcacacagccttctgaagccactttcacacagccttctcaagccgctttcacacaaccttctcaagctaatatctcacaagccatttgtgatgaagatgatgagctcagagtattggatccaccagcccctgcatcagtgagcaaaagggcaaaaaatgttggtactggtaattcaagaacaagaattaacaagcgtacacaagatgggaatgtggttgagatgatgggaaggtttctagaaatgaaagaaaaacaagctgaggcggatgaaagggccacaactaatgcaaatgaggatgatttccctattcaaacatgcattgctattgtggatggaatggaagagttttctgatgatgagaaggttgattcttatgatgtttttaaggatgcccaaaaccgggccattttcatgactgccaaagatgctacgcgcataaaatggttgaggaagaagattgcaagaacatgatatgatatatgaagctaaagtaatgaaggatgattttgtagtatcgtccagcataaagaaagaaagctgcaatttgtgctattgtcagagatggatatttaactttagcaatttgcaacttttaagtaatctgttaaattaaagatgagatcttgcagacttttcttattacctaatggattctcttattagctgattcaaatctaatcatgcatattgtagtaaggactatgtatgttgaatcaatgactctggttcaattttaaatatcacatgtgttttaagtttcttaattttatggcttatcttctgattttattttcttttatttttatctagcggattttttagtaatatgatcattgtttttaagtgttt

SEQ ID NO: 221074 - DNA, 2090 bp, Zea Mays
ggatgttgggccgatacacgctaatacccggggggcagaaaaatccccacccgaggcgtggaagacaccgtcgctctcctcgcgtgcgagcgccgccactgcatcttcccatcgatctccgccgaccccgcatcttcccatacgagctgtgtttctccaagttcgctgctggccatatcgacgtcgtcatcctcgatccagacgagtgcgtgtgccatctccacgggtcttcgacagatttagcaagaatgtttggaagaggatctcctaggatgaacttgatccaagctgcaactatgaaaaaaatatcccccagatctactactaacaagcgcaagaagagaacatcaccaaaagttggtcgtcttagagcaaactggaatagtggactagaaaagggtttagttgaaattcttcaagatcacaacaatgattgttataagggtcaaaatgggtggtcatcggaagcatggaatagaattgtcaagttattccatgagaaattctcttatgtcacatttacaaaatgccaaatccaagataaagagaaagagttaaagagagactacaaggctcttaaagaggcaaggcaacaaagcggggtatcatgggatgagaggttgtgtagaatagaagcagaagaacccatttggaataacctcaccactagtaacgagagacttaagaagtttcggactaaatctttcccactatttgaggctttaggagagctatatgatggaaatattgctgagggaaccatgaattttacttctattgagccttctcgacctcctgtcacacaaccttgtcaaggtgctgctacacagccttctcaagctgctttcacacttacacaaccttctcaaatcgctttcacacaaccttctctagctgctttcgcacgaccttctcgaaccgcttttagacatccttctctagccgctttcccacagccttctcaagccgcttttgcacagccttctcaaaccattttcacacagccttctgaagccactttcacacagccttctgaagccactttcacacagccttctgaagccactttcacacagccttctcaagccgctttcacacaaccttctcaagctaatatctcacaagccatttgtgatgaagatgatgagctcagagtattggatccaccagcccctgcatcagtgagcaaaagggcaaaaaatgttggtactggtaattcaagaacaagaattaacaagcgtacacaagatgggaatgtggttgagatgatgggaaggtttctagaaatgaaagaaaaacaagctgaggcggatgaaagggccacaactaatgcaaatgaggatgatttccctattcaaacatgcattgctattgtggatggaatggaagagttttctgatgatgagaaggttgattcttatgatgtttttaaggatgcccaaaaccgggccattttcatgactgccaaagatgctacgcgcataaaatggttgaggaagaagattgcaagaacatgatatgctaggctgtgtgtgttttttttctttctttcctcctgaacttgcaaagggcgctatgccacctgtgttcaaatgatacacagcatccaaagagaaagcatgaggaggaaacatgatgcactcctgcctggcaacagatcctccacatgtctgcactcttacatcactggacacactttattcttggcagatagtaatatatgaagctaaagtaatgaaggatgattttgtagtatcgtccagcataaagaaagaaagctgcaatttgtgctattgtcagagatggatatttaactttagcaatttgcaacttttaagtaatctgttaaattaaagatgagatcttgcagacttttcttattacctaatggattctcttattagctgattcaaatctaatcatgcatattgtagtaaggactatgtatgttgaatcaatgactctggttcaattttaaatatcacatgtgttttaagtttcttaattttatggcttatcttctgattttattttcttttatttttatctagcggattttttagtaatatgatcattgtttttaagtgttt

SEQ ID NO: 221075 - DNA, 1907 bp, Zea Mays
ggatgttgggccgatacacgctaatacccggggggcagaaaaatccccacccgaggcgtggaagacaccgtcgctctcctcgcgtgcgagcgccgccactgcatcttcccatcgatctccgccgaccccgcatcttcccatacgagctgtgtttctccaagttcgctgctggccatatcgacgtcgtcatcctcgatccagacgagtgcgtgtgccatctccacgggtcttcgacagatttagcaagaatgtttggaagaggatctcctaggatgaacttgatccaagctgcaactatgaaaaaaatatcccccagatctactactaacaagcgcaagaagagaacatcaccaaaagataaagagaaagagttaaagagagactacaaggctcttaaagaggcaaggcaacaaagcggggtatcatgggatgagaggttgtgtagaatagaagcagaagaacccatttggaataacctcaccactagtaacgagagacttaagaagtttcggactaaatctttcccactatttgaggctttaggagagctatatgatggaaatattgctgagggaaccatgaattttacttctattgagccttctcgacctcctgtcacacaaccttgtcaaggtgctgctacacagccttctcaagctgctttcacacttacacaaccttctcaaatcgctttcacacaaccttctctagctgctttcgcacgaccttctcgaaccgcttttagacatccttctctagccgctttcccacagccttctcaagccgcttttgcacagccttctcaaaccattttcacacagccttctgaagccactttcacacagccttctgaagccactttcacacagccttctgaagccactttcacacagccttctcaagccgctttcacacaaccttctcaagctaatatctcacaagccatttgtgatgaagatgatgagctcagagtattggatccaccagcccctgcatcagtgagcaaaagggcaaaaaatgttggtactggtaattcaagaacaagaattaacaagcgtacacaagatgggaatgtggttgagatgatgggaaggtttctagaaatgaaagaaaaacaagctgaggcggatgaaagggccacaactaatgcaaatgaggatgatttccctattcaaacatgcattgctattgtggatggaatggaagagttttctgatgatgagaaggttgattcttatgatgtttttaaggatgcccaaaaccgggccattttcatgactgccaaagatgctacgcgcataaaatggttgaggaagaagattgcaagaacatgatatgctaggctgtgtgtgttttttttctttctttcctcctgaacttgcaaagggcgctatgccacctgtgttcaaatgatacacagcatccaaagagaaagcatgaggaggaaacatgatgcactcctgcctggcaacagatcctccacatgtctgcactcttacatcactggacacactttattcttggcagatagtaatatatgaagctaaagtaatgaaggatgattttgtagtatcgtccagcataaagaaagaaagctgcaatttgtgctattgtcagagatggatatttaactttagcaatttgcaacttttaagtaatctgttaaattaaagatgagatcttgcagacttttcttattacctaatggattctcttattagctgattcaaatctaatcatgcatattgtagtaaggactatgtatgttgaatcaatgactctggttcaattttaaatatcacatgtgttttaagtttcttaattttatggcttatcttctgattttattttcttttatttttatctagcggattttttagtaatatgatcattgtttttaagtgttt

SEQ ID NO: 221076 - DNA, 2403 bp, Zea Mays
cgtggatgttgggccgatacacgctaatacccggggggcagaaaaatccccacccgaggcgtggaagacaccgtcgctctcctcgcgtgcgagcgccgccactgcatcttcccatcgatctccgccgaccccgcatcttcccatacgagctgtgtttctccaagttcgctgctggccatatcgacgtcgtcatcctcgatccagacgagtgcgtgtgccatctccacgggtcttcgacagatttaggattccatgttcccgagggaaaatattatcttgtcgatggaggatatgctaacacaccatcattccttgcaccgtatcgtggtgttagatatcacttgaaagaatttggccatggtcaccaacggccaagaaactataaggaattgtttaatcaccgacatgctttattgcggaaccacatagagagagcaataggagttttgaagaagcgttttctcattctaaaagttggaacacaccacccaattaggaaccaagtgaaaatagcagctgcggcagtgttgttccataatattatacggatgcacaacggggatgaaggttggttgaatagccaaacaagtaacatatcgccagaaacttttgttgatcttcctggaggagacaattactatagcaatgatgttgtgtcacttaatagccaagtggataatgggaactctgttagagatatgattgcattgaatatgtggaatgattatagtcaacatcgttcatgatatatcaagaatgtttggaagaggatctcctaggatgaacttgatccaagctgcaactatgaaaaaaatatcccccagatctactactaacaagcgcaagaagagaacatcaccaaaagttggtcgtcttagagcaaactggaatagtggactagaaaagggtttagttgaaattcttcaagatcacaacaatgattgttataagggtcaaaatgggtggtcatcggaagcatggaatagaattgtcaagttattccatgagaaattctcttatgtcacatttacaaaatgccaaatccaagataaagagaaagagttaaagagagactacaaggctcttaaagaggcaaggcaacaaagcggggtatcatgggatgagaggttgtgtagaatagaagcagaagaacccatttggaataacctcaccactagtaacgagagacttaagaagtttcggactaaatctttcccactatttgaggctttaggagagctatatgatggaaatattgctgagggaaccatgaattttacttctattgagccttctcgacctcctgtcacacaaccttgtcaaggtgctgctacacagccttctcaagctgctttcacacttacacaaccttctcaaatcgctttcacacaaccttctctagctgctttcgcacgaccttctcgaaccgcttttagacatccttctctagccgctttcccacagccttctcaagccgcttttgcacagccttctcaaaccattttcacacagccttctgaagccactttcacacagccttctgaagccactttcacacagccttctgaagccactttcacacagccttctcaagccgctttcacacaaccttctcaagctaatatctcacaagccatttgtgatgaagatgatgagctcagagtattggatccaccagcccctgcatcagtgagcaaaagggcaaaaaatgttggtactggtaattcaagaacaagaattaacaagcgtacacaagatgggaatgtggttgagatgatgggaaggtttctagaaatgaaagaaaaacaagctgaggcggatgaaagggccacaactaatgcaaatgaggatgatttccctattcaaacatgcattgctattgtggatggaatggaagagttttctgatgatgagaaggttgattcttatgatgtttttaaggatgcccaaaaccgggccattttcatgactgccaaagatgctacgcgcataaaatggttgaggaagaagattgcaagaacatgatatgatatatgaagctaaagtaatgaaggatgattttgtagtatcgtccagcataaagaaagaaagctgcaatttgtgctattgtcagagatggatatttaactttagcaatttgcaacttttaagtaatctgttaaattaaagatgagatcttgcagacttttcttattacctaatggattctcttattagctgattcaaatctaatcatgcatattgtagtaaggactatgtatgttgaatcaatgactctggttcaattttaaatatcacatgtgttttaagtttcttaattttatggcttatcttctgattttattttcttttatttttatctagcggattttttagtaatatgatcattgtttttaagtgttt

SEQ ID NO: 221077 - DNA, 1373 bp, Zea Mays
ggatgttgggccgatacacgctaatacccggggggcagaaaaatccccacccgaggcgtggaagacaccgtcgctctcctcgcgtgcgagcgccgccactgcatcttcccatcgatctccgccgaccccgcatcttcccatacgagctgtgtttctccaagttcgctgctggccatatcgacgtcgtcatcctcgatccagacgagtgcgtgtgccatctccacgggtcttcgacagatttagcaagaatgtttggaagaggatctcctaggatgaacttgatccaagctgcaactatgaaaaaaatatcccccagatctactactaacaagcgcaagaagagaacatcaccaaaagataaagagaaagagttaaagagagactacaaggctcttaaagaggcaaggcaacaaagcggggtatcatgggatgagaggttgtgtagaatagaagcagaagaacccatttggaataacctcaccactagtaacgagagacttaagaagtttcggactaaatctttcccactatttgaggctttaggagagctatatgatggaaatattgctgagggaaccatgaattttacttctattgagccttctcgacctcctgtcacacaaccttgtcaaggtgctgctacacagccttctcaagctgctttcacacttacacaaccttctcaaatcgctttcacacaaccttctctagctgctttcgcacgaccttctcgaaccgcttttagacatccttctctagccgctttcccacagccttctcaagccgcttttgcacagccttctcaaaccattttcacacagccttctgaagccactttcacacagccttctgaagccactttcacacagccttctgaagccactttcacacagccttctcaagccgctttcacacaaccttctcaagctaatatctcacaagccatttgtgatgaagatgatgagctcagagtattggatccaccagcccctgcatcagtgagcaaaagggcaaaaaatgttggtactggtaattcaagaacaagaattaacaagcgtacacaagatgggaatgtggttgagatgatgggaaggtttctagaaatgaaagaaaaacaagctgaggcggatgaaagggccacaactaatgcaaatgaggatgatttccctattcaaacatgcattgctattgtggatggaatggaagagttttctgatgatgagaaggttgattcttatgatgtttttaaggatgcccaaaaccgggccattttcatgactgccaaagatgctacgcgcataaaatggttgaggaagaagattgcaagaacatgatatggctgtgtgtgttttttttctttctttcctcctgaa

SEQ ID NO: 221078 - DNA, 3443 bp, Zea Mays
ctcaaacaaattattatttctgaaatgtatttttatggatgtttgcatacatatctagataggggtgcttacggcttaccattatgccttagctctagatgttgttcttgttacccatggtggcagcatcaactgaacgcatctctcacccccctgttgctgaacccagagagtggtattaggtaacttaagtatccgttaggtgacaaggataaggttacctttctatgtatgtcttgggcggcaaaaaaaatccatgcatttcttgaaattaatacatatacattaaaattgtgtgcacagtgattgatatattttcttggtttatatttagtctatgaacatactcttcaaatctttgtgtattttaaacattgttctgatattaagaaaatattaccctatatgaagttggttttgaattttttattcattctggtgagctgatgtttcgaagttgtatacatgttttaggcttcaatatttacttttaacttcccaaacaactgcataaattaatgtttatcactcttccattgcatcctcaaatgttttctgtttgtagcactgaacatcatcagtttactaaagtattgacctgcactctaaagtttgaaatatctatcttacttgctatgttggactttgccacagtgactggtataatcttgagaaatctaaacgtgtgaagtcatttcggtgtggagaatatgatgaatgtatagaaaaagccaaggctctagctcgccagcaaaagaggacacatgctgaagggagatatgttcgcagagaggatgccattttgcatgcccttgaaattgaaaggtcccatttttcaaataactgtgatgattttgaagaggagaccggcaatgatttgtgtgcatcccagaatatgtgttctgcaaaatctataaatataaatgggctcagcaaaaaatctcgtggtgcaaggagtttgtatgatacagaagaaaattcagctcaagagtcatgtcaaacattgacactttataaaaagccacaaaatttatcctcttcgagcactaggtatgcatcgtcaaaaaggaagaagcggaagggacataaaaatcatgaggatgatacagttcaaggattccagcgtatgagagatcttagggagattggaacaaacaatgttcccaagcagaagtctggtgcaggaattgtttcagatgtacctcttcttgaaagtggaccaagctttgactatgatttgtccagtgccaatgggataaaaaagggtaagcagtctcagacatccataaaaaagaaacggtccaatatcgggcaatcctgtgatagtttgagtaagaaagataggcatcaccctctatcaatgttatgtgaagattcagaagtgtctggaacttattatcattgggaccgttcaggccagtcttctagtgagtacctaggaggacagatacccaatttgtttgaatcaagtagggcaaaaactagtctttcaactgatgtaaataattgttcgtatagctcaggcacttcaagtttggagatattattagatacatcacacatcaaacataaaggttcggtaaatgctgttactctcaaggttgctgacccatgcacgactagaattctcaatgatgactgccctgattgtgatgagtttcttgctgccgatactttggagggtgatgttctggaggaaggccatttggatacttatggatcttgtgcatccataaaggatcaaatttcaaaactgggtaatcaaagtactggctgtgccataggtggcacaccctcaacttggcataatagaaattccgagaagaaaagcataacgtctgtcaacttgattcctaaagagagccacaagagggataaaaattcactgttgcaatgtgaagggattataaaatcggaaggtactatccttcggcctgctgaacttgaggataatacaaaacataccactcctgagcatgacgagtcctctgaaactataagcaaccattcaaactctgagaagggcacaaaatcattacccaattactttccacttcaagtactaccaccacctggacagcaacctgatctgaaacttccaagatgccctgtaacgagtccaaccaagagaacgagtccgaccaagagagcacacgcaggttatagattatatgatgttgagctgactgtccaaagaagctacaagggtcatcatgtgccccttgtttccctcatcagtaaatggacaggtaaaccaattgtggggtatcctgtcactgtggaggttttggaggatagtcgtcccacaacaagtagaaatgagcatcgcccgccgatgggtagtctcggctccttaccaaagagcagagttgcagaaccaaggcaagcaagatcttcacccgcatcacgatcaaaatcaaaacccagtggacgtaaaaaggcctcagaacatgatttggacaagtcttggcggccccatatcaagaaaccagcatcttcgccgaggaaaatgcggaggctgtcatctttcgccggcagccggagagagagtgcagaccagaagcctgtagttgtgaaggctggcggaccagcagtcgcgtgtgtcccgcttcgacttgttttgagtaggatcaatgaagcactaagcttcccgttgagacaagaaaaccccacctgaggctgtggcagttttgcattgctgagatagaatgtgggcaggcatatacatttgctaggttttctttgtacattagttaccatattatctgaaagcgtattgcctggcatatttatatcagtatattatgatgtaatctgtagccacactaggcaattacgacttacccaccgtgagatatgggccgaacatccaatggtgggaggaaataaaggggcatcagttgctgtgggctgtggcttcatctgacagtggaagcaaaaatggcagcagacctgttcaccataccatacatcatacaaaattttccccgtatttgctggcaacttttagttgatccaggcaagttgctgtatgtaatcagtgattgcaaggattgcagggcttcgtgcaactacttgcagctttgagtgagttgtagattcttttatgtgccaattctctagtgttgatgctggtcactaccaggcatctctagtgttgatgctggtctctacggtgtagatgcttatatatatatgctaattctgtgacatcaccggtgcagtttttttgtcacatcgcataaggtcgaggtatccaaactttggcatgggagagcacttgtgcatttgcagagatgccatgtgggcatgcattccagtgagagaagctgtccgtacctcgtatgcaaccaggtcagataatgttctacatgatacgatcactcgtgtgattggttatgcagttgctcgtatgcgaagccaataattttgcgacaatctat

SEQ ID NO: 221079 - DNA, 3135 bp, Zea Mays
tcctattgccctctgtaatcactctgttatgctccttgttcatgcgttgattccgctggctcccgatgatctgttgctactactgtttgtacttggtctaatggtcattggatcactcatgttgtgttcactttcaagtcgggcaaataataattttttgggtgggacttttggtttaagtacaatgggaacttcgaaagggagggtactgtgtatgttggattgatcttagggcctccacgaagtgtatagctacctcaaacaaattattatttctgaaatgtatttttatggatgtttgcatacatatctagataggggtgcttacggcttaccattatgccttagctctagatgttgttcttgttacccatggtggcagcatcaactgaacgcatctctcacccccctgttgctgaacccagagagtgtgactggtataatcttgagaaatctaaacgtgtgaagtcatttcggtgtggagaatatgatgaatgtatagaaaaagccaaggctctagctcgccagcaaaagaggacacatgctgaagggagatatgttcgcagagaggatgccattttgcatgcccttgaaattgaaaggtcccatttttcaaataactgtgatgattttgaagaggagaccggcaatgatttgtgtgcatcccagaatatgtgttctgcaaaatctataaatataaatgggctcagcaaaaaatctcgtggtgcaaggagtttgtatgatacagaagaaaattcagctcaagagtcatgtcaaacattgacactttataaaaagccacaaaatttatcctcttcgagcactaggtatgcatcgtcaaaaaggaagaagcggaagggacataaaaatcatgaggatgatacagttcaaggattccagcgtatgagagatcttagggagattggaacaaacaatgttcccaagcagaagtctggtgcaggaattgtttcagatgtacctcttcttgaaagtggaccaagctttgactatgatttgtccagtgccaatgggataaaaaagggtaagcagtctcagacatccataaaaaagaaacggtccaatatcgggcaatcctgtgatagtttgagtaagaaagataggcatcaccctctatcaatgttatgtgaagattcagaagtgtctggaacttattatcattgggaccgttcaggccagtcttctactcaggcacttcaagtttggagatattattagatacatcacacatcaaacataaaggttcggtaaatgctgttactctcaaggttgctgacccatgcacgactagaattctcaatgatgactgccctgattgtgatgagtttcttgctgccgatactttggagggtgatgttctggaggaaggtaaaggccatttggatacttatggatcttgtgcatccataaaggatcaaatttcaaaactgggtaatcaaagtactggctgtgccataggtggcacaccctcaacttggcataatagaaattccgagaagaaaagcataacgtctgtcaacttgattcctaaagagagccacaagagggataaaaattcactgttgcaatgtgaagggattataaaatcggaaggtactatccttcggcctgctgaacttgaggataatacaaaacataccactcctgagcatgacgagtcctctgaaactataagcaaccattcaaactctgagaagggcacaaaatcattacccaattactttccacttcaagtactaccaccacctggacagcaacctgatctgaaacttccaagatgccctgtaacgagtccaaccaagagaacgagtccgaccaagagagcacacgcaggttatagattatatgatgttgagctgactgtccaaagaagctacaagggtcatcatgtgccccttgtttccctcatcagtaaatggacaggtaaaccaattgtggggtatcctgtcactgtggaggttttggaggatagtcgtcccacaacaagtagaaatgagcatcgcccgccgatgggtagtctcggctccttaccaaagagcagagttgcagaaccaaggcaagcaagatcttcacccgcatcacgatcaaaatcaaaacccagtggacgtaaaaaggcctcagaacatgatttggacaagtcttggcggccccatatcaagaaaccagcatcttcgccgaggaaaatgcggaggctgtcatctttcgccggcagccggagagagagtgcagaccagaagcctgtagttgtgaaggctggcggaccagcagtcgcgtgtgtcccgcttcgacttgttttgagtaggatcaatgaagcactaagcttcccgttgagacaagaaaaccccacctgaggctgtggcagttttgcattgctgagatagaatgtgggcaggcatatacatttgctaggttttctttgtacattagttaccatattatctgaaagcgtattgcctggcatatttatatcagtatattatgatgtaatctgtagccacactaggcaattacgacttacccaccgtgagatatgggccgaacatccaatggtgggaggaaataaaggggcatcagttgctgtgggctgtggcttcatctgacagtggaagcaaaaatggcagcagacctgttcaccataccatacatcatacaaaattttccccgtatttgctggcaacttttagttgatccaggcaagttgctgtatgtaatcagtgattgcaaggattgcagggcttcgtgcaactacttgcagctttgagtgagttgtagattcttttatgtgccaattctctagtgttgatgctggtcactaccaggcatctctagtgttgatgctggtctctacggtgtagatgcttatatatatatgctaattctgtgacatcaccggtgcagtttttttgtcacatcgcataaggtcgaggtatccaaactttggcatgggagagcacttgtgcatttgcagagatgccatgtgggcatgcattccagtgagagaagctgtccgtacctcgtatgcaaccaggtcagataatgttctacatgatacgatcactcgtgtgattggttatgcagttgctcgtatgcgaagccaataattttgcgacaatctat

SEQ ID NO: 221080 - DNA, 956 bp, Zea Mays
ctcacggctcctggaagtgccacgtctgccataagctcaatcaacctgctgcgccaccacttggattgtcatatgcttgacctcgttgatgcattgtgaagtcctcttggattcagcatgtagaggttctagcattcgactgttggctgggtgctaagctgggatttgtacttgagtgcatgtgatgtttatgaactcccattaccggtgtctatccgtgctttcgctttgtttgtatcctccgttacctttgttcatgtagcttgtctgacttccactgcgtggtggatatatgtctgaacatttgtagctactttgcgttgcactgtgtttctgatgaaagttacaggttactggtcacttctatagaacccaaaaaaaacaaggatgcaaattcgtcctgatttttattttctttattttagtataaagtagaagggcaggcatgatgtcggtgtgtcgagtaagccaaaagatcccgagttcgacgcagtattgtaatgcttgcctcggttatttcttctctagacttagaagccattttagtttaaggtaactagtagatttgtgagccgtccgatgtgctcatgccgatatcctgtcccgaggaaagttccactgtttttccacttaacttcaaatacaggtaccttttcttttttctttaccagtgcctggcatggtgtagttgtgccatgttccccgaggcccttttgccgctgtggttggattcatcttccattaggagctggaagcgacgcaacggagtattcttctcttattcagaatacttttctggttcatggaaatgagtggcagtaaccatctcaatgtgctgggattgattctgtgcctttcctcgtcgcaatggttttttgccaacactggcattggggttctctagtcttgaaaattttggctggtttggactttttggttcgtgaagtggatggtct

SEQ ID NO: 221081 - DNA, 1276 bp, Zea Mays
tcgcagcttctctagagaactttctcatctttttttttttggaattgagaaaagttatccttagcacctcatttggccatagtttctgaatatggatccaaatgacctcacctaccataaactgcatgtgctctttttatatatatattttgtatatatatgcttcttgtgagcagtgttaattgattttattttatgttgcagttgagattccccaggaaattggtacacttgcgaacatgcaaaggcttgttttggctggtaatttgattgaaatcatcccagctaacattggatacctgcagaatcttaaaatcctcacacttgaccgaaataggatatctatcttgcctgaagaattgggttcactgtcaaaccttcagcaactttctgttcctcaaaattttttactgtgcctgcctaagagcataggagatttgcgcaatatgtcagtactcaatgtatctgataacaaactaaaggaacttccagaatcaattggaggttgcagttccctggaagaatttcaagccaatggtattatgaaccggatatttgttgtccagttacaacaaaactgcaacagcctgtcacccaacctgaactctgcattttcagcttccacaaaacttactgaaagactgcacggctcttcagagtttatccctgcacgacaacccaatcacaatggaccagttccaacaaatggatggatttggagagtttgaggcgcgcagaaggaagaaattcgacaagcagattgattcaggggtcatgatgggctcgacggccctggatgaaggggttgatttccactgattttagaactcgagtgtctcccattctttctagttggtcaggagtcaggaccgattgtagatttgtagatatcagtctcaacctacaaaacagggttcaccaaaccggttgtaaggtgaaaaccggcgcccagtgaaaactggtaaaaactggccgaaatcaaaatcaccccacttttcaatttgaaacggtttgaaaccgataaatcggctcattaatcggctcctaggctgattaaccggcgtcatagaagcagaaaccgatccatatgtatttttgcaaataaagcacattgagatctcataatttgaataaaagatgaccacaaatattatcacaagtctaatgacaacatttagtagttcaaatacattatatgacattgtttcatgattcgcaaacaacatcaaaaatataaatacatgtttcattgttcacagttgttactgttcctatg

SEQ ID NO: 221082 - DNA, 970 bp, Zea Mays
agttgagattccccaggaaattggtacacttgcgaacatgcaaaggctttgggttcactgtcaaaccttcagcaactttctgttcctcaaaattttttactgtgcctgcctaagagcataggagatttgcgcaatatgtcagtactcaatgtatctgataacaaactaaaggaacttccagaatcaattggaggttgcagttccctggaagaatttcaagccaatggaaatgctattgaagatgtgccagcgtcaatttgcaacctagtttgcctgaaatccttatcactgaacggcaacaaaattcgacagcttccacaaaacttactgaaagactgcacggctcttcagagtttatccctgcacgacaacccaatcacaatggaccagttccaacaaatggatggatttggagagtttgaggcgcgcagaaggaagaaattcgacaagcagattgattcaggggtcatgatgggctcgacggccctggatgaaggggttgatttccactgattttagaactcgagtgtctcccattctttctagttggtcaggagtcaggaccgattgtagatttgtagatatcagtctcaacctacaaaacagggttcaccaaaccggttgtaaggtgaaaaccggcgcccagtgaaaactggtaaaaactggccgaaatcaaaatcaccccacttttcaatttgaaacggtttgaaaccgataaatcggctcattaatcggctcctaggctgattaaccggcgtcatagaagcagaaaccgatccatatgtatttttgcaaataaagcacattgagatctcataatttgaataaaagatgaccacaaatattatcacaagtctaatgacaacatttagtagttcaaatacattatatgacattgtttcatgattcgcaaacaacatcaaaaatataaatacatgtttcattgttcacagttgttactgttcctatg

SEQ ID NO: 221083 - DNA, 1296 bp, Zea Mays
cgcgtttgaaagaattgttgcctgcggcaaaggcaagaagattgcgctgttcttggattacgatggaaccctctcgccaattgtcgatgaacctgacaatgctgtcatgtctgatcagatgcgggaggtggtgaggagtgctgcactgcatcttcccactgcgattatcagcggaagatcttgcgataaggtgtttgattttgttagactcaccgaactgtactatgctggtagccacgggatggacatcatgggtccagtgggaaaaactggttctgtcactgaccatagaagcagaggcactaactccagtaagaagcaggacaaggagatgcagatctttcaggctgctagcgaattcttaccaatgatcgacgaggtgtttggattgctcgtcgataaggttagggggattgacggcgcgcgagttgaaaacaacaaattctgcgtgtcggtgcactaccgcaatgttaacgagaaggactgggcgctcgttgcacggtgcacagacgacgtcctgaaagcctaccctcgcctccgactgagtcatggacgaaaggttttagaagttcgtccgatggtagactggaacaaggggaaggctgtggagttcttgctggactccctggggctagctgactccgacgaggtgctccctatctacatcggagatgaccgaacggacgaggacgcgttcaaggtccgtggtcaatttggttctttccttgtcatgttagaaaatggacttcgatgctttaaaacctgcaggttctacggggaaacaaacggggtttggggattttggtgtcatctgtaccgaaggaatctcaggcgttgtactccctgttggatccacctgaggtcatggacttcctgaagagactagtgaaatggaaggaggaagaagaagcacaacgaataacagtcaagcagttgttagtatctgttgatgactttagggttaacctctgacaaagagggactagggaactcgactgcacctgatgccaattctgcagtctatagccaatctcttcattgtagcctagtaatacattactgcatggtatctcttcattggatgccaagaggcccaggaagaagaatgtgaaggtgtttaggcccaactgggtgcattaatatcttgtttagtctttatatagacagcagtgtccggttaattgatccaacgaagtagctgtttgcaattgcggtgttactttcttgaagtaatagcaaacaaaaatcatgcacccaaaatgttacacatggatgtataaaaatagcacacggata

SEQ ID NO: 221084 - DNA, 578 bp, Zea Mays
atgacctggccgacttcaagtgtggcatggcgcatctgttctggtccatctgctccatggaggcacaccatagaaggacctgatgacatgccagcacatatcaaatcatcaatgtttggttgttccctgatgattcctatcaccaatggacgtctcaacatgggaacttggcagggtatttggctctgtgaacatcgagattatgctactcctcgacagattgtgatcacgctgaatgggatctagcctaaggtgatctatgttaagagctggaaatgcaatgcagcgacttcgacatgtttaaatcagatgcactgaaactgaaactgtctttggcccagttgtgataggcgttccagtggagaatgttatttgtaatatgatgctagcatgaggggaacaaaatctcttaacgagcttcttctcatgttgagcttgtttagttatctttggtggtttaaagaaatggtttataagttgttagtgtcgtttggttcacgaaatgtaacgtaaatggtaatgataatgattcacactcaaataccgacggtaacaagtttgaataagttgatatctat

SEQ ID NO: 221085 - DNA, 621 bp, Zea Mays
gggaatgacctggccgacttcaagtgtggcatggcgcatctgttctgttgacactgaaacatttcttagtcgcattgttccagagggtccatctgctccatggaggcacaccatagaaggacctgatgacatgccagcacatatcaaatcatcaatgtttggttgttccctgatgattcctatcaccaatggacgtctcaacatgggaacttggcagggtatttggctctgtgaacatcgagattatgctactcctcgacagattgtgatcacgctgaatgggatctagcctaaggtgatctatgttaagagctggaaatgcaatgcagcgacttcgacatgtttaaatcagatgcactgaaactgaaactgtctttggcccagttgtgataggcgttccagtggagaatgttatttgtaatatgatgctagcatgaggggaacaaaatctcttaacgagcttcttctcatgttgagcttgtttagttatctttggtggtttaaagaaatggtttataagttgttagtgtcgtttggttcacgaaatgtaacgtaaatggtaatgataatgattcacactcaaataccgacggtaacaagtttgaataagttgatatctat

SEQ ID NO: 221086 - DNA, 3485 bp, Zea Mays
atgggcggccgaggtggcggggaggaggagggggtggcggacggcggccggcatgggcggaggacgaacgtcggcggcggcggaggggaggacagcagggacgaggggtggcggcggtggtcggtgctggtggcgacggtgtggatccaggcgctgacggggaccaacttcgacttctcggcctactcgtcggcgctcaagtcgtcgctgggtgtctcgcaggaggcgctcaactgcctggccacggcgtcggacctgggcaaggcgctggggtggtcgtcgggcctggcgctgctccacatgccgctccatgccgttctcatggtctccgccgcgatggggctcgccgcctacgccgtgcagtactactgcctggcgttcgccggcggccctgctgcgggagcgggagcgtcgtcgtccgtggccgtcccctaccctctggtgttcttggtctgcttgatagcagggtgcagcatctgctggttcaacacggtctgcttcgttctctgcatccgcagcttctctgcgagcaaccgctccctagccctctccctctcaataagcttcaacggactcagcgctgccttctacactctctttgcgaatgccctctcccctttctccccagctgtctacctcctcctcaatgcaatcctccctcttggtgtctctgttcttgcactcccagcgatcctcctctgccaccaaaatgacggccatgtccaaagtgcgcccaggcatgacgggcgtgtcttcctcggtctctacatcctcgcattcatcaccggcatatatctggtggtctttggatctttcaccgcgaccagctctactgcatgggtcatcctcacaggtgccatggtcctcctcgcccttcctttcatcatccctgcctgctccagttgctcatatgtggatacagatggccctgaccctgcatcgccactaaaccatgatgacccacataagccactcctaataagtaacaatcatcagatggagtccaatgccatgatgcaaaatccaaaggagaaccagatgcagggcaattgttgtggaacagtgatgggcaagggccgcctggcgacactcggtgaagaacacagtgcaaaaaagctcattcggtgtgtggacttttggctctactacacagcctacttctgtggagccactgttggcctggtatacagcaacaacttggggcagattgcgcagtcattgaaccagcagtcacagctcaccatgctccttgctgtctactcatcctgctccttcttcggtcgtcttctctctgcactacctgaccttcacaggaagatgtcacttgctcgcacagggtggcttgctgctgcattggtccccatgccaatggcctttttccttatgtggaagcaacaagatggaagcaccctggtagcaggaacagcactaattggtctaagctcagggttcatctttgctgcagcagtgtcagtgacctccgagctctttggacccaatagtgttggggtgaatcacaacattcttattaccaatatcccgcttggctcactcctctatgggcagattgctgccatggtatacgatgcaaatggccaaaagatgacagtagtggataaccgcactggcattgttgacaccatgactgtgtgcatgggggtgaagtgctactcaaccactttcttcgtgtgggcttgcatcacatttctggggttagcatcaagcatagttctattcatacgaacaaagtcagcttatgacactgctgctagtcggtcaagttgttcagctcaacttgcggctgttggtgcatctacttccatattcaatttggtatccaagctgtttaatgtgccgctacttaatgtcacaacatcctttgttgctgagcagcaggcaaaggatggcaattcgaacactggaggtgaaagagatgaatttttgacgccactagagaaggcaaggcaaccaaagaaggttcttccggcagtgtcaacatccttggctctagctgctggcattggattactggaaatggtagctctgattgttggatctgggaccctgatgaacatcattggtattcctgttgattcaccaatgcgagcaccagcagaacagtttcttacactgagggcacttggtgctccaccgatcatagtggcacttgcagctcagggtgcatttcgtggatttctggatacgaggacaccattgtatgctgtgggtgctggcaacctattaaatgcattacttgatgtggtacttatttttccacttggtctaggagtaagtggtgctgcactggccaccgtgacctctgagtacttgacagcaatcatcctcctttggaagttgaatgatgaagtagatctattgtcatggaatataattgaggatggagtcatccgctacctgaaatctggtggtctactaattggcaggacaattgcagtattcttgacactgacactagctacatccctggctgcaagggaagggcctgttccaatggcgggctatgagatatgcttgcaagtgtggttaacaatttctctgctcaatgatgctctagcccttgctggccaggctctacttgccagcgaatatgcaaaagggaattacaagcaagcccgcacggttttatacagagtcctgcaggttggtggtgtgactggttttgtccttgctgcttccttatttgttggatttggatctttgtccttgctgtttacagatgatccagcagttttagatgttgcacggtctggagtgtggtttgtcaccatttctcagccggtgaatgctattgcattcgtggctgatgggctctactatggtgtttctgactttgcctatgctgcatattccacgttttttgcgggagcggtctcatcaatattcctactattagctgctcctaattatggtctcggtggcatatgggctggtcttactctatttatgagtttgcgtgcagttgctgggttctggaggttagggagcaaaggtggaccttggaatgttatcttatctggtcagatagtaagtaaaacaaagatatgaccagattcgattgttcaattgatctcccaccgctagcaggtcggtagcaagaaatgtgcatcctgctgcaggtcatatatagctgacaagcaatatatagcaaaaaatgtgcatcctgcgtgacagggagctgatgcatctctgtggaagatatacgcttgtagttggtgttggatagctgggctatcttgtggctgttgtaggggctcacagctttcaactgtgttgtaccatatactgtataagaaagatctgttcagttataacgaaagaaagaaaactggcttcaaatagaatacaaaaggctgtgtaacgaaagaaagaaagccgagttcaaatagaaaatcccttcatgtaaatttcgttctggaaatcctccttttgaatgaagctttatccaacattctaggattggtaaa

SEQ ID NO: 221087 - DNA, 1151 bp, Zea Mays
cacttatgtaatgtaacagtgcaagtttgcatccaaattctttatgataatgttgacaatatttggtgataggtgtatttatgccctacatatttgctgtcatgatacaggttcatcttgcatcgactgagccagacatttccgaatatgccgattttcgcattagtggattggaacccagcagggcttgctatactgtgcacttacaaatacggaagcatatcaatgggcctagagtcatacagatatgcttgcaacgtgaaatggctcggggtgagaggaggtgatctgcatcttatccccgaggacgcgtttcaagagctgaagccacgtgatctgcagattgccaaaagcttgatgtcgtcaaagttcctgcaggagagtcacagagctgagctggcgctgatggtggagaggggcaagcgtgcagacatcgaagccctctactcccacgggttcgatttcttggggaagtacatcgcgagaaagatcgtgcagggcgattacatctgacgattggccgctggaatgttagcatggttgcacggaacaatgagctgcatggactgtagtacagtagctatgtccaactgcctgtagactgaaacgatggtctgtatgggaatgtacataaatacaacaagagtagtctaatatcgatcatcatcggccaccgaatcacatgggttttgactctcttgagttctgatgttcagtggcggtgcccggtgtatggtccggcactccggccgatgcagcctgtggatggcaggaccgggaatggatgcagggtgtagggtgtcagtatactacgcaccttgccggcgatcacctccgccatgcctaacctttgccctggcttcatcttcgccgttgcagcctgcttgaggtttgagaggtttcactgcaagtgcagccgtgcaggtacacctgagcgaagatcttgggcactcagcactctggtgtgccccatcggggcaatgtgcgtgagcttcctcaagaacccccgcccaggcggcgaagaaggcaggcacgactggatactgtcttctggccggggtcacgatctgtcatgcaggcacaggcaccggcaccctagggatagcgaccagcagcagctcagagcgtgggggcatggtgatcccagccgc

SEQ ID NO: 221088 - DNA, 1027 bp, Zea Mays
aagtttgcatccaaattctttatgataatgttgacaatatttggtgataggtgtatttatgccctacatatttgctgtcatgatacaggttcatcttgcatcgactgagccagacatttccgaatatgccgattttcgcattagtggattggaacccagcagggcttgctatactgtgcacttacaaatacggaagcatatcaatgggcctagagtcatacagatatgcttgcaacgtgaaatggctcggggtgagaggaggtgatctgcatcttatccccgaggacgcgtttcaagagctgaagccacgtgatctgcagattgccaaaagcttgatgtcgtcaaagttcctgcaggagagtcacagagctgagctggcgctgatggtggagaggggcaagcgtgcagacatcgaagccctctactcccacgggttcgatttcttggggaagtacatcgcgagaaagatcgtgcagggcgattacatctgacgattggccgctggaatgttagcatggttgcacggaacaatgagctgcatggactgtagtacagtagctatgtccaactgcctgtagactgaaacgatggtctgtatgggaatgtacataaatacaacaagagtagtctaatatcgatcatcatcggccaccgaatcacatgggttttgactctcttgagttctgatgttcagtggcggtgcccggtgtatggtccggcactccggccgatgcagcctgtggatggcaggaccgggaatggatgcagggtgtagggtgtcagtatactacgcaccttgccggcgatcacctccgccatgcctaacctttgccctggcttcatcttcgccgttgcagcctgcttgagccgtgcaggtacacctgagcgaagatcttgggcactcagcactctggtgtgccccatcggggcaatgtgcgtgagcttcctcaagaacccccgcccaggcggcgaagaaggcaggcacgactggatactgtcttctggccggggtcacgatctgtcatgc

SEQ ID NO: 221089 - DNA, 446 bp, Zea Mays
aggccttggaactaggcccggtcgctgcggggtgggaaatatcccggaggcacgcaggcaataggccgctcatggattagggcaacagccacaaagggcacgccgcatacgcgtgacaactgtggcacggagaccggattcctcacgcctgctggcgtcgatctcctccggaggctgcttctcaccggtaccttggaccggcagcacagtaggatagcatggcgccacggtggtcgtgcagatgagaacgaagaaggaagaacgaaaacggaacacggacaaagaggacgtacgtgtatgtcgtggctctcttttatgtagagcccgtggatactacatgctagtttatcttcgatcttaaataaaatgtttggtttaagaaatgagctcgtccattatcttctcactttttttatagtctgtggaatagaattcttatagttatg

SEQ ID NO: 221090 - DNA, 421 bp, Zea Mays
aggcccggtcgctgcggggtgggaaatatcccggaggcacgcaggcaataggccgctcatggattagggcaacagccacaaagggcacgccgcatacgcgtgacaactgtggcacggagaccggattcctcacgcctgctggcgtcgatctcctccggaggctgcttctcaccggtaccggtacgtaccaaggagtggcgtggccgcgacaggcagctcccccattcgtcgaggcattctatttctcggcgaggacgacaaggcacattcgcacccgatccatccagagaaggaagcgccgtggaatccagcaacaaatcgttgcggttttcttcaatcgttgctggtgcgcgaccgcgacgtgctataaaaaaaaacaaggatgtgcatgcagttccggcctctcccggcccgcggtgcg

SEQ ID NO: 221091 - DNA, 1957 bp, Zea Mays
atggacgcgctgccgcctctgcagcgcgccacgtcgccgccgccccagccccggccccagccgcccgtgccgtccaggaggtacggcgtgcacttctcggcgtccagcttcatccaggcgccgctcaccacgctgctcgagtactccggcatcctccgccccgatccaggcggcggaacccagcaggatggggccggggctgggccgggcgaggtgtcgatccggattgtggcgcccggcgaggcggggacgtcgtctgagaggcccgaggaggtgatcgtggaggaggaggaagaggatggacacgcaacgagaacgcgcccggaggacccgtcacctgcggctggtggcggggagggcggcagggaatcctcctcatcgtaccagcggtacgacatacagcaggtggccaggtgggtggagcagatactgccattctcactgctgctgctcgtcgtcttcatccgacaacatttgcaaggtttctttgtgacaatttggattgctgcggtgatgttcaagtccaatgatatcctgcgtaagcagactgctctgaagagggagagaaaaattccagttcttgtcgggattacaatattatttgttgttcacgtatctgggttttattggtgttacaagaacggggaccttataagacctctcatgatgcttcctccaaaagaaataccaccattttggcacgcaatattcatcatcttggtgaatgatacaatggtgcgccaaactgctatggttgtcaaatgtttgctgctgatgtactacaagaacagcagaggccgtagctatcgtaggcagggtcagatgctgacgattgtggaatattttctacttttgtaccgcgcattattgcctacacctgtgtggtaccgttttttcctgaacaaggagtatggaagcttattttcgtctctaaccactggcttgtatctcactttcaagttgacatcagtcgtggaaaaggttcaatcatttttgacggcattgagagcgttatctcataaagacttccattgtggctcatatgcaacaagcgagcaggtggctgttgctggagatttgtgcgcgatatgccaagagaagatgcacgttcccatccttttgcgctgcaaacatgtcttctgtgaagattgtgtgtccgaatggttcgagagggagcggacttgcccgctgtgcagggcactggtgaagccagcagacctccggtcgttcggtgacggttcaacaagcctcttcttccagctattctaatctgagagagccaaaagagctgggcaagctggggcgctccaccctgtgcagatgttaggtgtgtgtgtgtgtgtgagtgttgctgctggcaacgcgtgcgagcagtgcggccctgatgcggtgctgggagagtgtacaccgagctgaagctgaaggcgtacatggttttgtattgtgattgtgcatattttcatcccatgtataggcactcgcgggatgcttgagcacctgaggatttttacctgaccttatacgcacaaactactacgtaaatagaaatggcaccataccttcaccattctcacaaaatggtgttagcagttgctgtataacgtgcgtgctgccctgctccggtgatcagcaaaggcccaaaataattgcagagaggaactggaaaggaactccaaggaacaagtaaaatagtgcaggagattctcaacgcccgacgccgacagtcgacagatgatatggttatgcacgcggcagtggaaccaaacatacctgcaccgtagcctgtgccgtgccgccatgacagacggggccggcttcgtcctgaggtgacagctcacaaatgaacagtaaacagatccagcgtgtctttttaatataatgacgggtatatgtttgattggactatggacgtgaaaaatattgttgtggttgtgagctataaaaaaaccgttgtgag

SEQ ID NO: 221092 - DNA, 1952 bp, Zea Mays
cgccgccgcggcgggctcggtctcctctggaagctcccctacggccgcgcgccgtcccgcccgatggacgcgctgccgcctctgcagcgcgccacgtcgccgccgccccagccccggccccagccgcccgtgccgtccaggaggtacggcgtgcacttctcggcgtccagcttcatccaggcgccgctcaccacgctgctcgagtactccggcatcctccgccccgatccaggcggcggaacccagcaggatggggccggggctgggccgggcgaggtgtcgatccggattgtggcgcccggcgaggcggggacgtcgtctgagaggcccgaggaggtgatcgtggaggaggaggaagaggatggacacgcaacgagaacgcgcccggaggacccgtcacctgcggctggtggcggggagggcggcagggaatcctcctcatcgtaccagcggtacgacatacagcaggtggccaggtttctttgtgacaatttggattgctgcggtgatgttcaagtccaatgatatcctgcgtaagcagactgctctgaagagggagagaaaaattccagttcttgtcgggattacaatattatttgttgttcacgtatctgggttttattggtgttacaagaacggggaccttataagacctctcatgatgcttcctccaaaagaaataccaccattttggcacgcaatattcatcatcttggtgaatgatacaatggtgcgccaaactgctatggttgtcaaatgtttgctgctgatgtactacaagaacagcagaggccgtagctatcgtaggcagggtcagatgctgacgattgtggaatattttctacttttgtaccgcgcattattgcctacacctgtgtggtaccgttttttcctgaacaaggagtatggaagcttattttcgtctctaaccactggcttgtatctcactttcaagttgacatcagtcgtggaaaaggttcaatcatttttgacggcattgagagcgttatctcataaagacttccattgtggctcatatgcaacaagcgagcaggtggctgttgctggagatttgtgcgcgatatgccaagagaagatgcacgttcccatccttttgcgctgcaaacatgtcttctgtgaagattgtgtgtccgaatggttcgagagggagcggacttgcccgctgtgcagggcactggtgaagccagcagacctccggtcgttcggtgacggttcaacaagcctcttcttccagctattctaatctgagagagccaaaagagctgggcaagctggggcgctccaccctgtgcagatgttaggtgtgtgtgtgtgtgtgagtgttgctgctggcaacgcgtgcgagcagtgcggccctgatgcggtgctgggagagtgtacaccgagctgaagctgaaggcgtacatggttttgtattgtgattgtgcatattttcatcccatgtataggcactcgcgggatgcttgagcacctgaggatttttacctgaccttatacgcacaaactactacgtaaatagaaatggcaccataccttcaccattctcacaaaatggtgttagcagttgctgtataacgtgcgtgctgccctgctccggtgatcagcaaaggcccaaaataattgcagagaggaactggaaaggaactccaaggaacaagtaaaatagtgcaggagattctcaacgcccgacgccgacagtcgacagatgatatggttatgcacgcggcagtggaaccaaacatacctgcaccgtagcctgtgccgtgccgccatgacagacggggccggcttcgtcctgaggtgacagctcacaaatgaacagtaaacagatccagcgtgtctttttaatataatgacgggtatatgtttgattggactatggacgtgaaaaatattgttgtggttgtgagctataaaaaaaccgttgtgag

SEQ ID NO: 221093 - DNA, 2119 bp, Zea Mays
catttcctcccgtcttctctcgctgcttttcattacctcctcccgcgccgcccgtagtaccgattcgcactcggatggcgtcggcggcgttcaagtccaccacgcgccgcgccctccacgccaccaccacctcccgctccgacccgcccccgtgcccgcgccgcacccgctcgcgctccgtcagcgcggcgccccgcgccgcccacgaggactacgccaacacgcgcaccaacccgctcttcgactccgcggcctccccgtccgcctcgccatctccgccccccggggcggctgctgctactggtgctacctccggccgtggggatgcggcgggccgggagagggggcgtgagccgcggctcaagagcggggggcgcggcggcggtggagggagggcgcggtcggcctccgtcgcgccgccgcagcggcgccacaccgcctcggtggcggactctgctgccgatgtcggcgggaggaaggcttcgcgggcgcggtcggtggccgacgtcgcacgcacctaccggggctccgagaccgatgcagaagccaggggtgtggcaaggaaactgcagtcatggaggagccagcattcagttccagaggggtgccggcaaatggatgaaactacacagtcagaatctagcactgttgtttcttcacctggccatctcgagcatcaggaccactcaactgtcccagtggatccagttctggaaattcctcctgaattcgatccagattctgctgagtttatctctgacattagtgattatgtaacagaatatggaaagaaaaatgttgtggaaatttctcttgagtccaggaacagtgcagcaaaacagcactgggagcaaatggaaatttctcttgagtttgatacagatgcttctgagctggtttcagacacatggcaccatggagcaaaccagcaacggggggaattggaagcttctcttgagtttgatcctgacacctctgagctcgctcctgacataacagaatatacattaaaactaaaacagtcacatgaacgtgctcgaaagcttagggcagatttggcagttgaagagcagcgggaacaagaactgagcagaatgctgaagggcatagtaacagatccaaactttactgagacacataaaaaacggccaagaagaaagagtagcatagaaagactgaaagtgtcaaggcgtttagctgaagaggcaatgaactattttgaggaatgcgtttcaatttcaacaatggatagcactgatttctcatcacctgaggatcctcaaccaaattcagttgtgaatgtcccaccaaagagcaatagtagatttttccacaaagggagatcaatctttcaagaaccccacactctggctgatcaacatggatatcatgtggaatctgacaagcaaactcagtgctcaattagcgcaactggatccgatgtgtctgacagtgttatctttagtcacacaaatggtgctggtttgaaaatcaggagcgtctccagcgatgatcctgatggctttgacactccgcggagcagaagttcttgtttctctttcacccacgagccagtaaaaaagctcgaaaactgcgatgttcggcaataccttgggaatttcggaagggggaacaatacagagctaaaggagacgaggtcaagttattttgccgatgactatgcctcacagaaagttgatccggacttactgaaggatatggtgacctttcagaatcggatagagtatggagggctcgttatatgtaacatcagaacattctgacagtgaacagagccactgtccgaagaagctaagtatagcattgtgcaattatccttttggcgaatgtggttttttggtgactgctataatcttttgtcatgtttctctactaattatcaatgctatgctataatctgtgtggctgtgtgcgtcgtatcttgtatgcgatccacccggattcataatccgtatttctaacgagacagaacaactcctatccagtggtatatattagttagattccttaggccgtgcttagcagatcgtgcaaaactctttttttttactatagactgtattgtttgtatgttggagttccgagttcgaaatttgga

SEQ ID NO: 221094 - DNA, 4979 bp, Zea Mays
cacgcacgggtcccctcttcctcacctttcggtctttcctacccgcacaccagaagcgaaggaaagcccacaactgactgaggcgcacaccatccccaccgccggcgcccgccccgcctcttcgccggcgacgagccgccgccgaggagctcagcgtggaggggcttcctcgcgtgtgggagaagctgccgttttttttcctgagcgggtcgtcgttgccgtgtgccgccgagattagagtttttcaaagggtgtctccttcgcggcactggcctcctcgagttagtttatttggagacagctcgaggctcgcttcggaagcgacccggtcgccgccgccgccgccgccatcggccgtctctccccgtagtcgccgtctcggggctggctgtggtgatgagctccgtcggatcctagggtttttgaattctgagtttctgacggcttcgtcgagctgcgcaaggcgtcaagaaggagatggtgccgggtgggttgttcgggtgggcgtcgccccatgtacagccgctcacacccgtatcggaggtctccgagccgccggagtcgccctcgccgtacggggacgggccggcgggggatgccggcgtgggggcaagggagggggaaggcgctggcgccggagaggaggaggtggaggacgacgaggtcgagccgccgcccgcggcggtgtccttctggaggcttttcgagttcgccgatggggtcgactgggcccttatggctgctggggcgcttgctgctgctgcgcatggcgcggcgctcgttgtgtaccttcactatttcgggagggccctgaatttgctcgactctgagcgggttgggtcgtctctctatggacgcagcgatgagctgctcagccggtttaaggagcatgccttgtatattgtctttatagctgctggtgttttcgtcgcaggatggatagaggtatcatgctggattctcactggggaacgccagactgctgtcatcagatcaaaatacgttcatgttttgctaaatcaagacatgagtttttttgatacatatggtaacaacggagatattgttagtcaagtgctcagtgatgtattgctcattcagtcagctataagcgagaaagtggggaactacatacataatatggctacatttgttggtggtctcattgttggccttctgaattgttggcaaatagcacttctaactcttgccactggacccttgattgttgcagctggaggaatatctaacatattccttcatagactggctgaaaacattcaagatgcatattccgaagcggctagtattggtgaacagtggtttgaatcaagcagctacaaacttctattcattcgaccaagggcgcattgctgcttatagactatatgagatgattagtcgttcaacttccagcaccaatcaagaagggacaaccttaccccaggtgcaagggaatattgagtttcgaaatgtgtactttagctacctgtctcgtcctgaaatcccaatattaagtggtttcttcctcactgtaccggcgagaaaaactgtggcacttgttggtagaaatggctcggggaaaagcagtataattcctctgatggagagattctatgacccaacattaggtgaagttcttttggatggggaaaacataaaaaatttgaaagtagaatggttaagaagccaaattggtctggtgacacaagaaccagccttattgagtttgagcattcgggaaaatattgcttatggaagatctgctacctttgatcagatagaagaggcagcaaaaacagcccatgcccatgggttcatcagttcacttgaaaaggggtacgaaacccaggttggtcgagctggtctagcactcactgatgaacagaaaatcaaaatttctattgctcgtgctgtgctttcgaatccatccattcttttgcttgatgaggtcaccggaggacttgattttgaagctgagaaggctgtacaagaagcattagatgttctgatgttgggaaggtcaaccattataattgctagacgtctttgcctcattaaaaatgctgattatatagctgtaatggaggagggccatcttgttgaaatggggacacatgatgaacttctaaacttggatggcctttatgctgaacttttaaggtgtgaggaagcaacaaaacttcccaaaaggatgcctaccaagaacagcagggaacataagtcgctccaatctgaggatgcattggtgagccaatactttcaagaatcctcctctcctaagatggcaaaatcaccatcactacaaaggacacatggtatgcttcaattttggcgatcagatgccaacagaaactctcatgattcaccaaaggatctaagtccaccttctgaacaaactatggacaatggaatacctatggttgcaattgaaactgaaaggacaccgtccattaagagacagaatagttttgaaatgaaattacctgatcttcctaaagttgatgtacatcctatacagcggcagtcatctaagaattcagaacctgactcacccatatctcctcttttgacttctgatcctaagaacgagcggtcacattcacaaacttttagcagaccgcagagtgaacaagatgatacgagttctgaacgtagtgaactggatgaggttcagcaccagaaacctccatctttttggcgtcttgcaacacttagtatcgctgaatggccttatgctcttttaggtacaattggtgctgctatatttggctcatttaatccactgcttgcttacacaatagcacttatagtgtcagcatactatcagatagaaatccgtgatatgcgccatgaagtgaacagatggtgtttattcatagtgggcatgggtgttattacagtgctagtcaactggctgcaacatttctattttggaataatgggggagaaaatgactgagcgcataagaaggatgatgttctcagcaatgctacgcaatgaagttggatggtttgacaaagatgaaaacaatgctgatacactgtccatgcgcctcgcaaatgatgctacatttgtccgtgctgcgttcagtaaccggctttccatatttatacaagatactgctgcagtatctgtggctctccttattggaatgttgttgggatggcgggtggcacttgttgcacttgcaactttgccagtccttgtcatatctgctattgcacagaaattgtggcttgctggtttctcaaaaggaatccaggaaatgcatagaaaggcttcgttagtacttgaagatgcagtccggaacatatacactgtagtagcattctgtgctggcgataagatcatggaactctacagactacatcttgggaagatactaaaacaaagtcttgtgcaaggattggctataggctttggttttggtctctcccagttcctcctttttgcctgcaatgccttgcttctttggtacactgcaatttcagttgaccgacaacgtctgacaatagccacaggactaaaagagtacattctgttttcgtttgcatcattcgcgttggtggagccatttggactggcaccttacattcttaaaaggagaaaatctcttacgtcagtctttgaaattattgaccgggagccaaaaattgatcctgatgataccaccggcttgaaaccacccaatgtctacggaagcattgaattcaagagtgttgatttttcttatcctgttcgccctgacattcttgtcttgagtaattttaatcttaaagtgagtggtgggcaaacacttgcggtggttggggtctcaggatcagggaaaagcaccattatttctttgattgagagattctatgaccctgtttctggccaagttctgctggatggtcgagatctgaaatcatttaaccttagatggttgcgtagccacatgggcctgattcagcaagatccagttattttctcaacgacgataagagaaaacattatttacgcaaggcacatcgcaacagaggctgagataaaggaagctgcaaggatagcaaatgctcaccatttcatcagcagcttgccacatggatatgacacccatgtgggaatgagaggggtcgatctaacacctgggcaaaagcaacggattgccattgctagggtggttttgaagaatgcacctatactgttgttggatgaggccagctctgcaatcgagtctgaatcaagtagagtggtacaagaagctctcgacactctggttatgggtaacaagacaacgattctcattgcgcacagggcagcaatgatgaagcatgtggataacattgttgtcctaaatggtggtaggatagttgagcagggcacacatgactctctgatggatcagaacggtctatatgttaggttgatgcaaccccattttggcaagggccttcgccagcatcggctagtgtaattattattgagcttgttaggtgtaaattatcctagggcatgatcaggtttacttccgctcttggtgcagccactcagggcccgttttggcacatgaaaaatgctgggaagttgccgccttgctggtgttgttctgagtaagcggaatgcagacctgatcttgacaaaaaaaacctagcttggagattcaggtaagtaactgttggaactgtagggcacaactcattctggaaatagttagcaagtttggatggcattgtaattgttgtaatatgagttgaaacattctttcagaggctcgtgcttgtgatctctcgcatctgtaatgttagtgttttgatcatttaatgtgtgtatattgttcgattcttggtcggtccgagtcttgtagccgtgatgaaaagctttttacatggaaattctgagcttggcgttattttcgtccacgagaccattcagactacgagttgcagatattgaaaattataaccaatttctttttgtttgcaattgattacgag

SEQ ID NO: 221095 - DNA, 4417 bp, Zea Mays
ggcaacttcatctgtgacaagaggggctgaaaaaaacaggacttatgggtctcatctcctcaggggcatgccttgtatattgtctttatagctgctggtgttttcgtcgcaggatggatagaggtatcatgctggattctcactggggaacgccagactgctgtcatcagatcaaaatacgttcatgttttgctaaatcaagacatgagtttttttgatacatatggtaacaacggagatattgttagtcaagtgctcagtgatgtattgctcattcagtcagctataagcgagaaagtggggaactacatacataatatggctacatttgttggtggtctcattgttggccttctgaattgttggcaaatagcacttctaactcttgccactggacccttgattgttgcagctggaggaatatctaacatattccttcatagactggctgaaaacattcaagatgcatattccgaagcggctagtattggtgaacaggccatctcatacatccggacactgtatgcttttacaaatgaaactcttgcaaagtactcctatgctacctcacttcaagccacacttagatatggaattttgattagccttgtccaaggaattggtcttggctttacatatggactcgccatttgctcttgtgctttgcaactttgggttggaagacatctgatccatcgtggaaaagctgatggtggtgaagttgtggtagctttattctctgtaattctgagcggccttggtttgaatcaagcagctacaaacttctattcattcgaccaagggcgcattgctgcttatagactatatgagatgattagtcgttcaacttccagcaccaatcaagaagggacaaccttaccccaggtgcaagggaatattgagtttcgaaatgtgtactttagctacctgtctcgtcctgaaatcccaatattaagtggtttcttcctcactgtaccggcgagaaaaactgtggcacttgttggtagaaatggctcggggaaaagcagtataattcctctgatggagagattctatgacccaacattaggtgaagttcttttggatggggaaaacataaaaaatttgaaagtagaatggttaagaagccaaattggtctggtgacacaagaaccagccttattgagtttgagcattcgggaaaatattgcttatggaagatctgctacctttgatcagatagaagaggcagcaaaaacagcccatgcccatgggttcatcagttcacttgaaaaggggtacgaaacccaggttggtcgagctggtctagcactcactgatgaacagaaaatcaaaatttctattgctcgtgctgtgctttcgaatccatccattcttttgcttgatgaggtcaccggaggacttgattttgaagctgagaaggctgtacaagaagcattagatgttctgatgttgggaaggtcaaccattataattgctagacgtctttgcctcattaaaaatgctgattatatagctgtaatggaggagggccatcttgttgaaatggggacacatgatgaacttctaaacttggatggcctttatgctgaacttttaaggtgtgaggaagcaacaaaacttcccaaaaggatgcctaccaagaacagcagggaacataagtcgctccaatctgaggatgcattggtgagccaatactttcaagaatcctcctctcctaagatggcaaaatcaccatcactacaaaggacacatggtatgcttcaattttggcgatcagatgccaacagaaactctcatgattcaccaaaggatctaagtccaccttctgaacaaactatggacaatggaatacctatggttgcaattgaaactgaaaggacaccgtccattaagagacagaatagttttgaaatgaaattacctgatcttcctaaagttgatgtacatcctatacagcggcagtcatctaagaattcagaacctgactcacccatatctcctcttttgacttctgatcctaagaacgagcggtcacattcacaaacttttagcagaccgcagagtgaacaagatgatacgagttctgaacgtagtgaactggatgaggttcagcaccagaaacctccatctttttggcgtcttgcaacacttagtatcgctgaatggccttatgctcttttaggtacaattggtgctgctatatttggctcatttaatccactgcttgcttacacaatagcacttatagtgtcagcatactatcagatagaaatccgtgatatgcgccatgaagtgaacagatggtgtttattcatagtgggcatgggtgttattacagtgctagtcaactggctgcaacatttctattttggaataatgggggagaaaatgactgagcgcataagaaggatgatgttctcagcaatgctacgcaatgaagttggatggtttgacaaagatgaaaacaatgctgatacactgtccatgcgcctcgcaaatgatgctacatttgtccgtgctgcgttcagtaaccggctttccatatttatacaagatactgctgcagtatctgtggctctccttattggaatgttgttgggatggcgggtggcacttgttgcacttgcaactttgccagtccttgtcatatctgctattgcacagaaattgtggcttgctggtttctcaaaaggaatccaggaaatgcatagaaaggcttcgttagtacttgaagatgcagtccggaacatatacactgtagtagcattctgtgctggcgataagatcatggaactctacagactacatcttgggaagatactaaaacaaagtcttgtgcaaggattggctataggctttggttttggtctctcccagttcctcctttttgcctgcaatgccttgcttctttggtacactgcaatttcagttgaccgacaacgtctgacaatagccacaggactaaaagagtacattctgttttcgtttgcatcattcgcgttggtggagccatttggactggcaccttacattcttaaaaggagaaaatctcttacgtcagtctttgaaattattgaccgggagccaaaaattgatcctgatgataccaccggcttgaaaccacccaatgtctacggaagcattgaattcaagagtgttgatttttcttatcctgttcgccctgacattcttgtcttgagtaattttaatcttaaagtgagtggtgggcaaacacttgcggtggttggggtctcaggatcagggaaaagcaccattatttctttgattgagagattctatgaccctgtttctggccaagttctgctggatggtcgagatctgaaatcatttaaccttagatggttgcgtagccacatgggcctgattcagcaagatccagttattttctcaacgacgataagagaaaacattatttacgcaaggcacatcgcaacagaggctgagataaaggaagctgcaaggatagcaaatgctcaccatttcatcagcagcttgccacatggatatgacacccatgtgggaatgagaggggtcgatctaacacctgggcaaaagcaacggattgccattgctagggtggttttgaagaatgcacctatactgttgttggatgaggccagctctgcaatcgagtctgaatcaagtagagtggtacaagaagctctcgacactctggttatgggtaacaagacaacgattctcattgcgcacagggcagcaatgatgaagcatgtggataacattgttgtcctaaatggtggtaggatagttgagcagggcacacatgactctctgatggatcagaacggtctatatgttaggttgatgcaaccccattttggcaagggccttcgccagcatcggctagtgtaattattattgagcttgttaggtgtaaattatcctagggcatgatcaggtttacttccgctcttggtgcagccactcagggcccgttttggcacatgaaaaatgctgggaagttgccgccttgctggtgttgttctgagtaagcggaatgcagacctgatcttgacaaaaaaaacctagcttggagattcaggtaagtaactgttggaactgtagggcacaactcattctggaaatagttagcaagtttggatggcattgtaattgttgtaatatgagttgaaacattctttcagaggctcgtgcttgtgatctctcgcatctgtaatgttagtgttttgatcatttaatgtgtgtatattgttcgattcttggtcggtccgagtcttgtagccgtgatgaaaagctttttacatggaaattctgagcttggcgttattttcgtccacgagaccattcagactacgagttgcagatattgaaaattataaccaatttctttttgtttgcaattgattacgag

SEQ ID NO: 221096 - DNA, 1791 bp, Zea Mays
agtgtactgaagacatcaaactctagaatattacttttcataaattgtggcttgctggtttctcaaaaggaatccaggaaatgcatagaaaggcttcgttagtacttgaagatgcagtccggaacatatacactgtagtagcattctgtgctggcgataagatcatggaactctacagactacatcttgggaagatactaaaacaaagtcttgtgcaaggattggctataggctttggttttggtctctcccagttcctcctttttgcctgcaatgccttgcttctttggtacactgcaatttcagttgaccgacaacgtctgacaatagccacaggactaaaagagtacattctgttttcgtttgcatcattcgcgttggtggagccatttggactggcaccttacattcttaaaaggagaaaatctcttacgtcagtctttgaaattattgaccgggagccaaaaattgatcctgatgataccaccggcttgaaaccacccaatgtctacggaagcattgaattcaagagtgttgatttttcttatcctgttcgccctgacattcttgtcttgagtaattttaatcttaaagtgagtggtgggcaaacacttgcggtggttggggtctcaggatcagggaaaagcaccattatttctttgattgagagattctatgaccctgtttctggccaagttctgctggatggtcgagatctgaaatcatttaaccttagatggttgcgtagccacatgggcctgattcagcaagatccagttattttctcaacgacgataagagaaaacattatttacgcaaggcacatcgcaacagaggctgagataaaggaagctgcaaggatagcaaatgctcaccatttcatcagcagcttgccacatggatatgacacccatgtgggaatgagaggggtcgatctaacacctgggcaaaagcaacggattgccattgctagggtggttttgaagaatgcacctatactgttgttggatgaggccagctctgcaatcgagtctgaatcaagtagagtggtacaagaagctctcgacactctggttatgggtaacaagacaacgattctcattgcgcacagggcagcaatgatgaagcatgtggataacattgttgtcctaaatggtggtaggatagttgagcagggcacacatgactctctgatggatcagaacggtctatatgttaggttgatgcaaccccattttggcaagggccttcgccagcatcggctagtgtaattattattgagcttgttaggtgtaaattatcctagggcatgatcaggtttacttccgctcttggtgcagccactcagggcccgttttggcacatgaaaaatgctgggaagttgccgccttgctggtgttgttctgagtaagcggaatgcagacctgatcttgacaaaaaaaacctagcttggagattcaggtaagtaactgttggaactgtagggcacaactcattctggaaatagttagcaagtttggatggcattgtaattgttgtaatatgagttgaaacattctttcagaggctcgtgcttgtgatctctcgcatctgtaatgttagtgttttgatcatttaatgtgtgtatattgttcgattcttggtcggtccgagtcttgtagccgtgatgaaaagctttttacatggaaattctgagcttggcgttattttcgtccacgagaccattcagactacgagttgcagatattgaaaattataaccaatttctttttgtttgcaattgattacgag

SEQ ID NO: 221097 - DNA, 2132 bp, Zea Mays
ctagtctctgcatcagagtagtggcctccgagctgctcttcaacacacagattcggcagagcctgccgagagagagtgaaaagagagggagcgcgctcaaggtgtggcgcaaggagatttttcttttatccagcttcttagcatgattctctttgatcccggagagcagccaccggtccaactagtccttgctgttggtctgccggaacttttgattgctctccagatctgaggcacctgctgggtggattccaggaacccgagcacgaagttgacaggtgagttctcagggaaaaaggtgagcccctttttttctctccctccccatccgtccaccattgccaaactgtccgtccgcctacactggacgaacaatagtaatcgtgtagtcttagctccgattgttaagcttcaactgttacctattgtcccttgatctgtttctgccgcctacactggacgacgcttcatgcatacgagatgatgagggaggaaggaagaggctgaaagggcggtggagagagaaagactataagggcgagctgagtcccttgaggatgccgtcaagaaaccgcgtggagaggagggcgatgagatgagggatgctggccgcggtgatggactacttcagctcctgctggggcccgcgatcgggcgccgggcaccggggcaagggctccgacgccgccggccggcaggacggtctcctctggtacaaggacgccggccagctcgtcactggggagttctccatggccgtggtgcaggccaaccagctcctcgaggaccagagccaagtagagtccggatcgctctccctggctgacccgggcccacagggcaccttcgtcggcgtctatgatggccatggcggcccggagacgtcccggttcatcaatgaccacctcttcaaccatctcagaaggtttgcaactgagcacaagtttatgtcagcggacgtgatccggaaagctttccaagcaactgaggagggctttctttctctagtcagcaaggaatggtctttgaagcctcagattgcttcagtgggctcctgctgccttgttggtgtaatctgtgctgggactctctatgttgcaaacgtgggcgactcacgtgcagttcttggaaggcttgttaaggcaactggagaggttgtggccatgcagttgtcatcggagcacaatgcgtgctatgaggaagttagacaagaactgcagtcatcacatcctgacgatccacatattgtggttctcaaacacaatgtttggcgagtgaagggtctcatccagatctcaagatctattggagatgtatatctaaagaaaccagagtacaacagagaaccacttcacagcaagtttcggcttcgagaaaccttccagaggccgatccttagttctgaacctcaaattactgaacatcgaatacagccgaacgatcaatttgttatatttgcttctgatggtctatgggagcacctcagcaataaggaagcagttgaccttgtccaaagtagtccccgaaatggaatcgctcggaggctagtgaaagccgcgatgcaagaagctgccaagaagagggagatgagatactcagacctcaagaagatcgaccgtggtgtgagaaggcatttccacgacgatataactgtcgtcgtggtattcctcgattcggatgccatgagcaaagctagctggagcaaaagcccctcggtttctctccgagggggcggtgtcgccctccctgcgaagtccctcgcacctttctcagctccggcacggctgaacagcacctactgaagttgctaccactcttgaaaggaagaacacagtgcagatctgcagtggtgagagagagagaaaacagcaaccaagtgtagcgttacagttacacctgctgtgttgttgctctttgcaaaactactgtctagactccgcctggtaattagtgtactgatagcgaggtaaaaaagttagattatttgttagcgacacacatcctttcaccttctcttctctccctcgattcctatcccttttctcttcatccttgagagaacaggtggttgtaaattgttcagaacatgttttcccttatagtccatcatatcccgcttttttcgtgttgat

SEQ ID NO: 221098 - DNA, 2214 bp, Zea Mays
ctctgcatcagagtagtggcctccgagctgctcttcaacacacagattcggcagagcctgccgagagagagtgaaaagagagggagcgcgctcaaggtgtggcgcaaggagatttttcttttatccagcttcttagcatgattctctttgatcccggagagcagccaccggtccaactagtccttgctgttggtctgccggaacttttgattgctctccagatctgaggcacctgctgggtggattccaggaacccgagcacgaagttgacaggtgagttctcagggaaaaaggtgagcccctttttttctctccctccccatccgtccaccattgccaaactgtccgtccgcctacactggacgaacaatagtaatcgtgtagtcttagctccgattgttaagcttcaactgttacctattgtcccttgatctgtttctgccgcctacactggacgacgcttcatgcatacgagatgatgagttggccgcaagttttctttgatcccagcataggatccaccagctcacgcgcacacaaaaactattgactttttaactcgctttggttttattggatctgttgtttcggttgcgcaggggaggaaggaagaggctgaaagggcggtggagagagaaagactataagggcgagctgagtcccttgaggatgccgtcaagaaaccgcgtggagaggagggcgatgagatgagggatgctggccgcggtgatggactacttcagctcctgctggggcccgcgatcgggcgccgggcaccggggcaagggctccgacgccgccggccggcaggacggtctcctctggtacaaggacgccggccagctcgtcactggggagttctccatggccgtggtgcaggccaaccagctcctcgaggaccagagccaagtagagtccggatcgctctccctggctgacccgggcccacagggcaccttcgtcggcgtctatgatggccatggcggcccggagacgtcccggttcatcaatgaccacctcttcaaccatctcagaacggacgtgatccggaaagctttccaagcaactgaggagggctttctttctctagtcagcaaggaatggtctttgaagcctcagattgcttcagtgggctcctgctgccttgttggtgtaatctgtgctgggactctctatgttgcaaacgtgggcgactcacgtgcagttcttggaaggcttgttaaggcaactggagaggttgtggccatgcagttgtcatcggagcacaatgcgtgctatgaggaagttagacaagaactgcagtcatcacatcctgacgatccacatattgtggttctcaaacacaatgtttggcgagtgaagggtctcatccagatctcaagatctattggagatgtatatctaaagaaaccagagtacaacagagaaccacttcacagcaagtttcggcttcgagaaaccttccagaggccgatccttagttctgaacctcaaattactgaacatcgaatacagccgaacgatcaatttgttatatttgcttctgatggtctatgggagcacctcagcaataaggaagcagttgaccttgtccaaagtagtccccgaaatggaatcgctcggaggctagtgaaagccgcgatgcaagaagctgccaagaagagggagatgagatactcagacctcaagaagatcgaccgtggtgtgagaaggcatttccacgacgatataactgtcgtcgtggtattcctcgattcggatgccatgagcaaagctagctggagcaaaagcccctcggtttctctccgagggggcggtgtcgccctccctgcgaagtccctcgcacctttctcagctccggcacggctgaacagcacctactgaagttgctaccactcttgaaaggaagaacacagtgcagatctgcagtggtgagagagagagaaaacagcaaccaagtgtagcgttacagttacacctgctgtgttgttgctctttgcaaaactactgtctagactccgcctggtaattagtgtactgatagcgaggtaaaaaagttagattatttgttagcgacacacatcctttcaccttctcttctctccctcgattcctatcccttttctcttcatccttgagagaacaggtggttgtaaattgttcagaacatgttttcccttatagtccatcatatcccgcttttttcgtgttgat

SEQ ID NO: 221099 - DNA, 1745 bp, Zea Mays
atttactgcaggtagacatatgttggtatctacctttccgttgcaattaatctgtgctttttagccttttacaagatttacaaaatgtcgatgtatagttgacatttgttgaaaaagtatttttcctatagccttcttttatttgtctcatcatgtgaaaaaataaaataaaatcctcagacatcttccatagcttgaattttattggtggtaatgtaattcctcttacgcttatcaatgcaagacacagtttgatttttgtggctgtagattttctagcagccatgctcatccgagcgactgggcatgaactcgaaatggcacggaacagaagtttgaagtcacttgacctcacaaaggcagtaaaggatacagttaatgtaagcgctggagatgttgcttctctcatatatttgtggaacccttgggcaatagtcacttgtgtgggatcatgtacatcaccaatcgagaatctaatggttgtaataatgatctacggatcctgttcacgtctggctcctcttgctgcttttggatatgttatggccacacacctctctctttatcctgcaattctcatagtaccggtcattctgttgctgggttatggtctagatgctcctcctccaaaagtatttgttataaaagggtcaattgccagaaaaagtgatgtgtcagacaatgataaaacaagcagacagagagttgttcagcagttttcatggaaaccagtacttcactttatattttggctgttcatctggtcgtgccatgtgttgttattgagcagcgtgattttgaagaaagttggtggcctccacgagatgtttgaaaagacgtatggttttatacttacagtgaaagacctatcaccaaatattggtgttttgtggtacttctttgctgaagttttcgacttctttagaaatttctttcttatggtattcaatatgaacatcatttttatggtcttaccattggccatccgattgaaacatcgtccgtgctttcttgcatttgtttacacggcaattgtggcaatattgaaatcttatccatcggctggagattcagccctgtatcttggtcttctgggcttatttgtcaacgaattagcagaaatgcagttcacattcttcttgttttttggatatattggagtctccctacttagccctgtcatgcataatctgtggatctggaggggcactggtaatgcaaatttctacttcgccactggtttggcttatacttgccttcagactgtgttgctggtagagagtgtaagttcaatgataaagcacgacagaaagttaaggctacttgttacaagctaatttggtcctcataatcagaagctcaagtggtggacagctccgatgcttgcaattccctacatggtgctcttgattcttgaacacaaacagctcctcatcttggagttcgtagatgtaggtcatattcgatgtagcatgttgtactgtagaccccacacttgtacaatactaggaccgcaactctttcaacaaagacaaggaacacggtagggctcgtccttggtgactagtacgtagttgtgttcgctaccgagaattgttgtggatcctggctgtgatgttcagtgatccagcttggttgaactgccctcacgtacatttaattccgtcagtctgatggatcaacaaggaaaccaacatttgaacgtttaaccaaactgatatctaattttcgtttcttcgggccag

SEQ ID NO: 221100 - DNA, 1856 bp, Zea Mays
cttgatcggtccaaattgaaaaaacagactccggccacagccgagacgagactagcagcagccgcttgctcagatcggcagcttcggcggcggcggagatggcgattcggtactggccgatggccggagcagccgttgggttccgcctcgtcctggttctcttcggcggggatctccaccttgcctctcgccctgaggtctccacccccctcacctcccttcgccgcctggcggaaggctactggctgaagcaagcgtccgtgtcaccgtactccggttctatgtatcacggttccccattgctcctgtctgttcttggtccattaactagtagcaggcctgacggacatcatgctcatatttactgcagattttctagcagccatgctcatccgagcgactgggcatgaactcgaaatggcacggaacagaagtttgaagtcacttgacctcacaaaggcagtaaaggatacagttaatgtaagcgctggagatgttgcttctctcatatatttgtggaacccttgggcaatagtcacttgtgtgggatcatgtacatcaccaatcgagaatctaatggttgtaataatgatctacggatcctgttcacgtctggctcctcttgctgcttttggatatgttatggccacacacctctctctttatcctgcaattctcatagtaccggtcattctgttgctgggttatggtctagatgctcctcctccaaaagtatttgttataaaagggtcaattgccagaaaaagtgatgtgtcagacaatgataaaacaagcagacagagagttgttcagcagttttcatggaaaccagtacttcactttatattttggctgttcatctggtcgtgccatgtgttgttattgagcagcgtgattttgaagaaagttggtggcctccacgagatgtttgaaaagacgtatggttttatacttacagtgaaagacctatcaccaaatattggtgttttgtgaatgactgcaggtacttctttgctgaagttttcgacttctttagaaatttctttcttatggtattcaatatgaacatcatttttatggtcttaccattggccatccgattgaaacatcgtccgtgctttcttgcatttgtttacacggcaattgtggcaatattgaaatcttatccatcggctggagattcagccctgtatcttggtcttctgggcttatttgtcaacgaattagcagaaatgcagttcacattcttcttgttttttggatatattggagtctccctacttagccctgtcatgcataatctgtggatctggaggggcactggtaatgcaaatttctacttcgccactggtttggcttatacttgccttcagactgtgttgctggtagagagtgtaagttcaatgataaagcacgacagaaagttaaggctacttgttacaagctaatttggtcctcataatcagaagctcaagtggtggacagctccgatgcttgcaattccctacatggtgctcttgattcttgaacacaaacagctcctcatcttggagttcgtagatgtaggtcatattcgatgtagcatgttgtactgtagaccccacacttgtacaatactaggaccgcaactctttcaacaaagacaaggaacacggtagggctcgtccttggtgactagtacgtagttgtgttcgctaccgagaattgttgtggatcctggctgtgatgttcagtgatccagcttggttgaactgccctcacgtacatttaattccgtcagtctgatggatcaacaaggaaaccaacatttgaacgtttaaccaaactgatatctaattttcgtttcttcgggccag

SEQ ID NO: 221101 - DNA, 1963 bp, Zea Mays
gttgaaggtagggcatcagaaataaaaaaagaaaacggcaagccaagtctggtggaaaagctcagtgatcataggatgggccgatgacgatgcctgggtccagtccagccaagataatcttgatcggtccaaattgaaaaaacagactccggccacagccgagacgagactagcagcagccgcttgctcagatcggcagcttcggcggcggcggagatggcgattcggtactggccgatggccggagcagccgttgggttccgcctcgtcctggttctcttcggcggggatctccaccttgcctctcgccctgaggtctccacccccctcacctcccttcgccgcctggcggaaggctactggctgaagcaagcgtccgtgtcaccgtactccggttctatgtatcacggttccccattgctcctgtctgttcttggtccattaactagtagcaggcctgacggacatcatgctcatatttactgcagattttctagcagccatgctcatccgagcgactgggcatgaactcgaaatggcacggaacagaagtttgaagtcacttgacctcacaaaggcagtaaaggatacagttaatgtaagcgctggagatgttgcttctctcatatatttgtggaacccttgggcaatagtcacttgtgtgggatcatgtacatcaccaatcgagaatctaatggttgtaataatgatctacggatcctgttcacgtctggctcctcttgctgcttttggatatgttatggccacacacctctctctttatcctgcaattctcatagtaccggtcattctgttgctgggttatggtctagatgctcctcctccaaaagtatttgttataaaagggtcaattgccagaaaaagtgatgtgtcagacaatgataaaacaagcagacagagagttgttcagcagttttcatggaaaccagtacttcactttatattttggctgttcatctggtcgtgccatgtgttgttattgagcagcgtgattttgaagaaagttggtggcctccacgagatgtttgaaaagacgtatggttttatacttacagtgaaagacctatcaccaaatattggtgttttgtggtacttctttgctgaagttttcgacttctttagaaatttctttcttatggtattcaatatgaacatcatttttatggtcttaccattggccatccgattgaaacatcgtccgtgctttcttgcatttgtttacacggcaattgtggcaatattgaaatcttatccatcggctggagattcagccctgtatcttggtcttctgggcttatttgtcaacgaattagcagaaatgcagttcacattcttcttgttttttggatatattggagtctccctacttagccctgtcatgcataatctgtggatctggaggggcactggtaatgcaaatttctacttcgccactggtttggcttatacttgccttcagactgtgttgctggtagagagtgtaagttcaatgataaagcacgacagaaagttaaggctacttgttacaagctaatttggtcctcataatcagaagctcaagtggtggacagctccgatgcttgcaattccctacatggtgctcttgattcttgaacacaaacagctcctcatcttggagttcgtagatgtaggtcatattcgatgtagcatgttgtactgtagaccccacacttgtacaatactaggaccgcaactctttcaacaaagacaaggaacacggtagggctcgtccttggtgactagtacgtagttgtgttcgctaccgagaattgttgtggatcctggctgtgatgttcagtgatccagcttggttgaactgccctcacgtacatttaattccgtcagtctgatggatcaacaaggaaaccaacatttgaacgtttaaccaaactgatatctaattttcgtttcttcgggccag

SEQ ID NO: 221102 - DNA, 2192 bp, Zea Mays
tccaccgccatcagcgctcgcctgaggccggaggggaccttttcgtggctgccggtatcctgtcctccacgcaggacacgcacccgccgcagcccccgccgccaccggatctctcgccaaggacaggctggtgcaggaggccactcccagatcccgtcatccgccgccattaacgccctcctgctagatcccgtcattcgctgcgaatctccattcagctccccctcgcgctttcatcgtcgccgtggaccgctcgctggcgctgacctctcccaagcgcggcacagtggtgcgggtgccgtacaaggtctcgatcccgctgggcagggtgaagacgaccacgccgggtgggaacaaggaccggccggagcagaagtacgtgcaggcttcgagttctggttcatgggcttcgtcaggtaccaggtgtccctgcacgaactggagaaggccatcgagcaggcgaacgttcggggccagatccaccgactcccgtttgacggcctcgcgttgtgcttttgtgtggctattcgttcactggagaaggccattgaactattgagtaagaggaaagttcaggggagaattcttttgtgtggctattcgttcaattacatttctgggacagcatcaataaagaaagtatctcacacgaccaggaatcttggagcagttggctttgttgttgctgtggagaatatttacccaggaataaaatttgaccctgtaccagtcagcatccctagaattctcatcacagatgtcagcaaaacggaggtattgcagagccttatttcatatttgcatatggttgccatttgtagacaacatcatacatagacatatggaaaaatgagaccgtatattcatgaatagatcaataaatatgcaatttagttattgaaatagcatgaattgggcttcaaaaaacaatgtgcaaagaggtgcaagatagtggcatgaattctatatggctgctgctactgctactataggatgactgggcggaaaggtaaagtacctatgcatgtttggtccttgtatgaaaatttctcttataattagacgcagtcctcgtgttgaaaccatgaagcaatctatcaatttccttttcatattattgttactattactaatacttcttagtacctttcatatcttctttgttggtggctcctgttgggtctatagcctaccctaacttacttgggatgaaaaggctttgctgctgttttattgagatgacattaactttggttctacaggatcttatagactactacaattcttccaccataatagattgggctggaagggctacaaccttcaaagcaacagcagacatacttgctcctggcaatctcatatgggctgcatgggcgcctaatggaacagatgaatcaaactatgctggtgaaggatttgcaatggtttctggaactagcatggccacaccgcatttcgctggcattgcagcactaataaagcagaagaacccaaagtggagcccctcagcaataaaatctgccatgatgacaacaaccaatacactggacaaagggagtcgtcctctcagagcgcagcagtacacaacatcggaaatgatgacactttctcaggccacaccgtttgattgtggtagtggcgctgttaacccaaaagctgccctttaacagttataattacccagagattagtgatgctaagaagagtcctgggtgacaatttttgttccagcattttgaaaaatactcaaagaattttttattaataatttgactaaaattcataaggtgaaatatacttccttcttggcactatgattatcttggcccaactttactacccctaatgcattttggatgctattacagacactgtgccggatgtatataattaatgctggtcaaggcttcaagatgttatggagcacaataaaatcattcctcgatccaaaaactgcttccaagatccattgtttcctttgaaggttcttgggaataagtagcaacataagttgctcgaaataattgacgagtggttagtattttgtttgtgtgtcgtacatttatgttgtttattacttccattctaatttctgcttaatgcatgcatgcagtgaactgccagaattttttggtggcaaatctctactaactattaagttagtagtgtagactgcccccgcctccgcc

SEQ ID NO: 221103 - DNA, 4187 bp, Zea Mays
atctgcaagataacataacagccagatcctgtgtaacgcaatacgtaaaataagtttctggcggcaaagaacaaaaatccacttccggatatttttcgcttcacttttacccttgttcggttaggagaggattattttaatcccctcctagtcaaaattgaatacaaaggatttaatccccctcaatccccttgcaaccaagcccttatgagaattttgcactttcttcaatacacctcaccaaatgtgcaattgtgcaaagcatcagcaagcgtaagaattttgtgcccagcatctgtagaataatagggttttgtttggttatttgaattgtagtttaatcagaaccaactaatgtctcaaactctggtgtgaacggtgccataagctatctgacgatgggaacattagcagtccatgcaattaattctatccaccaaatcatagagcctctttagggcgggagggggacatatccaagcagggctcccgattggtgcccaatccccgatcccttaaaaagaaagaagggttttaagtgcataacattgtggtgcctaatatctttctccaagcataccttcaatgcaagttcttcaaaacatttctcaacattttctcgtgtttttgcactgctctcaagaaacagacaaccagattcttcagcaaaagcaagaccttcttcttctgtgaccattctttcatcatcctgcaagatgagaccatcaaaatcagaaataggaagtatgaactgtagttattctaccttaaagagcccaccagtttgactttttacaactccagaatgtcaggggttaaaaaggattaaaagagtaaagaatgtatatagatgacactagcgtagcaacaagaggtattagaaaattcttagatgagacacaatgtttccagaaaggaaataacaaccaagtttcttgcagagatggtaccttgtcaactttgtttccaacaagcatttttatgcagtctttgtttgttgagtttgcttctatttccttagtccaaacatcagccaaatttgagaaactctctctctttgtgacatcatatactaggagtgaaatacaaagtcattagactttaaataatccaagtacgaaaagaacaagatgaaggaccggatagaaattccataggcaaaacttccattagatattatcacgatgcaattcgacatcatcaacctaggcagaaggatttagataaaatgcaataactaaagcatgaaaacaaatgagaatgtggaccaaacatccaaaaaatatctagactacttaccactaaaattaatcataagaggtattcagattccataaatgcagcaactaaattgtccatggggtgcaaccatttggaattatcatccaaagttaagtcagagatcaaattcataaaatgataaaaaatgataaaggtatgggtatggtttctaatatcaaatataaaatgcttctctggaaagtttgtacatggatatacatgttgatcaatatttaaaaaacatggaggctatttttactgcagtcaatccttgtattaaaaaacacgatgacttcaaacacagtaatctataaccattgtccacccacaaattaagatatatcattgacatggtgagaccgtaagagacacattggtgctacatgtacaactttcaacataaaaaataggccaagatatcgcaacatcagatatccaaggctccaagcttttggacaactcgcatttagtaactaaatagatcaacttataccattcaatggcatatttcaataatccgacatcaaggtgacaaaaatgacattaatgtgatgttacaatatatcaaaatatttaagcagtcaactgtagtaaaaatactgtcttacctaaaataattccctgagcacctctgtagtaagaactagttattgtcctaaacctctcctggccagctgcagagcattgtaagtatttattatttatttatttttaaggaaagtggcaggagctctgccttacattgaagtaagggaaaaaaagagacaaggttttgccttgatggcaggcacgcctcaacaggctacagtgcaaccacaagctcttgagagatccaacccacaaataaacataaacaaaaagcacacgatggcctccaagtttttggaatattgaaaatatcagaaaacaaggtaacataatttatgccgttaatagataacttagaaaccttcaagttctagcagtagtagacagaggtaacatggtgaagcacctagatacctttgggcaaaatgagttggtggggctaaacaagaaaacttttaataatattggaacgtagggtcacaatgatttagagatgtgagggctaacatggcgaaagtagccaaatattttaggcacaaagcagcaaggtggagctaaaatttgtgaataagaaaccccaatagccatgatgtaaggacaggcgtggaggaagaaaccaaatatctctacaactattaagagcgtagtgtagaccactttcgtggctccgcctccccccgcggcatgcccgcgcccgtccccacgaatgtcgcccctgcacccaccccgcgatgcaatccccaagccatcagcgctccctccgccgagcaggagaatcccctccaccgccatcagcgctcgcctgaggccggaggggaccttttcgtggctgccggtatcctgtcctccacgcaggacacgcacccgccgcagcccccgccgccaccggatctctcgccaaggacaggctggtgcaggaggccactcccagatcccgtcatccgccgccattaacgccctcctgctagatcccgtcattcgctgcgaatctccattcagctccccctcgcgctttcatcgtcgccgtggaccgctcgctggcgctgacctctcccaagcgcggcacagtggtgcgggtgccgtacaaggtctcgatcccgctgggcagggtgaagacgaccacgccgggtgggaacaaggaccggccggagcagaagtacgtgcaggcttcgagttctggttcatgggcttcgtcaggtaccaggtgtccctgcacgaactggagaaggccatcgagcaggcgaacgttcggggccagatccaccgactcccgtttgacggcctcgcgttgtgcttttgtgtggctattcgttcactggagaaggccattgaactattgagtaagaggaaagttcaggggagaattcttttgtgtggctattcgttcaattacatttctgggacagcatcaataaagaaagtatctcacacgaccaggaatcttggagcagttggctttgttgttgctgtggagaatatttacccaggaataaaatttgaccctgtaccagtcagcatccctagaattctcatcacagatgtcagcaaaacggaggatcttatagactactacaattcttccaccataatagattgggctggaagggctacaaccttcaaagcaacagcagacatacttgctcctggcaatctcatatgggctgcatgggcgcctaatggaacagatgaatcaaactatgctggtgaaggatttgcaatggtttctggaactagcatggccacaccgcatttcgctggcattgcagcactaataaagcagaagaacccaaagtggagcccctcagcaataaaatctgccatgatgacaacaaccaatacactggacaaagggagtcgtcctctcagagcgcagcagtacacaacatcggaaatgatgacactttctcaggccacaccgtttgattgtgacactgtgccggatgtatataattaatgctggtcaaggcttcaagatgttatggagcacaataaaatcattcctcgatccaaaaactgcttccaagatccatgtttgtaatgctttgttaagcactgatttgattgcatcttgtgtaatttgatatactgataatattcagtgtttcctttgaaggttcttgggaataagtagcaacataagttgctcgaaataattgacgagtggttagtattttgtttgtgtgtcgtacatttatgttgtttattacttccattctaatttctgcttaatgcatgcatgcagtgaactgccagaattttttggtggcaaatctctactaactattaagttagtagtgtagactgcccccgcctccgcc

SEQ ID NO: 221104 - DNA, 705 bp, Zea Mays
ccgaagcagagcacgacggacaaaaatatggcagggaaagccggcggactcaaaggggttgccctcatcggcggcagcgccaacagcacggtcgctggggtcattcacttcttcgaggacccctccaccaggtacaccgaggtgaggggcaaggtcacgggcttgactccgggaaggcatggattccacatccacgtcttcggcgacactaccaatggctgcaactcaaccggtccccattttaaccctcataataaaccccatggagctccatttgacgacgaacgacatttgggcgacctgggaaatatagtagccaatgaagatggagatgcagaagtgttcataagagacttacagatttcattgagtgggcctcattccattctgggaagggcagttgttgtacatgctgatcctgatgacctagggaggggtggccatgaactgagtaagtcaacaggaaacgcaggagctagaattggatgtggtatcattggaattcagtcatcagtttgacaaataacggcttagtagcaccagaaaaagagggggacatgattccacagtccgtgcagtgtcgtggtttagggatatggaaatggtgttcgttgttctggaccgtttgaagactaaatatctccagtcatgtatacaataatcttacagtcgccttcttgttgcacaggaatcaaacggcaggca

SEQ ID NO: 221105 - DNA, 460 bp, Zea Mays
ccgaagcagagcacgacggacaaaaatatggcagggaaagccggcggactcaaaggggttgccctcatcggcggcagcgccaacagcacggtcgctggggtcattcacttcttcgaggacccctccaccaggtacaccgaggtgaggggcaaggtcacgggcttgactccgggaaggcatggattccacatccacgtcttcggcgacactaccaatggctgcaactcaaccggtccccattttaaccctcataataaaccccatggagctccatttgacgacgaacgacatttgggcgacctgggaaatatagtagccaatgaagatggagatgcagaagtgttcataagagacttacagatttcattgagtgggcctcattccattctgggaagggcagttgttgtacatgctgatcctgatgacctagggagggatcggtaccaacctactcctccac

SEQ ID NO: 221106 - DNA, 2045 bp, Zea Mays
gtgacagacgcatctcgcaagcagcagcagagcagaaactgagggaagcgagggacggcgatggcgggtgcggaggggagagggccgagacggagccgcgtggcgttcgtgctggtggacgggatcggggacgtgagcgttccgtcgctgggcgggcgcacgccgctggacgcggcgtgcgcgccgcggctggacgcggtggcggcggccggggtgaccgggctcatggaccccgtggagccggggcttgcatgcggcagcgacacggcgcacctatccctcctcgggtacgacccacgggagtactaccgcggccgcggcgcgttcgaatccatgggtgccgggctcgccatggcgcctggcgacatcgccttcaagtcgaacttcgctacactggatgagaacactggagttatcatcagcaggagggcagatcggcactttgaagaggaaggccctatactctgtgctgcgttggatgggatgaaacttcggtcgtttcctgagtatgaagtcagagtaagatatgctaccgagcatagatgtggtgtggttgtcaaaggaccaaagctgagtgggaacatttctggaactgatcccttgaaggacaaccgcttgcatctgaaggctgaaccgttggatggctcagaagaagctaaaaacactgcagctgtggtcaatgagctttctatggagattacgcgcatactggtttctcaccccatcaacgcaaagcgtgcagctgaggggaagaacatcgcaaatgttgtgttgctgcgaggttgtggtattcggattgaggtgcctgcctttgaaaccaaacatggacttgcaccttgcatggttgctcctaccaagatcatagctggcctgggactgtcactggggattgatatccttgaagcacctggagcaactggagattatcgtactctcttaacttctaaagctaaagccatagccaaggcactctctgcccctatggatacaccacctcgtgtttttgtgcctggagaggatggatacaaggctggaaaagaaaatggatatgactttgggttcctgcacataaaggccattgatgatgctggtcatgacaaggctgtcaagttgaaagtacggggtctagaagctgttgatcgagctattggtcagcttgcgaggcttctttgggaagctgaaaaggccggacactatcagtactttctttgcgtcactggagaccattctactcctgttgaatatggtgatcatagcttcgaacccgtcccgtttgcaatatgcagactgagagattatgcaggagccattggggaggataatattatgaatacacagctcgacgattttcccctcccttcggtaaaatccggagaagatttgctcgacagtatagaatcactggagcacaagcctggtcaacttaaagctttcagtggcgacagtgtgtgtgagttcaacgagatcgccgctgcgaggggctgccttggacgattcccaggaagcgagatgatgggcatcattaagaagtttatcaaggccaagaatgattaatgctggttgaaatgctaacctttagcgtaatatattggccataaggtttattatcaatgtaataaactaataatgacagaatggagcaatatggaagaaccgtcttgattggagatgaataagagataccttggtgaaaaacaatgagatctgcttatgtacattgtacccagtgttgggtcactttccggccacatgaatgagaaattttgatggaagttttctcctctcttttttgcggggttgggttaaggagtccagacttgaagcttcttgcttagccgtatgtatcatccagaatattttgacacattttatgcaattttgcattcttatagctccaatgatgcaaataattgctagagcatccggcacactgacatggcatacgttttgtgagatgataccttttatactaagcatcggacagacagaatacacaactgcagtaccttcaaattgcggtgttcaacagaatactgtaatttcag

SEQ ID NO: 221107 - DNA, 1919 bp, Zea Mays
gacgcatctcgcaagcagcagcagagcagaaactgagggaagcgagggacggcgatggcgggtgcggaggggagagggccgagacggagccgcgtggcgttcgtgctggtggacgggatcggggacgtgagcgttccgtcgctgggcgggcgcacgccgctggacgcggcgtgcgcgccgcggctggacgcggtggcggcggccggggtgaccgggctcatggaccccgtggagccggggcttgcatgcggcagcgacacggcgcacctatccctcctcgggtacgacccacgggagtactaccgcggccgcggcgcgttcgaatccatgggtgccgggctcgccatggcgcctggcgacatcgccttcaagtcgaacttcgctacactggatgagaacactggagttatcatcagcaggagggcagatcggcactttgaagaggaaggccctatactctgtgctgcgttggatgggatgaaacttcggtcgtttcctgagtatgaagtcagagtaagatatgctaccgagcatagatgtggtgtggttgtcaaaggaccaaagctgagtgggaacatttctggaactgatcccttgaaggacaaccgcttgcatctgaaggctgaaccgttggatggctcagaagaagctaaaaacactgcagctgtggtcaatgagctttctatggagattacgcgcatactggtttctcaccccatcaacgcaaagcgtgcagctgaggggaagaacatcgcaaatgttgtgttgctgcgaggttgtggtattcggattgaggtgcctgcctttgaaaccaaacatggacttgcaccttgcatggttgctcctaccaagatcatagctggcctgggactgtcactggggattgatatccttgaagcacctggagcaactggagattatcgtactctcttaacttctaaagctaaagccatagccaaggcactctctgcccctatggatacaccacctcgtgtttttgtgcctggagaggatggatacaaggctggaaaagaaaatggatatgactttgggttcctgcacataaaggccattgatgatgctggtcatgacaaggctgtcaagttgaaagtacggggtctagaagctgttgatcgagctattggtcagcttgcgaggcttctttgggaagctgaaaaggccggacactatcagtactttctttgcgtcactggagaccattctactcctgttgaatatggtgatcatagcttcgaacccgtcccgtttgcaatatgcagactgagagattatgcaggagccattggggaggataatattatgaatacacagctcgacgattttcccctcccttcggtaaaatccggagaagatttgctcgacagtatagaatcactggagcacaagcctggtcaacttaaagctttcagtggcgacagtgtgtgtgagttcaacgagatcgccgctgcgaggggctgccttggacgattcccaggaagcgagatgatgggcatcattaagaagtttatcaaggccaagaatgattaatgctggttgaaatgctaacctttagcgtaatatattggccataaggtttattatcaatgtaataaactaataatgacagaatggagcaatatggaagaaccgtcttgattggagatgaataagagataccttggtgaaaaacaatgagatctgcttatgtacattgtacccagtgttgggtcactttccggccacatgaatgagaaattttgatggaagttttctcctctcttttttgcggggttgggttaaggagtccagacttgaagcttcttgcttagccataccttttatactaagcatcggacagacagaatacacaactgcagtaccttcaaattgcggtgttcaacagaatactgtaatttcag

SEQ ID NO: 221108 - DNA, 1759 bp, Zea Mays
atctcgcaagcagcagcagagcagaaactgagggaagcgagggacggcgatggcgggtgcggaggggagagggccgagacggagccgcgtggcgttcgtgctggtggacgggatcggggacgtgagcgttccgtcgctgggcgggcgcacgccgctggacgcggcgtgcgcgccgcggctggacgcggtggcggcggccggggtgaccgggctcatggaccccgtggagccggggcttgcatgcggcagcgacacggcgcacctatccctcctcgggtacgacccacgggagtactaccgcggccgcggcgcgttcgaatccatgggtgccgggctcgccatggcgcctggcgacatcgccttcaagtcgaacttcgctacactggatgagaacactggagttatcatcagcaggagggcagatcggcactttgaagaggaaggccctatactctgtgctgcgttggatgggatgaaacttcggtcgtttcctgagtatgaagtcagagtaaggacaaccgcttgcatctgaaggctgaaccgttggatggctcagaagaagctaaaaacactgcagctgtggtcaatgagctttctatggagattacgcgcatactggtttctcaccccatcaacgcaaagcgtgcagctgaggggaagaacatcgcaaatgttgtgttgctgcgaggttgtggtattcggattgaggtgcctgcctttgaaaccaaacatggacttgcaccttgcatggttgctcctaccaagatcatagctggcctgggactgtcactggggattgatatccttgaagcacctggagcaactggagattatcgtactctcttaacttctaaagctaaagccatagccaaggcactctctgcccctatggatacaccacctcgtgtttttgtgcctggagaggatggatacaaggctggaaaagaaaatggatatgactttgggttcctgcacataaaggcaaaatgcatattcagattctttttactagtactgactatatatgtgattgtgatagctcttgtaataatgtcaatgcaggccattgatgatgctggtcatgacaaggctgtcaagttgaaagtacggggtctagaagctgttgatcgagctattggtcagcttgcgaggcttctttgggaagctgaaaaggccggacactatcagtactttctttgcgtcactggagaccattctactcctgttgaatatggtgatcatagcttcgaacccgtcccgtttgcaatatgcagactgagagattatgcaggagccattggggaggataatattatgaatacacagctcgacgattttcccctcccttcggtaaaatccggagaagatttgctcgacagtatagaatcactggagcacaagcctggtcaacttaaagctttcagtggcgacagtgtgtgtgagttcaacgagatcgccgctgcgaggggctgccttggacgattcccaggaagcgagatgatgggcatcattaagaagtttatcaaggccaagaatgattaatgctggttgaaatgctaacctttagcgtaatatattggccataaggtttattatcaatgtaataaactaataatgacagaatggagcaatatggaagaaccgtcttgattggagatgaataagagataccttggtgaaaaacaatgagatctgcttatgtacattgtacccagtgttgggtcactttccggccacatgaatgagaaattttgatgga

SEQ ID NO: 221109 - DNA, 2759 bp, Zea Mays
ttcgtctctccatagaaaacacaccagctgcttctcgttcttccgcgtcgtacgtaccagtaccaccctcctggattaccacctccatagctttgatatctctcatccatcgattccctcctagaatccaatccgatgcggcggccaccacccccgccccaagtggcgtcctcgtgagaggttggcagcgagctacatcagcgagaagcctagggcgcgcagtatatctcggaatgtgctggctcccaacagccgcgaagcgattctcccctcaccctcgaccacgagccgcctatataaccatctccatggctccccctcccaacccccaccagagctagcggcatcactgtcatcgagctcgaccgacgaccgtcgatcggtacccgtcgtcgtcgcggcgtcgtcgacgacggcataataatataataaccaggccagggcagggaagatggtgaagttctccaagcagtttgaggggcagcttgtccccgagtggaagcatgccttcctggactactgcctgctcaaaaaggatctcaagaggatgcagcacgcccggcaccatgctgctgccgaccgtcgccaagcagcaggcctaaccgacacgcaagaaactgccgccggccaccacgcggaacgggcctctctctctctgtcccagtggctcctggacaggctccccgctggcctcttcggctccaatgctcccaacagggatcgtcatggggtcatacacgtgcaccgccgcaagctggcggggtcggcgagcagaggcggcggcggcgacgtgtacgagacggagctgctggagccgttggccgacgacgacggcgacgcggccgcggcgcgggagttcttcgcgcgcctggacgcgcagctcaacaaggtgaaccagttctacaggggcaaggagcaggagttcctggagcggggccggtccctgcggcggcagatggacatactcgccgacctcagggcggccagggccagggaggacccctccgtcgcctccgcttccgccgcctccgaggatgagtacacaaggtatgcgatgacgtcagcatcagacacggacgcgctgcagctgagcgagcaagaagaacaagccacgccgctgccgaccgacggccccggcgtcacggctcaggaggaccaccagcagcagcaggatctagaaggctccggaaccttcgcggtgaggccgcccttgagcgggtgcgggaggaagagcctgaagatcaccatcccactgaccaccccctccaggacgatctccgcgctgacggacatcctgtgggacgagctcgccatcagccacttctcctcctcctccaagaaatgcatcccggacgggaagcagagcgtcagcaagaccaagctccggcacgcggagaagatgatcaagcgcgccttcgtcgagctctacaaggggctgggctacctcgccacctaccggagcctgaacatgatggcattcgtgaagattctgaagaagttcgagaagatcaccgggaaggaggtcctgtccatatatctcaaggtggtcgagacctcctacttcaacagctctgatgaggcgctgaagctgatggacgaggtcgaggacatcttcgtccggcacttcgccggcgacaaccggcgcaaggccatgaagtacctgaggcccgcgcagcgcagggactcgcacgccgccaccttcttcacggggctcatggccggctgcttcgccgcgctgttcgtgggctactgcgtcatggcgcacatggcggggatgtactactactactccaccccggcgccgccttctcgcgcccgcggtaccggcggcggctcggtatctgtgtcggtgtcggtgtccgtgtacatggagaccgcgtacccggtgctgagcatgttcgcgctgctgttcctgcacctgctcctctacgggtgcaacatggtggcgtggcgcaggtgccgcgtcaactacggcttcatcttcgagtcgtcgccgtcgcccgccggcggggagctcgggccccgggacgtgttcctcgtctgcgccgcgtccatggccgccgtcgccggcgtcatgttcgcgcacctcgccctcgtgctcaggtggggctaccacgcgtcgccgcacgtggaagccatccccgcgttcttgctcctggtgttcctgctgctgctgttctgcccgatcaacgtcgtgtaccggtccagtcggtttcagttcctcaggatactgaggaacattgtactgtcaccgctctacaaggttgtaatggtagacttcttcatggccgatcagctttgcagccaggtgcctatgctacggagcctggagtacctggcgtgctattacatcagtgggagctactggacgcaggagtacggctactgcaccaacaccaagcacatcagagacctggcctacgccgtctccttcctgccgtactactggagagccatgcagtgcgcacggaggtggttcgacgagggggacacgagccacctggtgaacctgggcaagtacgtctccgccatgctcgccgccggcgccaaagtggcgtacgagaaggacaggagcctggcgtcgctgtcgctcctcgtcgccgtgtccagcggcgcgacggtgtaccagctgtactgggacttcgtcaaggactggggcctgctccagcccaactccaagaacccctggctcaggaacgacctcatcctcaggaggaaatccatatactacctgtcaatgatggacgagcatgctattt

SEQ ID NO: 221110 - DNA, 1353 bp, Zea Mays
cgtcttcattctttctccctgcccctgccctcgcctgctgaaggaagccgcctttttggagtttggactcgggaggacagcctccgcactttccgtccgtcgcgaggaattcctgcccgggcgggcgtagagcagggcgaagcattcgttggggacgaacgtttagggccggggatcggggaacacgaggctgcgcgttggcgcaagcaagcaaattttgggtcctagcttgaaggactgccatctttttttttggttgctccactcgagaatttgaaggaattttaccaacgtggggagctgaattttttttctgctcctcacattttccactctccacccgcgcctgactgcagctggctgcgatccccctatctaccacctgattcatctttgtctccgtcggtgccgccctctccgccagcctgaccccagggatggctggaaaaggaagctatgtacctccacaatatattcccttatacagcctagataccgaagaggatcgtgtccctgccgtggaagagaaccatgctacgcgccctaaactaaaccaggatccaacacaatggtcatctggcatctgtgcctgttttgatgacccccagagctgttgtattggtgcgatttgcccctgtttcctttttggaaagaatgcacaattcttgggatctggaactcttgctggatcatgcactacgcattgcatgttgtggggccttctcacaagtctatgctgtgtatttactggaggtctagtattagcagttccaggatctgccgttgcttgttatgcttgcggatatcgcagtgcactaagaacaaagtacaatcttccggaagcaccctgtggcgatttgacgacacacttattctgtcacttgtgtgctatatgccaggagtacagggagatccgtgagagaacaggcagtggctcctcaccagctcctaatgtgactccacctccagttcagacgatggatgagctttgatctttaactgatatgaatgtatgttatctgacaaactttggtgtgtggcctggtgactagtgctgcctttgcctgttggcattttgacatatttttgttcttgggctctcacaacgctgctatgttgtttgtagagttgtaaacacgttttgaactagtgaaccactgacagttcacggaagttgtaacacagttgtaccatggaactgtagtagaattaagtgtatttttttgctatttatataggtgagaggatgagaagggaaaagaaaagaaatgcgcttatcatgcagaatgtttcattgtgtttagttctatgaacaatccaatattgtggtgagtggttgtttaagtttcagtt

SEQ ID NO: 221111 - DNA, 1053 bp, Zea Mays
cgtcttcattctttctccctgcccctgccctcgcctgctgaaggaagccgcctttttggagtttggactcgggaggacagcctccgcactttccgtccgtcgcgaggaattcctgcccgggcgggcgtagagcagggatggctggaaaaggaagctatgtacctccacaatatattcccttatacagcctagataccgaagaggatcgtgtccctgccgtggaagagaaccatgctacgcgccctaaactaaaccaggatccaacacaatggtcatctggcatctgtgcctgttttgatgacccccagagctgttgtattggtgcgatttgcccctgtttcctttttggaaagaatgcacaattcttgggatctggaactcttgctggatcatgcactacgcattgcatgttgtggggccttctcacaagtctatgctgtgtatttactggaggtctagtattagcagttccaggatctgccgttgcttgttatgcttgcggatatcgcagtgcactaagaacaaagtacaatcttccggaagcaccctgtggcgatttgacgacacacttattctgtcacttgtgtgctatatgccaggagtacagggagatccgtgagagaacaggcagtggctcctcaccagctcctaatgtgactccacctccagttcagacgatggatgagctttgatctttaactgatatgaatgtatgttatctgacaaactttggtgtgtggcctggtgactagtgctgcctttgcctgttggcattttgacatatttttgttcttgggctctcacaacgctgctatgttgtttgtagagttgtaaacacgttttgaactagtgaaccactgacagttcacggaagttgtaacacagttgtaccatggaactgtagtagaattaagtgtatttttttgctatttatataggtgagaggatgagaagggaaaagaaaagaaatgcgcttatcatgcagaatgtttcattgtgtttagttctatgaacaatccaatattgtggtgagtggttgtttaagtttcagtt

SEQ ID NO: 221112 - DNA, 709 bp, Zea Mays
cgtcttcattctttctccctgcccctgccctcgcctgctgaaggaagccgcctttttggagtttggactcgggaggacagcctccgcactttccgtccgtcgcgaggaattcctgcccgggcgggcgtagagcagggcgaagcattcgttggggacgaacgtttagggccggggatcggggaacacgaggctgcgcgttggcgcaagcaagcaaattttgggtcctagcttgaaggactgccatctttttttttggagtacagggagatccgtgagagaacaggcagtggctcctcaccagctcctaatgtgactccacctccagttcagacgatggatgagctttgatctttaactgatatgaatgtatgttatctgacaaactttggtgtgtggcctggtgactagtgctgcctttgcctgttggcattttgacatatttttgttcttgggctctcacaacgctgctatgttgtttgtagagttgtaaacacgttttgaactagtgaaccactgacagttcacggaagttgtaacacagttgtaccatggaactgtagtagaattaagtgtatttttttgctatttatataggtgagaggatgagaagggaaaagaaaagaaatgcgcttatcatgcagaatgtttcattgtgtttagttctatgaacaatccaatattgtggtgagtggttgtttaagtttcagtt

SEQ ID NO: 221113 - DNA, 1369 bp, Zea Mays
cgtcttcattctttctccctgcccctgccctcgcctgctgaaggaagccgcctttttggagtttggactcgggaggacagcctccgcactttccgtccgtcgcgaggaattcctgcccgggcgggcgtagagcagggcgaagcattcgttggggacgaacgtttagggccggggatcggggaacacgaggctgcgcgttggcgcaagcaagcaaattttgggtcctagcttgaaggactgccatctttttttttgaacgcatttttgccggccagctccactcgagaatttgaaggaattttaccaacgtggggagctgaattttttttctgctcctcacattttccactctccacccgcgcctgactgcagctggctgcgatccccctatctaccacctgattcatctttgtctccgtcggtgccgccctctccgccagcctgaccccagggatggctggaaaaggaagctatgtacctccacaatatattcccttatacagcctagataccgaagaggatcgtgtccctgccgtggaagagaaccatgctacgcgccctaaactaaaccaggatccaacacaatggtcatctggcatctgtgcctgttttgatgacccccagagctgttgtattggtgcgatttgcccctgtttcctttttggaaagaatgcacaattcttgggatctggaactcttgctggatcatgcactacgcattgcatgttgtggggccttctcacaagtctatgctgtgtatttactggaggtctagtattagcagttccaggatctgccgttgcttgttatgcttgcggatatcgcagtgcactaagaacaaagtacaatcttccggaagcaccctgtggcgatttgacgacacacttattctgtcacttgtgtgctatatgccaggagtacagggagatccgtgagagaacaggcagtggctcctcaccagctcctaatgtgactccacctccagttcagacgatggatgagctttgatctttaactgatatgaatgtatgttatctgacaaactttggtgtgtggcctggtgactagtgctgcctttgcctgttggcattttgacatatttttgttcttgggctctcacaacgctgctatgttgtttgtagagttgtaaacacgttttgaactagtgaaccactgacagttcacggaagttgtaacacagttgtaccatggaactgtagtagaattaagtgtatttttttgctatttatataggtgagaggatgagaagggaaaagaaaagaaatgcgcttatcatgcagaatgtttcattgtgtttagttctatgaacaatccaatattgtggtgagtggttgtttaagtttcagtt

SEQ ID NO: 221114 - DNA, 1349 bp, Zea Mays
cgtcttcattctttctccctgcccctgccctcgcctgctgaaggaagccgcctttttggagtttggactcgggaggacagcctccgcactttccgtccgtcgcgaggaattcctgcccgggcgggcgtagagcagggcgaagcattcgttggggacgaacgtttagggccggggatcggggaacacgaggctgcgcgttggcgcaagcaagcaaattttgggtcctagcttgaaggactgccatctttttttttgctccactcgagaatttgaaggaattttaccaacgtggggagctgaattttttttctgctcctcacattttccactctccacccgcgcctgactgcagctggctgcgatccccctatctaccacctgattcatctttgtctccgtcggtgccgccctctccgccagcctgaccccagggatggctggaaaaggaagctatgtacctccacaatatattcccttatacagcctagataccgaagaggatcgtgtccctgccgtggaagagaaccatgctacgcgccctaaactaaaccaggatccaacacaatggtcatctggcatctgtgcctgttttgatgacccccagagctgttgtattggtgcgatttgcccctgtttcctttttggaaagaatgcacaattcttgggatctggaactcttgctggatcatgcactacgcattgcatgttgtggggccttctcacaagtctatgctgtgtatttactggaggtctagtattagcagttccaggatctgccgttgcttgttatgcttgcggatatcgcagtgcactaagaacaaagtacaatcttccggaagcaccctgtggcgatttgacgacacacttattctgtcacttgtgtgctatatgccaggagtacagggagatccgtgagagaacaggcagtggctcctcaccagctcctaatgtgactccacctccagttcagacgatggatgagctttgatctttaactgatatgaatgtatgttatctgacaaactttggtgtgtggcctggtgactagtgctgcctttgcctgttggcattttgacatatttttgttcttgggctctcacaacgctgctatgttgtttgtagagttgtaaacacgttttgaactagtgaaccactgacagttcacggaagttgtaacacagttgtaccatggaactgtagtagaattaagtgtatttttttgctatttatataggtgagaggatgagaagggaaaagaaaagaaatgcgcttatcatgcagaatgtttcattgtgtttagttctatgaacaatccaatattgtggtgagtggttgtttaagtttcagtt

SEQ ID NO: 221115 - DNA, 1173 bp, Zea Mays
cgtcttcattctttctccctgcccctgccctcgcctgctgaaggaagccgcctttttggagtttggactcgggaggacagcctccgcactttccgtccgtcgcgaggaattcctgcccgggcgggcgtagagcagggcgaagcattcgttggggacgaacgtttagggccggggatcggggaacacgaggctgcgcgttggcgcaagcaagcaaattttgggtcctagcttgaaggactgccatctttttttttgggatggctggaaaaggaagctatgtacctccacaatatattcccttatacagcctagataccgaagaggatcgtgtccctgccgtggaagagaaccatgctacgcgccctaaactaaaccaggatccaacacaatggtcatctggcatctgtgcctgttttgatgacccccagagctgttgtattggtgcgatttgcccctgtttcctttttggaaagaatgcacaattcttgggatctggaactcttgctggatcatgcactacgcattgcatgttgtggggccttctcacaagtctatgctgtgtatttactggaggtctagtattagcagttccaggatctgccgttgcttgttatgcttgcggatatcgcagtgcactaagaacaaagtacaatcttccggaagcaccctgtggcgatttgacgacacacttattctgtcacttgtgtgctatatgccaggagtacagggagatccgtgagagaacaggcagtggctcctcaccagctcctaatgtgactccacctccagttcagacgatggatgagctttgatctttaactgatatgaatgtatgttatctgacaaactttggtgtgtggcctggtgactagtgctgcctttgcctgttggcattttgacatatttttgttcttgggctctcacaacgctgctatgttgtttgtagagttgtaaacacgttttgaactagtgaaccactgacagttcacggaagttgtaacacagttgtaccatggaactgtagtagaattaagtgtatttttttgctatttatataggtgagaggatgagaagggaaaagaaaagaaatgcgcttatcatgcagaatgtttcattgtgtttagttctatgaacaatccaatattgtggtgagtggttgtttaagtttcagtt

SEQ ID NO: 221116 - DNA, 1383 bp, Zea Mays
cgtcttcattctttctccctgcccctgccctcgcctgctgaaggaagccgcctttttggagtttggactcgggaggacagcctccgcactttccgtccgtcgcgaggaattcctgcccgggcgggcgtagagcagggcgaagcattcgttggggacgaacgtttagggccggggatcggggaacacgaggctgcgcgttggcgcaagcaagcaaattttgggtcctagcttgaaggactgccatctttttttttgcgtctgtttgatagaacgcatttttgccggccagctccactcgagaatttgaaggaattttaccaacgtggggagctgaattttttttctgctcctcacattttccactctccacccgcgcctgactgcagctggctgcgatccccctatctaccacctgattcatctttgtctccgtcggtgccgccctctccgccagcctgaccccagggatggctggaaaaggaagctatgtacctccacaatatattcccttatacagcctagataccgaagaggatcgtgtccctgccgtggaagagaaccatgctacgcgccctaaactaaaccaggatccaacacaatggtcatctggcatctgtgcctgttttgatgacccccagagctgttgtattggtgcgatttgcccctgtttcctttttggaaagaatgcacaattcttgggatctggaactcttgctggatcatgcactacgcattgcatgttgtggggccttctcacaagtctatgctgtgtatttactggaggtctagtattagcagttccaggatctgccgttgcttgttatgcttgcggatatcgcagtgcactaagaacaaagtacaatcttccggaagcaccctgtggcgatttgacgacacacttattctgtcacttgtgtgctatatgccaggagtacagggagatccgtgagagaacaggcagtggctcctcaccagctcctaatgtgactccacctccagttcagacgatggatgagctttgatctttaactgatatgaatgtatgttatctgacaaactttggtgtgtggcctggtgactagtgctgcctttgcctgttggcattttgacatatttttgttcttgggctctcacaacgctgctatgttgtttgtagagttgtaaacacgttttgaactagtgaaccactgacagttcacggaagttgtaacacagttgtaccatggaactgtagtagaattaagtgtatttttttgctatttatataggtgagaggatgagaagggaaaagaaaagaaatgcgcttatcatgcagaatgtttcattgtgtttagttctatgaacaatccaatattgtggtgagtggttgtttaagtttcagtt

SEQ ID NO: 221117 - DNA, 824 bp, Zea Mays
gttgttgaatgagttccgtggagtttgttgtcgcattgctttcgtctcggcgcttgcgggcgccgccgcggctggagctgggttcggtcggcgcggacgcgcggtgcccgttttgcgggttacggcgaacttttcttaatgccgatggaggttgcggacgtgtgccaccaggtactgttacatctggcctggtggtgcgcgcgtctgtggtggtggccggcttgatgtttgacgaaatgccgaagcgcttttgaacaaaaggctgcagcgacacgcgataaatccaccggctcacacattcagacagagtcaaaggagcatatgaaaggttttttgtcatcttttggtggatgtggatgcactaagaaaaggggctcatggaacagggtaagcatgatattttgttggttgtaagcactgtttcaaaacttgagtgcttctaatacggcaaaccagaaatgttaggtgaacaagagcaacaggcattttgagtctatgatgctaattaatataacaactgctgaaatacaaaaatattatcaccttcactaaacaaattaaactcttttttttaaaaaaagtaaataaatagattaaactttatttttaaaattttaagaaaaagaaaagaaataaaacttttaaacatgctagaatgccaaatttttagaacagcgtcttttcattaatgggcccaagttcatggagttctttatctatttatgtcttcacaccgaatctccgacgatgaaggattgtttgcattgattcacgattgaactctgatttggaattatatgaatggatatagggcataggtttct

SEQ ID NO: 221118 - DNA, 2582 bp, Zea Mays
gtgaggtcacccacgaccgcgactggactcgagcgtctctcactctagtcgccaccctcacaagtgccagcgccagcgcgtggttcctgggcgggcgggccccgtctccctctccggcttcctttctccgtttctcgctcgcctcttctctctcccggcgtccgcgcccgccgaaacactctcgaaaggaaaccgatctgtcacccaaaccgcgcctccccgcggtgatctcgactcgagcgcgtttaaagcaccgcatcaaaaggaaaagagaagcgcgcgagcgagcgaggatccgggagcgtgaagcgcgaaaaaaaagcaggggagggagcgagcgaggaagcaacgcggaaacgggaaagcgagcgagacaagcgcccgatttggtcccccgcccgcttcgtttcctccgccgcacgtcttctcccccactaccactaggccactaccccacctcccctccagtcccctcgccttcccgccacgccacccgccgcgtcgccggagccctgtagctttcaccgcgcgcgcgtccgtccgtccgtcggcccgcccgcccgccccgagatcggggaggggcgcggtgtcatctctcctgagcaagcggcgcggcgatggcaggggggcaggcgcccgaggcgtcgcccgggcggtaccagcggcggcgcgacgagatcgacgacgacgactgcgccgacgtgctgggcatcgacgtgcgtgggcccgacgctgacccattcgacatccccgccaagcgcgcccccgtcgagcggctgcggcgctggaggcaagctgcacttgtcctgaatgcttctcgacgattcagatacacccttgacctaaaaaaggaggaggagaaggaacaaataagaaggaagataagggcccatgcccaagtcatacgggccgctttacttttcaaagaggctggggaaaagcagactcatgaaacagagttaccagaaattctcccacgagattttggaattggagaggagcagctgacagtgatgactagggatcataattattctgctctgcaagaatatggaggggtcatagggctcgcaaatttactgaaaaccaacctagagaagggaattcatggcgatgaggcagatttgtcatgcagggcaaatgcttttgggcctaacagatatcctcgcaagaaaggaaggagcttttgggtttttctttgggaggcctgccaggatatgacgctagttatccttatcatagctgcagtaatttctttagtactgggcattgcaactgagggcacaaaagaaggctggtatgatggcactagtattgcatttgcagtctttcttgtgatagtcgttactgctgttagtgactacaagcagtcgctgcagttccaacacctcaatgaggagaagcaaaacatacaagtggaggttattaggggtggtagaaggatacaagtatcaatatttgatattgtagtcggtgatatcgtggctttaaaaattggtgatcaggtctcagctgatggtgttgtaatcagtggtcattctcttgccattgatgagtctagtatgactggggaaagcaagattgttatgaaagatcagaagtcaccctttttaatggctggatcaaaagttgctgatggttatggcaccatgttggtaacggctgttggccttaacaccgaatggggtttattaatggccagcatttcagaagacaacaatgaagaaactcctctgcaggtgcggttgaatggagtagcaacattcataggtattgcaggcctttctgttgctgctatggtcctcgtagtcctctttgcaagatattttacaggacatactacagattcagatggctctgttcaatttgttaagaggcacactagtgtgaaatctgcaatatttggttcaataaagatactaactgttgcggtaactattgttgtcgtcgctgtacctgagggcttaccactggctgtcacactaactctggcttattccatgcgaaaaatgatggccgacaaagcactggttcggaggctttctgcctgtgaaacaatgggttcagcgacaactatttgtagtgacaagactggtacattaacattaaaccagatgactgttatgcaatcgattgtcggtgaagtaaagctgcaacctcctgctaatgttgataaactgtcatctactgtagcctcacttctacttgaaggaattgcacagaatacttcaggcagtgtgtttgaggcacaggatggtagcgtcgaggtaactggttcaccaacagaaaaggctatcctatcttggggtcttgatcttcgtatgaaatttgctgaggagagatcacgatcttctataattcatgtctctcctttcaactccgaaaaaaagcgcgctggggttgcagtggttgcgagagattcaaatgttcatgtacactggaaaggagctgctgaaattgttcttgccttgtgcacaagttggctcaatgtggatggctcaacacatgaaatgacacctgataaggaccctgtagaagagcaacaacaaggcacacatatagaagactataacttcacctag

SEQ ID NO: 221119 - DNA, 2022 bp, Zea Mays
caacttggccccaaatcgtggagtggaaaccctactcgtccccttccgcatcgccgcccaattcccccacccaattcccactctccgctcgacagatccatacatgatgggagaggccaaggagaacgacgtttatgaggaggagctcctggactacgaggaggacgacgacaagacggtcgatggctccgctgctaagcccaccggagaggtcgcaaagaagggctacgtcgggatccacagttccggtttcagagacttcctgctcaagccagagctgctccgtgctatccaggattgtggttttgagcatccttccgaaggtacactttcttctttggagcagaacatggtaacactttccattaacatggatccagaaggttaaacttttactcactgggttgctgctccaatttcttttggttccacatcagtgcaacacgagtgtatccctcaagccattcttggaatggatgtcatctgtcaagctaaatctgggatggggaaaactgctgtttttgtcctttcatccctccaacaaattgaccctgttgcgggtcaggtagcagcacttgtactgtgccacacaagggaactggcttatcagatatgccacgaatttgagaggttcagcaaatatcttactgaagttaaagttgctgtcttctatggaggtgttcacatcaggaagcataaagatttgttgaagaatgaatgccctcatattgtggttggcacgcctggtaggatacttgctcttgccagggataaggatctctccttgaagaatgtgaggcacttcattcttgatgaatgtgacaaaatgctggaatcacttgacatgcggagagatgttcaggagatcttcaaaatgactcctcatgataagcaagtcatgatgttttcagcaacgctcagcaaggagatccgtcctgtatgcaagaaatttatgcaagatccgatggaaatatatgttgatgatgaggcaaagttgaccctccatggtcttgtacagcactatataaaacttagcgaggcagagaagaaccggaaactgaatgatctcttggacgctcttgatttcaaccaagttgtgatattcgtgaagagtgttagcagagctgccgaactgaataagttactttgtgaatgcaacttcccatcaatctgcattcattctggaatgactcaggaagaaaggctaacaagatataagaacttcaaggaaggccacaagagaattcttgtggctacagatttagttggcaggggcattgacattgagcgtgtcaacattgtgataaactatgacatgccagactcagctgatacttatttgcacagggttggaagggctggacgttttggcacgaagggacttgcaattacctttgtttcctctgcttcggattctgatgttcttaaccaggtgcaagaaaggtttgaggtagacataaaggaactgcctgagcaaattgacacctcgacctacatgccatcataaatgggaaggacaactgagaagagaggaggataggggagtgagcagccgtctggagatggttacctttgaactatccgatctggaggatttgatttgcctcctttgtgtactttaaaaagggcagccaggatgatgatctgtattttaagacaatgctgtctgtttgggtttaggattttgctttgtcgaaaactagcacacttattgtactactgagcagcatatttgttttcatccctgggttaaatgatgcgtctaaacacttctgctggcctgaaaagagcaccaccgtcttggtctcccagcagcaggcagcattgactcgctaaaaggttacaattctcagatgcggatgagccagtcgtattcagcagcctgtagttacaattctcagatgccgatgagccagtcgtattcggcattctgtgttttgtttggttatcttttgctgagccttggaaacagtttctgtttttgcaaaagcgaaaaacaaacgcaaattaattgaagtggtg

SEQ ID NO: 221120 - DNA, 1206 bp, Zea Mays
ccgacctcttgctagggtttcattccccctctccctctcggccagcaccacctcacatcaccgtgatcctatgacagccatggcggccgaagcaccaccgtcggcttcaacgtcctcctcctcgacctcgcggctacctctgcctccagcggtggggtggtcagatccgcatagttgtacatcgggagctgcattagcttgactttgaagagcgagatcgggtatgagggcgtcctttacaccatcaacaccgaggagtccagcatcgggctttgcaataatcttggaaatgaacactgaggattaagctgaggaggatggtgctaacattgatttaaactcacaaggaaaggaaaatgtgttgttctaaaaacctccacaagacaactatcagctaggaacttgtgagatgatattattgataaggattacaacacacatggatatgtgaacttaaggtgcgaaggccatattagttgtttgaagaacaaatttaatcgtgaaaaagtacagtatccacaatgcacaggctcacagtcctacattgcaaaggcttatatattggttgacttggaagaaattgtggcagcaccagttcaggatggacaacaaccaaaatctcctacaaaagttgtttctaatgtgctatcgagctccagtgtgttcctatgcaatctggtcttcataccgcctccaagaaaagctccgcaatgacagtttctgcaaaggttcaacaactttaggatcaactagaggtcgagcaacaagaaaaagatggacttcatgaagaagtggaaaccttagagactggagcatctcaggacaccattgatagtatgaagaggtcaatgaaaggaaataacaatattcttcatcaactattaagcttcaatcgaggccaagtttttccatcttaactccgcttgaccccaataggacctgcaaccttatgactactttagtagctagttacaatagctctggatttgtagttataggattattttcaattatgcttactgtttaatactttgagttgaagttattggattatatttggattttaagttaaaggatttgcatctatatgttttgaagttatattattatctgttggatgaaatatttgtgttgaacaaattcatatgatattttggttgtgatgtgtaatattccatgacaatatgaatgcttatgaggtgttcc

SEQ ID NO: 221121 - DNA, 1108 bp, Zea Mays
ccgacctcttgctagggtttcattccccctctccctctcggccagcaccacctcacatcaccgtgatcctatgacagccatggcggccgaagcaccaccgtcggcttcaacgtcctcctcctcgacctcgcggctacctctgcctccagcggtggggtggtcagatccgcatagttgtacatcgggagctgcattagcttgactttgaagagcgagatcgggtatgagggcgtcctttacaccatcaacaccgaggagtccagcatcgggctttgcaataatcttggaaatgaacactgaggattaagctgaggaggatggtgctaacattgatttaaactcacaaggaaaggaaaatgtgttgttctaaaaacctccacaagacaactatcagctaggaacttgtgagatgatattattgataaggattacaacacacatggatatgtgaacttaaggtgcgaaggttgacttggaagaaattgtggcagcaccagttcaggatggacaacaaccaaaatctcctacaaaagttgtttctaatgtgctatcgagctccagtgtgttcctatgcaatctggtcttcataccgcctccaagaaaagctccgcaatgacagtttctgcaaaggttcaacaactttaggatcaactagaggtcgagcaacaagaaaaagatggacttcatgaagaagtggaaaccttagagactggagcatctcaggacaccattgatagtatgaagaggtcaatgaaaggaaataacaatattcttcatcaactattaagcttcaatcgaggccaagtttttccatcttaactccgcttgaccccaataggacctgcaaccttatgactactttagtagctagttacaatagctctggatttgtagttataggattattttcaattatgcttactgtttaatactttgagttgaagttattggattatatttggattttaagttaaaggatttgcatctatatgttttgaagttatattattatctgttggatgaaatatttgtgttgaacaaattcatatgatattttggttgtgatgtgtaatattccatgacaatatgaatgcttatgaggtgttcc

SEQ ID NO: 221122 - DNA, 1100 bp, Zea Mays
ccgacctcttgctagggtttcattccccctctccctctcggccagcaccacctcacatcaccgtgatcctatgacagccatggcggccgaagcaccaccgtcggcttcaacgtcctcctcctcgacctcgcggctacctctgcctccagcggtggggtggtcagatccgcatagttgtacatcgggagctgcattagcttgactttgaagagcgagatcgggtatgagggcgtcctttacaccatcaacaccgaggagtccagcatcgggctttgcaataatcttggaaatgaacactgaggattaagctgaggaggatggtgctaacattgatttaaactcacaaggaaaggaaaatgtgttgttctaaaaacctccacaagacaactatcagctaggaacttgtgagatgatattattgataaggattacaacacacatggatatgtgaacttaaggttgacttggaagaaattgtggcagcaccagttcaggatggacaacaaccaaaatctcctacaaaagttgtttctaatgtgctatcgagctccagtgtgttcctatgcaatctggtcttcataccgcctccaagaaaagctccgcaatgacagtttctgcaaaggttcaacaactttaggatcaactagaggtcgagcaacaagaaaaagatggacttcatgaagaagtggaaaccttagagactggagcatctcaggacaccattgatagtatgaagaggtcaatgaaaggaaataacaatattcttcatcaactattaagcttcaatcgaggccaagtttttccatcttaactccgcttgaccccaataggacctgcaaccttatgactactttagtagctagttacaatagctctggatttgtagttataggattattttcaattatgcttactgtttaatactttgagttgaagttattggattatatttggattttaagttaaaggatttgcatctatatgttttgaagttatattattatctgttggatgaaatatttgtgttgaacaaattcatatgatattttggttgtgatgtgtaatattccatgacaatatgaatgcttatgaggtgttcc

SEQ ID NO: 221123 - DNA, 2957 bp, Zea Mays
ggggatttatctgtcttctactaccgccttcaacacattgaaatggctctaaagtatgtcaaccgtgcgctatatctgcttcagttttcatgtgggctttcacacccaaattcagctgccacctacataaacgtagctatgatggaagaaggcatgggaaatgttcatgttgctcttcgatacttgcatgaagccctgaagtgcaataagaggttgctaggagctgatcacatccagactgctgcaagctaccatgctatagccatagccctttcaatgatggatgcgtactccctaagtgtgcaacatgaacaaacaaccatgcagatacttcaggagaaactaggggaagatgacctccgaactcaggatgctgctgcatggctagaatattttgagtcaaaagcattagaacaacaagaggctgcccgaagaggcatgccaaaacctgattcatctattgcaagtaaaggacatcttagtgtatcagatcttcttgacttcataagcccagtccaggaaagaaaagaaagcaatgtgcaaaggaagtgtcggcgtgcaaagagctcatcatggtgaatcagttgaagaaaaggagaatttccagcatgactcaggatctcttggagcaagtaaagacggttttgaagaagaaaaacctgatgtgcatcctcctgctgtattagaagaaaattatgctgcccatgaagagcagaagcaatgtgatgttttatcaccagaagaatattctgatgaagggtggcaagcagctaatatgagaggaaggtccgcaaatgtaaggaagaaaagtagtcgcaggaaacccgctcttatgaaattaatggttgatcgtttcgaagatgatcatacaggttctgtgtataggactggtttacagcctcgaacaaaaggggagaaagatgattctgcaactgctcctagccagatttcatttggtagctttttaaaaactgacaagttgaatggggatcccagcattgctgaagataagtctttgaatggtactgctaaaccagaacaatttacaaatccaacaggaattaacaggccaaccagcattgcttccaagtttatatcatacaaagatgtggctgtttcgccccctggcacagtattgaaaccaattttggagaagaaggaagcaaaggagaagggtagtggacatgatatttatctaacactgtcatccgaggaagaagatccacagtttacagaaaatgagaaggaaaagccaagtgaggacagtagcaaagaggttctttcaagtcagcaagacttagagagtcatgtagaaacacctgacagcaacagtgatgaaaacccatctgcacctaagaaggcatctggaagcaaactgtcagcttcagcgcctccattcaatccaggatcactcttatcaatgtcccacccatacagcacggtggcaatatatgatgctagtgctgttattcaggcagtaccaaaccaagcaatggagattctccctcatgccattgacactagagtgcctcgtggccctcggtccaccttgtactatcgtactgggcattccttccaaaggaagcaaggttacacgcacagccagagcactattgtaaggggtagttactcccccacaaccatgaacccccatgctgctgaatttgtgcctggaaaaacttcgcagcaatctgatgtggctgacagagaacccagtcctgctaatcatgtggccaattctgatctggatgttgtatcacagaccacagatgaagtgaaggctgaaacacctgccactgaaaaggcaggtcaagttgagaaagtcgtttcaggtaaaggaaaggaaaacagagggaaagacatcgtgagaaactcatacaaaacagaacttgcaaggcaaattttgctcagtttcattgtgaagtcagtgcatgacagtttaggttccgcccaagctgaaccagagaggaagccaagtggatcagatgaagctagtaataaacagagcagcaacttagtcaagaatgcttctggtcgcaaagattcagataaacaagagaaatccatggaggttcccaagggcctgaaggatacagagggatttacagtcgtttcaaaacgtcgaaggcggccccagccattcatgaaccccataaacggcctctgttctcagccgtctatttgcacctctgtcagttaaggtctcattgcattttcaaagacctgcaatagtttggaagatggaccattgcttttgcttaggggttggtagaagaattttgccgtatccaagcgagcagcgagcatgtagtcaaactgtacaaaattttccaggataccctttgtaataataataaaaaaaaactgctgtaatctgcagtagctgtagcgctgaataaagtattcctttgtatgttagatatgacagaatcagaggaaatagcaagcagatgtttaggttaatccaatatcccagtagtgcttctcttatgccctagtgtttctgcagtttctcaagatgtcgtggggatttatcgttgcaatctgcaaatgctgtcagagcagaagaaactgaatctgctaggcgccaagagtttgttcatgaaggcatgtcttttattgcttctttcccctgtgcccagactgctcagtgtggtcattggatgccttgtcagaggacggagcagcgtttcaccgtgaagcaattgcagctgcagaccagatcaccagaccactgaggccaggcgtgaactgggccggcagttttaaagctgttggcagctacgtatactgtacgagtctaaggagtagcctgcagctaagcgtagctgcagagaccacacaaatgtgaatcaaatcagttcagttccaaactgtcattgctgggagccaacatccgagactgaaaaatatgttgtgcatacgtatttttcttttgcatttaaatttgaaaccgg

SEQ ID NO: 221124 - DNA, 1647 bp, Zea Mays
ctatagcgcaacaccgcctcctctctcagccagtcagccttatccccaaatcgcttcttctctgctgattccataccgcctcctctccctggccgatccatggtgctcgtctctagctcatgtcttgccgccggccgagcccctccccagcgcccttggagccggcgtcctctgccctcatctcattccccgacgccgccctctccccctcagtgctctgctggtcggcgtcttctccctgcccgacgtttctagcgccatggccgccgcgccttgggtcgcctgctccactgcgccgatccgcccatctccctgctgccgctctcccatggcgcgtccctgcatcttgcttcagctcgctctgccatctcccttggcgccctagccccaacgctgagctccctacccggccgcgcccctggtggttgagctcgccgagcttccttttctatcgctcgtcctcgcccattcggcgccctcatctcaagccagtccagcctctctaatcgccactctcccctatccccttgctgttagcacatggcgagctaaccccatgtgccagtagagttcgtcattccctaagcagcacctccctccatggatgcctcgttgtcgacttgtgcagttcatatttatcggtgaggtcccttttgtcttgtgttacttatctctttaaattgatacatgtgtgcttatgtgtgagatgtgaaggggaaaatcccaggattttggtggagaagaaagcacagttcaaatttgacgcccgccaggtgttcgacgaaaatgttcgaattgggtttcgtcgttgattttgacgcctgccaggtgttcatctcaaactacaatcaccgttgaaaatccgaggcgacgggaaagttaggtggcatcaccagtgatggcgttcgatccttgaaatgtacattatgtgataagagtaagcgtcactagagaatgggaattccaaggcgcaacaaatgatggtcctctccatcatgtcaacatgatcatatccgatgaaccggtgatctatatccactcaaatacatttatgaaaaacaagaatcgtgagtgcaatggcaaatggaaggtgaaggcccttttgattgacaacttaggaaaagatggaatggaactcaaattttggtggtcggtcaagtgtgtagagttgaaatcatatatacttagttaggctcaaatttagcgcaattcagttagtattttagtttggatttagagtacacttatgtatgagttatttagcaatgcttatttgtgagatattgaatgatacttatctacattatattaactatagtgttgttaaatatatgtgtgtatgtatattataatgtggtatctcaaaaatgattataaattgaagaatgtattgccatgtaagtcatttcatttaaaccataataagacagttcccaaaacgtacaatatcagtctctaaaaaagtcggttcctaaaacgtttaatatcagttgcctaaataagatggttttcctattgcaagcgtctattattataggacattctagacaatttgataaatattttgtgacttataatatccgtattctcgatggttctttagaataagtgtcttaaacaaaatctaatttaagacggtttaccgga

SEQ ID NO: 221125 - DNA, 1693 bp, Zea Mays
ctatagcgcaacaccgcctcctctctcagccagtcagccttatccccaaatcgcttcttctctgctgattccataccgcctcctctccctggccgatccatggtgctcgtctctagctcatgtcttgccgccggccgagcccctccccagcgcccttggagccggcgtcctctgccctcatctcattccccgacgccgccctctccccctcagtgctctgctggtcggcgtcttctccctgcccgacgtttctagcgccatggccgccgcgccttgggtcgcctgctccactgcgccgatccgcccatctccctgctgccgctctcccatggcgcgtccctgcatcttgcttcagctcgctctgccatctcccttggcgccctagccccaacgctgagctccctacccggccgcgcccctggtggttgagctcgccgagcttccttttctatcgctcgtcctcgcccattcggcgccctcatctcaagccagtccagcctctctaatcgccactctcccctatccccttgctgttagcacatggcgagctaaccccatgtgccagtagagttcgtcattccctaagcagcacctccctccatggatgcctcgttgtcgacttgtgcagttcatatttatcggtgaggtcccttttgtcttgtgttacttatctctttaaattgatacatgtgtgcttatgtgtgagatgtgaaggggaaaatcccaggattttggtggagaagaaagcacagttcaaatttgacgcccgccaggtgttcgacgaaaatgttcgaattgggtttcgtcgttgattttgacgcctgccaggtgttcatctcaaactacaatcaccgttgaaaatccgaggcgacgggaaagttaggtggcatcaccagtgatggcgttcgatccttgaaatgtacattatgtgataagagtaagcgtcactagagaatgggaattccaaggcgcaacaaatgatggtcctctccatcatgtcaacatgatcatatccgatgaaccggtgatctatatccactcaaatacatttatggtagcaacatgttgtacctaatatgtttttttatcacctgttaatattgatgccagctgtacaaacggttctgattacttatatcctctgatgtacttctacttagcaccatgttctaacttacacattgcttagtcacctctccagattgtacctttactcttttaaactaatatgtttattactaattttttacgaagtacaatcatgcaacatggactgtcaatgaatctaaataccatatcatttttctacaatgtcttctatttctactcatatgattctgttgtaccaatagggtacacctatccatgctaagattcaagtagataaagaatatgaactcatcttaagtctgtactatgttgtatactataatgttttatctggttgacaaccagcatcgtcactttaaatacaatcatactacagttctactaatacactgatttattgttctccacgcgcgcatgggcgcgcataatacactagtgtatacaagacagcctcaattcatctcctaacaaaaaagggggttaatattaggtgcatcttagcagatatgaaatatagtactatataagagagccacatgttacaagacaattgggttatagctacaagcttcgttatatgttc

SEQ ID NO: 221126 - DNA, 1863 bp, Zea Mays
acagcctcctgtggttctgcaagcaggattctctgcaccaactcctatccaagctcaatcatggccaattgctctaaggggtcgtgatatagtagctgtggcgaagacagggaattggcgacacaaattcaagatgaagcaatcaagtttggcagatcttcaagaatatcttctacttgcttatatggaggtgctccaaaaggccctcagctaagagagttggagcgtggtgctgacattgttgtcgcaactcctgggagattaaatgacattttggaaatgaatagagtgagcctgcaccaagtatcatatcttgtccttgatgaagccgaccgtatgcttgatatgggatttgagccacaaataaggaaaattgtgaaacaaataccaccgaaacggcaaactcttatgtatactgccacatggccaagagaggttagaaaaatagcgtctgatttactggctaacccagttcaagttaacattggaaacactgatcagctagttgcaaataagtcaattacacagcatgtggaagttatcccacatatggagaaatcaagacgacttgatcagatcttgcgctcacaagatcctggatcaaaaagcataatattttgctccactaagaggatgtgtgatcagttagctcgaaacctatcacggcagtatcgtgcttctgctattcatggtgataaatcacaggctgagagggattctgtgttgaatgactttcgaagcggcaggtgtccagtacttgtagccactgatgtggccgctcgaggcttggacataaaggacatcagggtcgtggttaactatgatttcccaactggtgtggaggactatgtccatagaattgggaggacaggtagggctggtgcaacaggatctgcctacacattcttcggtgaccaggattcaaagtacgcttcagaccttgtgaagattttggagggtgcaaaccaatctgtgccgccacagttgaaagaaatggctcttcgtggaggatatggtggaagatcacgtcggtgggcatcttctgatgactcttatggtggtcagggatatggtgctaaaagatcaactgatagcttcaataataacaacttcggcaaccaggctggaggtggttcaagctttcactcgagctccagtggcggtcagtttggtgatactacgagcttccatggcagtgtccgcaacaatcagacgggggacaatgcgagctttccacccagctccagcaacaatcaggctggcgatggtctcagttttcatgaaaggttctatggatcacgtggaagggaccagagcagaacaagcaatgatggattccgtgccaggagcagaagtcctcctggcaagcccgtggaagtttccaactggtgattgcatccactaggtgcaatccaatttttgcgatggtgacgaaaccaagtagaagatggcaccctaacaagttatattatttccttttcttatcctgcttagatccaaggatgtgatggtctgaaccctaacggtctcctgctatcttgatttgacgtctgggagacgcttgattccgtgcctgtgggttgtaaagcgttaaaacttgactttgctagtgtactcccaatgatataacccaatcctgggtaaacaaacgcatggggatgaattttggacgaaaccatggacaactgatgtgtgtttaatgtcatgtacaatctatgtcgaaggctgttgtaaatgccgtccgcatagtttatattgagatgagtgtctgttattgcatgtgttcgccgtggtttgtaaacgcatgtgttgtagacagccacttgacgtagctgttcgccgtggtttggaccttggaggttg

SEQ ID NO: 221127 - DNA, 2464 bp, Zea Mays
gtgtccgcctcctcccctactccggccgcagccgccgacgtcgccattcgcattctgcggcgccaatcgataggggtcagcgagtggctgggatggcgtcgtcggcgtccgcgccagcgtccacgggcccgcgctacgccccgccggatccgacgctgcccaagccgtggagggggctaatcgacggcaacacggggtacctctacttctggaacccggagacaaaggttacgcagtacgagcgtcccgtcgctgccgtgcccgccccccaatcgcagccgcttgtctactccaggcccgatgatgtgccgagaagcagcgcacctgccgagcgctcggaagctgcggtgagccgcccgcaatttgtgcctccctccgataacaggacaaggattgatcactcagagtcaagctctgcatctggagtgaacctttcacaaagtgctctgtccaccaatcaagtttctcagtatgccaatgggagccaaatgtcaacagaagcatatcgtgccaagcatgagattactatcgtcggcaatgaggcacctgcaccattcatgacatttcaatccacaggcttcccatcagagattctaagggaggttctgcaagcaggattctctgcaccaactcctatccaagctcaatcatggccaattgctctaaggggtcgtgatatagtagctgtggcgaagacagggaattggcgacacaaattcaagatgaagcaatcaagtttggcagatcttcaagaatatcttctacttgcttatatggaggtgctccaaaaggccctcagctaagagagttggagcgtggtgctgacattgttgtcgcaactcctgggagattaaatgacattttggaaatgaatagagtgagcctgcaccaagtatcatatcttgtccttgatgaagccgaccgtatgcttgatatgggatttgagccacaaataaggaaaattgtgaaacaaataccaccgaaacggcaaactcttatgtatactgccacatggccaagagaggttagaaaaatagcgtctgatttactggctaacccagttcaagttaacattggaaacactgatcagctagttgcaaataagtcaattacacagcatgtggaagttatcccacatatggagaaatcaagacgacttgatcagatcttgcgctcacaagatcctggatcaaaaagcataatattttgctccactaagaggatgtgtgatcagttagctcgaaacctatcacggcagtatcgtgcttctgctattcatggtgataaatcacaggctgagagggattctgtgttgaatgactttcgaagcggcaggtgtccagtacttgtagccactgatgtggccgctcgaggcttggacataaaggacatcagggtcgtggttaactatgatttcccaactggtgtggaggactatgtccatagaattgggaggacaggtagggctggtgcaacaggatctgcctacacattcttcggtgaccaggattcaaagtacgcttcagaccttgtgaagattttggagggtgcaaaccaatctgtgccgccacagttgaaagaaatggctcttcgtggaggatatggtggaagatcacgtcggtgggcatcttctgatgactcttatggtggtcagggatatggtgctaaaagatcaactgatagcttcaataataacaacttcggcaaccaggctggaggtggttcaagctttcactcgagcttgtataacagctccagtggcggtcagtttggtgatactacgagcttccatggcagtgtccgcaacaatcagacgggggacaatgcgagctttccacccagctccagcaacaatcaggctggcgatggtctcagttttcatgaaaggttctatggatcacgtggaagggaccagagcagaacaagcaatgatggattccgtgccaggagcagaagtcctcctggcaagcccgtggaagtttccaactggtgattgcatccactaggtgcaatccaatttttgcgatggtgacgaaaccaagtagaagatggcaccctaacaagttatattatttccttttcttatcctgcttagatccaaggatgtgatggtctgaaccctaacggtctcctgctatcttgatttgacgtctgggagacgcttgattccgtgcctgtgggttgtaaagcgttaaaacttgactttgctagtgtactcccaatgatataacccaatcctgggtaaacaaacgcatggggatgaattttggacgaaaccatggacaactgatgtgtgtttaatgtcatgtacaatctatgtcgaaggctgttgtaaatgccgtccgcatagtttatattgagatgagtgtctgttattgcatgtgttcgccgtggtttgtaaacgcatgtgttgtagacagccacttgacgtagctgttcgccgtggtttggaccttggaggttg

SEQ ID NO: 221128 - DNA, 3854 bp, Zea Mays
ggggagaggggagaagtgggaaacggggaacggcgagaacacgcggatttcgctgcgggagaaccggagaaggatagcatgcggtcgacggtgttggtggcgcggagcctgcagaaggcgtccgtcccgccggccttgctctcagacccgacgcccggcagcctccagcccacccgcctcgccgcccatgtcaatggcgccggctcctcgtgctctgtttacctcgcctctggctgccgcgtctacaggatcgagatggaagataagactggatgctagtgtgatgctgtccaaaggaaaggagagcctcttgattcctgataatgcacaggtcatcagttcgtcggttgtggatcgctgcccacatcgttctgagatccagagtgtagctcttgcagagggcgaagatgactgtttgattctgggaacggttgactcatatggtcatcttattgtatctcgtttggacatcgtggctgatggacatcctattcagtaccacctcgtgattgtggtgttggggaaggcagttgggctggggtatgctttagcccaatgcagcaatccatggtagctgttgctcgtcagttgtgcaagaccattgatatctatgatcaagatattcacgttcggagtttacgcacatagagcctatattacaagctactgcatacccaaaatgactctagcttcctcatcgactcttaatgatctttgtatgcacaatctttttattcaaaggaggctgctgtggattcaacacataaaccatgagttcttttagcagcatccattatctcacaattgcagactgtaatttgcacgatttagggggtaaaacttaacttgcaggctatggtatccatcttcgtttagctttgttcaatactctccacatgtgaacgaaagtagttctctcttggcaactgcagaaggttctcagctgagcatctgggacctaagaatgaataacaatgggggatgcgtacatcgcattactggatcagttggagacattatatactccacatgtagctcaccttcaggactgattgctagtggtggaactgatcgtgctgtcaccatctatgatcctcgcaggtggtctgctctgtcaagatgggtgggctgctccaagtttgagattacaggtcttgcgttttcatcagttgacgaatctttcatctacgtccaaggtgttgattatgagattacctgtggacattggaaacaaagtgagcgagcattctcatttcgaggggattccaactggttggggttttcaaagtgtgccaacaatgatgtgatagcagggtggtgcgagtctggaagtatcttcattgctgatgctaggcagctataggatcaatatccccttcatctggtgccctggagccccggaagtcaccagtatgtgttgtgttttgccatttctgtaagaatgtgatgtttacaggaggaactgttcttaactctccagtaccaagtagcatgcgaactcatgcccattggccattatggttcttgaaaaacatgattattccagatttcatccagcaaattgaattgaatttggtcaccagaaggggtattggcttgtaccaatcattggtatcttttattaatggggtctcagcagtcatcatatcacgtcaagttcacgctttatcttgaatattttgatcattcaagcaccaacaaggtacacgcctctggaagctccctggcattacgatgtttcagtttacgcagaatgactggcgtcacccgttccaagagctgcatcaaccaaatgtattctttagagaaacatataaaacggctaccccaagaaaagcaaatgaacattgctcaagtcagtaaatccaaagccaaactgaagagccataaaagagtgtgcttagttagaaggcgaggttggatgggaatgggatcatctttctggggatatgatcatccaagttgtatgtttagttgagttttatggtagtcaatattttttggtaggagtgaggatgaatagaatagttagctaaatcatgtcttgtaaatctgatatgctaatattcgacctaacactcacaaatatttttcaatgttaacattctcacaaaccattaacatagtatttatcactaacaatcctttgattgacccgccagctgtacactaatcagcacaacacttaccaatcacaattttatgatgataaatactaattgttacaatattctaaccataattaatcatttaaccagttatcaccattagattaagtggatgataaaaaaggatgggatcccgtcccgcaaaaatccaaacggaggtggatcgatgcgatgatgagatatgcttctttcgtagttccatttttgaccatgtgcctgaacggtgtgagaaaacgtcaccgtctcgattcctattgatagtgacaaaactacgcgatatctaattgcattcggcttaagcttgacaaatggggctgcaacagataagtactttcaggattgcaggctcgagccttttttttttaaaaaaacacaggtgtaattggccccatgaaaaagtaaaagatgaaaaggacaatgtcacacttgtcatgtgttgctgcaacgcaattgcaagctatcaacatcaaatgttgtctatttgccaaaccacttaggccggctacgaaggagccttagacacgttagctcattggagtgtcaaataggcaaaggataccaaacttccagattcgagaaagcgtaggaaattgcttatcttaagcatgaacagtgttttgttaaccatgattgtggtccttacgtatgttgttgttgaagacagtcttctcatatttgggaacatgagtgctaaactgagatgaaaggctgctttataatttctgaagcgatgggttcagccgttccagaggtatattatttgactaaacactcccaagtaccagcaataacaagtactgtgtcctaggctggtttcaaacgtcatccaaccgaatttcaataatcttcgaatttaatgggccatataaactaacataatacatgcatgcacttcacacccgttaaccaaaggaagttacctctttaagccgcttctggtgccgctcttcctgaaatacacgaacatcaaaagcttatgacaagggaatggcaacatcatttagaaggtaagatgtttgcatatcgataaagatgaacattcatgaggcactggtatctgaaaagaatggtttcacacacaatcagattatgcatagtagagagatgaaatgaattggggaaaataacacaacggatttttttctctctatgtaactactgtgcatctatactacatgcattgggacttgcatgaatatggtttacataatttttgtaagattttgtattgcaaagttttggtgctgtgctatgactagtctagaagtactaaaaggtcactgaaaataagtgtcaccacgatatattttgactgcagaatccaatttgtgtttgaattcacctagtcatggatactacacagtttcccacacaaacccaatgtgtcagagtcgagtattacctgttctctcaacaactcggcattctcctcctcgaggtgcgttaccagcgattctagctcggcgatataagccttcagcaaccgagcaaaagacaaacaaattccccacttacattcgcacaattggaagcttaacaatcacgttaaattgcaacatctgtgcacccacctgcttcctctcccgtgaccgggcagcagactcgcggtttttgatcattcgtttctgtcgctgcatcgcggcgcgatccactggatccatgagctgccgcttccttcccctcccg

SEQ ID NO: 221129 - DNA, 1176 bp, Zea Mays
gctcacatcaacatcacatgttcacatccatcttcgaaccccttcttcctctcttcagcgccgcacccgcgcccgcgccgtcgaaggcggcgcctagtctcgaggcttgcacgctgccgcggaggatcgcctcgctactgcgcgccatcgcctccgatctcctctatctccaatctgctccctcatcgccgtgcagtggaaactaggggaccgattcctcttctcgtttgtcgcatatttctcgctgcgtgccgcgtgctgcggtgagtgattctccaagaattctggggacgctgatctgagtccgcacagaacgcagcggcagcaatgatgatgtcggacgatgacgatgctgagccccagctcaacgcggtggagggctactacttcgttgactccaagaacgagaaggagcctgtctgcttctccaccctgcctttctggttcggggacactgatgatcttcctgacggcaagaagaagctggtgctgcgcgggactggtgacccgggcgtcaaggtgtacgatgaggtggtggcctgcaggctgggtctcgaggggaaacaacccgagtttgcagtgctcacagcaaaaggcagacgttggatacgtctcattaggcccttgaacagctacgaggaaatgatcaggactgtgttgatcacagcgcagatgctgcattttctaaggaggaagcctcatgagccagaaaaaaccttgtggaaccacctttgcaaagtttttaacaagtttgacgttccaccctcagaggacgatttcaggaaccactgctcactgatgaagcagtttgcggcaaaagatcctgtcttagcaaaatcagagattttgcgagtatttattgaaggaaaatctagaaaaaaattcactgaggttggtgcagaccatattgatgtcaagcagccgttcatcactgatgatgagggcatagatgaaatgaatgtggaagatgtcgataatgaatctgatgaagatgacgatgaatatttgtttgattcaatatgtgctatttgtgacgatggaggagacatattatgggcactgacatgctggttatacatgagcccactggccactcacttgcccaatctcagcggaatgtatatcaatcatctgtctggaatctgtggttgtgaattcattgcttacatgtttatc

SEQ ID NO: 221130 - DNA, 4330 bp, Zea Mays
gtgaggtcacccacgaccgcgactggactcgagcgtctctcactctagtcgccaccctcacaagtgccagcgccagcgcgtggttcctgggcgggcgggccccgtctccctctccggcttcctttctccgtttctcgctcgcctcttctctctcccggcgtccgcgcccgccgaaacactctcgaaaggaaaccgatctgtcacccaaaccgcgcctccccgcggtgatctcgactcgagcgcgtttaaagcaccgcatcaaaaggaaaagagaagcgcgcgagcgagcgaggatccgggagcgtgaagcgcgaaaaaaaagcaggggagggagcgagcgaggaagcaacgcggaaacgggaaagcgagcgagacaagcgcccgatttggtcccccgcccgcttcgtttcctccgccgcacgtcttctcccccactaccactaggccactaccccacctcccctccagtcccctcgccttcccgccacgccacccgccgcgtcgccggagccctgtagctttcaccgcgcgcgcgtccgtccgtccgtcggcccgcccgcccgccccgagatcggggaggggcgcggtgtcatctctcctgagcaagcggcgcggcgatggcaggggggcaggcgcccgaggcgtcgcccgggcggtaccagcggcggcgcgacgagatcgacgacgacgactgcgccgacgtgctgggcatcgacgtgcgtgggcccgacgctgacccattcgacatccccgccaagcgcgcccccgtcgagcggctgcggcgctggaggcaagctgcacttgtcctgaatgcttctcgacgattcagatacacccttgacctaaaaaaggaggaggagaaggaacaaataagaaggaagataagggcccatgcccaagtcatacgggccgctttacttttcaaagaggctggggaaaagcagactcatgaaacagagttaccagaaattctcccacgagattttggaattggagaggagcagctgacagtgatgactagggatcataattattctgctctgcaagaatatggaggggtcatagggctcgcaaatttactgaaaaccaacctagagaagggaattcatggcgatgaggcagatttgtcatgcagggcaaatgcttttgggcctaacagatatcctcgcaagaaaggaaggagcttttgggtttttctttgggaggcctgccaggatatgacgctagttatccttatcatagctgcagtaatttctttagtactgggcattgcaactgagggcacaaaagaaggctggtatgatggcactagtattgcatttgcagtctttcttgtgatagtcgttactgctgttagtgactacaagcagtcgctgcagttccaacacctcaatgaggagaagcaaaacatacaagtggaggttattaggggtggtagaaggatacaagtatcaatatttgatattgtagtcggtgatatcgtggctttaaaaattggtgatcaggtctcagctgatggtgttgtaatcagtggtcattctcttgccattgatgagtctagtatgactggggaaagcaagattgttatgaaagatcagaagtcaccctttttaatggctggatcaaaagttgctgatggttatggcaccatgttggtaacggctgttggccttaacaccgaatggggtttattaatggccagcatttcagaagacaacaatgaagaaactcctctgcaggtgcggttgaatggagtagcaacattcataggtattgcaggcctttctgttgctgctatggtcctcgtagtcctctttgcaagaaattttttctttgcttccagatattttacaggacatactacagattcagatggctctgttcaatttgttaagaggcacactagtgtgaaatctgcaatatttggttcaataaagatactaactgttgcggtaactattgttgtcgtcgctgtacctgagggcttaccactggctgtcacactaactctggcttattccatgcgaaaaatgatggccgacaaagcactggttcggaggctttctgcctgtgaaacaatgggttcagcgacaactatttgtagtgacaagactggtacattaacattaaaccagatgactgttatgcaatcgattgtcggtgaagtaaagctgcaacctcctgctaatgttgataaactgtcatctactgtagcctcacttctacttgaaggaattgcacagaatacttcaggcagtgtgtttgaggcacaggatggtagcgtcgaggtaactggttcaccaacagaaaaggctatcctatcttggggtcttgatcttcgtatgaaatttgctgaggagagatcacgatcttctataattcatgtctctcctttcaactccgaaaaaaagcgcgctggggttgcagtggttgcgagagattcaaatgttcatgtacactggaaaggagctgctgaaattgttcttgccttgtgcacaagttggctcaatgtggatggctcaacacatgaaatgacacctgataaggctaatcaactcaagaaacttatagaagatatggctgagcaaagtcttcgatgtattgcttttgcttatcgaaatcttgatatgaaggatgttccaagtgaggagcaaagaatcaactggcaattgccagataatgaattgactcttattggaatcatagggatgaaggatccttgtcgccctgaagtaagagacgctgtcgaactgtgcaaaaaggctggtgttaaggtacgaatggtaactggagataatctgaagacagctaaagcaatagctcttgagtgtggaatactcgatgactcagaggcatctgcacaagctataatagagggaagagttttccgtgcttacgatgatactgaaagggagaatgttgctgacaagatttctgtgatggcacgatcctctcctaatgacaaacttctcctagtaaaagctcttaagaaaataggccatgttgtagctgttactggtgatggaacgaatgatgctcctgcattgcatgaggcagatattggtctttctatgggcatccaaggaacagaagtagccaaagagagctcagacataataattctggatgacaatttttcttctgttgtgaaggtggttcgctggggtcgctctgtttatgcaaatatccaaaagtttattcagttccagcttaccgtaaatgttgcagctcttgtcatcaatgttgttgctgctgtttcctcaggaaatgttcctctaaatgctgttcagcttctctgggttaatctcatcatggacacactcggtgctcttgctttggctactgaaccaccaacagatcaacttatgaggcggccaccagttggacggagagaacctcttgtgactaatatcatgtggagaaacttgtttattcaggctgtctttcaagttgctgttcttctgactctcaactttaggggtcgggatcttttgcatttgactcatgacacactaggacactctagtaaagtgaaaaatacacttatattcaacacatttgtattgtgccaggtgtttaatgaggtcaattctcgtaaaccagaagaactgaacatcttttccggagtttcaagaaatcatcttttcttggcagtagtgagcataactgttgtgatgcaggtgataattattgagttcctcgggaaatttacatcaacagtgagactcaactggaagctttggcttgtttctgtagttattgcttttctaagttggcccttggcttttgttggaaaattcattccagttccgaggactgaattgaaggatctcattgtaaggtgttggcctaaacgtggcgagagtgcagcacaacagactcaggatgacagaatggaagtaccagtgtgaagctgttcttgagcaacttctcgaaattatcaggtgttagtgttggtgcacatagatggtgttggctaattttgggtgctgatttttctaaccatcctaccttgttgcctggctatgaattctatggctgtagtcagcaatcggggaggtaaacctctgctgactcgtgatctagaatttgaacactgtaaacaaaatatgtttattgtagcctaacgaaggtcaggacctccagtggtttattgcacaagttgtgcagtcggtcccagaatcatttggggaaggcgctataaacagtttttcttggcaggagtggagtgtagctccttttcgctaatatcatttttacttttagatgcaatcaagaacattttgtcaaacactctaatagtaattggctgattttgttaaaaaacaaa

SEQ ID NO: 221131 - DNA, 4309 bp, Zea Mays
gtgaggtcacccacgaccgcgactggactcgagcgtctctcactctagtcgccaccctcacaagtgccagcgccagcgcgtggttcctgggcgggcgggccccgtctccctctccggcttcctttctccgtttctcgctcgcctcttctctctcccggcgtccgcgcccgccgaaacactctcgaaaggaaaccgatctgtcacccaaaccgcgcctccccgcggtgatctcgactcgagcgcgtttaaagcaccgcatcaaaaggaaaagagaagcgcgcgagcgagcgaggatccgggagcgtgaagcgcgaaaaaaaagcaggggagggagcgagcgaggaagcaacgcggaaacgggaaagcgagcgagacaagcgcccgatttggtcccccgcccgcttcgtttcctccgccgcacgtcttctcccccactaccactaggccactaccccacctcccctccagtcccctcgccttcccgccacgccacccgccgcgtcgccggagccctgtagctttcaccgcgcgcgcgtccgtccgtccgtcggcccgcccgcccgccccgagatcggggaggggcgcggtgtcatctctcctgagcaagcggcgcggcgatggcaggggggcaggcgcccgaggcgtcgcccgggcggtaccagcggcggcgcgacgagatcgacgacgacgactgcgccgacgtgctgggcatcgacgtgcgtgggcccgacgctgacccattcgacatccccgccaagcgcgcccccgtcgagcggctgcggcgctggaggcaagctgcacttgtcctgaatgcttctcgacgattcagatacacccttgacctaaaaaaggaggaggagaaggaacaaataagaaggaagataagggcccatgcccaagtcatacgggccgctttacttttcaaagaggctggggaaaagcagactcatgaaacagagttaccagaaattctcccacgagattttggaattggagaggagcagctgacagtgatgactagggatcataattattctgctctgcaagaatatggaggggtcatagggctcgcaaatttactgaaaaccaacctagagaagggaattcatggcgatgaggcagatttgtcatgcagggcaaatgcttttgggcctaacagatatcctcgcaagaaaggaaggagcttttgggtttttctttgggaggcctgccaggatatgacgctagttatccttatcatagctgcagtaatttctttagtactgggcattgcaactgagggcacaaaagaaggctggtatgatggcactagtattgcatttgcagtctttcttgtgatagtcgttactgctgttagtgactacaagcagtcgctgcagttccaacacctcaatgaggagaagcaaaacatacaagtggaggttattaggggtggtagaaggatacaagtatcaatatttgatattgtagtcggtgatatcgtggctttaaaaattggtgatcaggtctcagctgatggtgttgtaatcagtggtcattctcttgccattgatgagtctagtatgactggggaaagcaagattgttatgaaagatcagaagtcaccctttttaatggctggatcaaaagttgctgatggttatggcaccatgttggtaacggctgttggccttaacaccgaatggggtttattaatggccagcatttcagaagacaacaatgaagaaactcctctgcaggtgcggttgaatggagtagcaacattcataggtattgcaggcctttctgttgctgctatggtcctcgtagtcctctttgcaagatattttacaggacatactacagattcagatggctctgttcaatttgttaagaggcacactagtgtgaaatctgcaatatttggttcaataaagatactaactgttgcggtaactattgttgtcgtcgctgtacctgagggcttaccactggctgtcacactaactctggcttattccatgcgaaaaatgatggccgacaaagcactggttcggaggctttctgcctgtgaaacaatgggttcagcgacaactatttgtagtgacaagactggtacattaacattaaaccagatgactgttatgcaatcgattgtcggtgaagtaaagctgcaacctcctgctaatgttgataaactgtcatctactgtagcctcacttctacttgaaggaattgcacagaatacttcaggcagtgtgtttgaggcacaggatggtagcgtcgaggtaactggttcaccaacagaaaaggctatcctatcttggggtcttgatcttcgtatgaaatttgctgaggagagatcacgatcttctataattcatgtctctcctttcaactccgaaaaaaagcgcgctggggttgcagtggttgcgagagattcaaatgttcatgtacactggaaaggagctgctgaaattgttcttgccttgtgcacaagttggctcaatgtggatggctcaacacatgaaatgacacctgataaggctaatcaactcaagaaacttatagaagatatggctgagcaaagtcttcgatgtattgcttttgcttatcgaaatcttgatatgaaggatgttccaagtgaggagcaaagaatcaactggcaattgccagataatgaattgactcttattggaatcatagggatgaaggatccttgtcgccctgaagtaagagacgctgtcgaactgtgcaaaaaggctggtgttaaggtacgaatggtaactggagataatctgaagacagctaaagcaatagctcttgagtgtggaatactcgatgactcagaggcatctgcacaagctataatagagggaagagttttccgtgcttacgatgatactgaaagggagaatgttgctgacaagatttctgtgatggcacgatcctctcctaatgacaaacttctcctagtaaaagctcttaagaaaataggccatgttgtagctgttactggtgatggaacgaatgatgctcctgcattgcatgaggcagatattggtctttctatgggcatccaaggaacagaagtagccaaagagagctcagacataataattctggatgacaatttttcttctgttgtgaaggtggttcgctggggtcgctctgtttatgcaaatatccaaaagtttattcagttccagcttaccgtaaatgttgcagctcttgtcatcaatgttgttgctgctgtttcctcaggaaatgttcctctaaatgctgttcagcttctctgggttaatctcatcatggacacactcggtgctcttgctttggctactgaaccaccaacagatcaacttatgaggcggccaccagttggacggagagaacctcttgtgactaatatcatgtggagaaacttgtttattcaggctgtctttcaagttgctgttcttctgactctcaactttaggggtcgggatcttttgcatttgactcatgacacactaggacactctagtaaagtgaaaaatacacttatattcaacacatttgtattgtgccaggtgtttaatgaggtcaattctcgtaaaccagaagaactgaacatcttttccggagtttcaagaaatcatcttttcttggcagtagtgagcataactgttgtgatgcaggtgataattattgagttcctcgggaaatttacatcaacagtgagactcaactggaagctttggcttgtttctgtagttattgcttttctaagttggcccttggcttttgttggaaaattcattccagttccgaggactgaattgaaggatctcattgtaaggtgttggcctaaacgtggcgagagtgcagcacaacagactcaggatgacagaatggaagtaccagtgtgaagctgttcttgagcaacttctcgaaattatcaggtgttagtgttggtgcacatagatggtgttggctaattttgggtgctgatttttctaaccatcctaccttgttgcctggctatgaattctatggctgtagtcagcaatcggggaggtaaacctctgctgactcgtgatctagaatttgaacactgtaaacaaaatatgtttattgtagcctaacgaaggtcaggacctccagtggtttattgcacaagttgtgcagtcggtcccagaatcatttggggaaggcgctataaacagtttttcttggcaggagtggagtgtagctccttttcgctaatatcatttttacttttagatgcaatcaagaacattttgtcaaacactctaatagtaattggctgattttgttaaaaaacaaa

SEQ ID NO: 221132 - DNA, 1846 bp, Zea Mays
caaagtcttcgatgtattgcttttgcttatcgaaatcttgatatgaaggatgttccaagtgaggagcaaagaatcaactggcaattgccagataatgaattgactcttattggaatcatagggatgaaggatccttgtcgccctgaagtaagagacgctgtcgaactgtgcaaaaaggctggtgttaaggtacgaatggtaactggagataatctgaagacagctaaagcaatagctcttgagtgtggaatactcgatgactcagaggcatctgcacaagctataatagagggaagagttttccgtgcttacgatgatactgaaagggagaatgttgctgacaagatttctgtgatggcacgatcctctcctaatgacaaacttctcctagtaaaagctcttaagaaaataggccatgttgtagctgttactggtgatggaacgaatgatgctcctgcattgcatgagatattggtctttctatgggcatccaaggaacagaagtagccaaagagagctcagacataataattctggatgacaatttttcttctgttgtgaaggtggttcgctggggtcgctctgtttatgcaaatatccaaaagtttattcagttccagcttaccgtaaatgttgcagctcttgtcatcaatgttgttgctgctgtttcctcaggaaatgttcctctaaatgctgttcagcttctctgggttaatctcatcatggacacactcggtgctcttgctttggctactgaaccaccaacagatcaacttatgaggcggccaccagttggacggagagaacctcttgtgactaatatcatgtggagaaacttgtttattcaggctgtctttcaagttgctgttcttctgactctcaactttaggggtcgggatcttttgcatttgactcatgacacactaggacactctagtaaagtgaaaaatacacttatattcaacacatttgtattgtgccaggtgtttaatgaggtcaattctcgtaaaccagaagaactgaacatcttttccggagtttcaagaaatcatcttttcttggcagtagtgagcataactgttgtgatgcaggtgataattattgagttcctcgggaaatttacatcaacagtgagactcaactggaagctttggcttgtttctgtagttattgcttttctaagttggcccttggcttttgttggaaaattcattccagttccgaggactgaattgaaggatctcattgtaaggtgttggcctaaacgtggcgagagtgcagcacaacagactcaggatgacagaatggaagtaccagtgtgaagctgttcttgagcaacttctcgaaattatcaggtgttagtgttggtgcacatagatggtgttggctaattttgggtgctgatttttctaaccatcctaccttgttgcctggctatgaattctatggctgtagtcagcaatcggggaggtaaacctctgctgactcgtgatctagaatttgaacactgtaaacaaaatatgtttattgtagcctaacgaaggtcaggacctccagtggtttattgcacaagttgtgcagtcggtcccagaatcatttggggaaggcgctataaacagtttttcttggcaggagtggagtgtagctccttttcgctaatatcatttttacttttagatgcaatcaagaacattttgtcaaacactctaatagtaattggctgattttgttagagttgcctttgctatgccataattgtatttcagaaattgactggtggtatgtattgcgagtgtaaatccactattattggcggtatgtgataacaaaaatatttatggtgccc

SEQ ID NO: 221133 - DNA, 1699 bp, Zea Mays
atgccggcgggaggggccattgtggtcgtggaggtggtgcaggtggtcgtgccgggggcagtggccaagccgccagggagcaaggaagaggcggccgcgtcgacggggatgaagagcgggctcgcgcgcttggtccggcgcacgggcggcgcggagaggccgacgtcggcgtggtctgttgctggcgggcgcgtgctctgggctcgagccgccatccccttgccggcgacgcagatcccgatgggggggggctggctcgacaatggcggcacgcagattcggcacggggcggcgccgcgaccaggcggaggagggaggcgagcggcgcattggcgggtccacgaccgagggggaggagagccagtggaggcggaagacgagtggaggttcgccagagtgacgtggaggctgacggtaacggctgttggccttaacaccgaatggggtttattaatggccagcatttcagaagacaacaatgaagaaactcctctgcaggtgcggttgaatggagtagcaacattcataggtattgcaggcctttctgttgctgctatggtcctcgtagtcctctttgcaagatattttacaggacatactacagattcagatggctctgttcaatttgttaagaggcacactagtgtgaaatctgcaatatttggttcaataaagatactaactgttgcggtaactattgttgtcgtcgctgtacctgagggcttaccactggctgtcacactaactctggcttattccatgcgaaaaatgatggccgacaaagcactggttcggaggctttctgcctgtgaaacaatgggttcagcgacaactatttgtagtgacaagactggtacattaacattaaaccagatgactgttatgcaatcgattgtcggtgaagtaaagctgcaacctcctgctaatgttgataaactgtcatctactgtagcctcacttctacttgaaggaattgcacagaatacttcaggcagtgtgtttgaggcacaggatggtagcgtcgaggtaactggttcaccaacagaaaaggctatcctatcttggggtcttgatcttcgtatgaaatttgctgaggagagatcacgatcttctataattcatgtctctcctttcaactccgaaaaaaagcgcgctggggttgcagtggttgcgagagattcaaatgttcatgtacactggaaaggagctgctgaaattgttcttgccttgtgcacaagttggctcaatgtggatggctcaacacatgaaatgacacctgataaggctaatcaactcaagaaacttatagaagatatggctgagcaaagtcttcgatgtattgcttttgcttatcgaaatcttgatatgaaggatgttccaagtgaggagcaaagaatcaactggcaattgccagataatgaattgactcttattggaatcatagggatgaaggatccttgtcgccctgaagtaagagacgctgtcgaactgtgcaaaaaggctggtgttaaggtacgaatggtaactggagataatctgaagacagctaaagcaatagctcttgagtgtggaatactcgatgactcagaggcatctgcacaagctataatagagggaagagttttccgtgcttacgatgatactgaaagggagaatgttgctgacaagatttctgggtggattggagtggaacttggac

SEQ ID NO: 221134 - DNA, 989 bp, Zea Mays
aaatgctgcttagactgctagacggaggctataatctcactggccggttctgaacctgcccctaaaaagacacctattctacatgccgacacttcgtcgaggacatgagccagctacttactcggcttcgcggcagtacagatccggccgacacttcgtcgtcaagctctcgccatttgcaactccttgctccgccgacctcgacgcaaactacaacttctcgcttgcgcctgtccaggatctgctctcgccatggacagggaagccaagaaagaagcgttcaggaagtatcttgaatccagtggcgtgctcgataccctcacgaaagctcttgtggcgctgtacgaggagaacgataagccttcatctgcagtcgacagaagctgggtggcccgtcaatctctgactatgaaaagctcaaggcagagaagctggacttgcaattgaagtatgataagcttttagagacccacaaggaaacatgcagacagctggaggaacttaagaatatgaagtacggtgcaccctggaactgaaataacgtgtgttgacattgtaaatgtatcatgaagcatgtactttttacacctctctgaagcattgctaagctctttatacaatggaaacatctctcatgtatctgattttagccatctggatcccttttggattatgaagacacccaactcactgtaggtcccaggtatcagatatcaccaatgcaggataaaggatgtgacaactatcatagttgaaccatgagcaattgtttaaccagtaatacagtatcgacaaagagtgtggtctattgacttgagacttctcttggcatggcttgtaagcagattttagtagatttcagtggaagagatatggcgtgcaacgatacgtgtcaagatcgttgggaaatttcgaataaaaacatgctcaaagaaatgttatctgtgagcaatgctaaagggtgatggtcggattaaccgttcgtcgat

SEQ ID NO: 221135 - DNA, 1118 bp, Zea Mays
cttagtaaaatataccaaacaactagagacgttagatctaaaatgagtggtgatgatttaatatgtgcaccatgtgcaccaatgttccatgtgcaccagatatgttgtcttaaaaataatgcatatataaatgtgcacacacgcgttgtttagctacctttctactaatcaaataatagttcacctcattcatctccaaggattactacgtgaatgcatatgcttcaaaatcaaatttgtcgacatgtggtttagctttcccataatgtaacgacccttccaatgattacatgtgcctctgatttattgcttcaactccacgtgcctctgatcgtgttttcccagttacgggacataattgatgtttatatttcatttgagttaatgtctctgctctcataattggctcgccacacgctacacggctaggcgcctgctagctgctacaatcgaacgcgacggaggcattatcagacgggtgcatcgctggatggtgggaagaaatggagcctcgctgtcgccgacttcttctcatgccgaagcatgcgttgtgttcttctctgccttgccatgagatatgaggctctgttgcttccagatgctaaatactgcaacgaccttcacttgaaagtgtcccgtttggagtggctaacttttacaacgtattgtcttgataatggtttctacaccattgtctccaaggtagttttactacatcgataacctttgttgcaggaggctacataacccaaatgtgtattgatcatggccaaatcgcgcgtactgtttagttctaccaaactgaggatattgtacacctcttacagatcttacagaaacagtcttagtagttgtcctctagttgtttcaattatcgacgtctcaagcaaaggatgatggtgacttacctagcagaaaagagataaaaagcagatatatatcttcttcaacgatgttattcactacgggtccacttctagaaggtatgtatctgagaaatattttcctcatcgcaaggtaaataatagttatacctctaccaagtttcagatgtagtctgattctttttttagtttttatcgttaatttttattgcactaatgatgtgttacctctta

SEQ ID NO: 221136 - DNA, 683 bp, Zea Mays
gttacgagctcagaaagtgatgacatgatgagaaggaagcgcttatttggtatgattaatgaattgcaaactgtttttgaagttgtctccggtgcgagacaacaacaatctaaagagaggtccagtatggacaatggtggtagagccaagcctgtaaagatagaaaataatggaaaagtcacagacgaagcatacgaagatgacagtgatcacggtgaaaccctatgtggaacctgtggtgggatatacaacgcggatgagttttggatcgggtgtgacatgtgcgagcgatggtaccatggcaagtgtgtcaagataactcctgccaaggcagagagcataaagcattacaaatgcccgagctgcagctccaagagggcgaggcagtagcaaaacccatgaacgcaggaagcctccgaatgtgggatgtatggtgcagaagaggcgcattgcaaagtttgcaggcaggagaaggccaagaggcctccatttacaagattagaactatattgctatcttcccagtgccttatgcttgcgtttacctatgataagctgatgtgaggaaagataagacatttggcaaccagaggcacttagttaaatgccccttgatatacatggggatcaatgttgaggacaaaagacctgcgtgcccctacgagaagaatgatgacatctgct

SEQ ID NO: 221137 - DNA, 1191 bp, Zea Mays
ccggcgccaccgccagtacacaccagctcgccggagatcacaagaagatacaagaccgtgctcctcgacgccgcccgacatggcggacgccgcctctggccgcggccacgtcgtctaccctccccgctccgccgaggacatcttcaaggactaccgcgcccgccggtccgccatcctccgcgccctcactcacgaggtcgaggacttctacgcgcagtgcgatccagacaaggagaacctgtgcctgtacggctacgcgaacgaggcgtgggaggtggcgctgccggcagaggaggtgcccacggagctgccggagcctgcgctgggaatcaacttcgcgcgcgacggaatgaaccgccgggactggcttgcgctcgtcgccgtccactccgactcgtggctcctctccgtcgccttttactatgccgctcggcttaatcgtaatgaccggaagcgcttatttggtatgattaatgaattgcaaactgtttttgaagttgtctccggtgcgagacaacaacaatctaaagagaggtccagtatggacaatggtggtagagccaagcctgtaaagaaaataatggaaaagtcacagacgaagcatacgaagatgacagtgatcacggtgaaaccctatgtggaacctgtggtgggatatacaacgcggatgagttttggatcgggtgtgacatgtgcgagcgatggtaccatggcaagtgtgtcaagataactcctgccaaggcagagagcataaagcattacaaatgcccgagctgcagctccaagagggcgaggcagtagcaaaacccatgaacgcaggaagcctccgaatgtgggatgtatggtgcagaagaggcgcattgcaaagtttgcaggcaggagaaggccaagaggcctccatttacaagattagaactatattgctatcttcccagtgccttatgcttgcgtttacctatgataagctgatgtgaggaaagataagacatttggcaaccagaggcacttagttaaatgccccttgatatacatgggggtaaaagaagaggaactcatgttttgtcgaatatatggaatctttttttcccctcttacagtaacatgtactccatcatacataatttatcacgcagatcaatgttgaggacaaaagacctgcgtgcccctacgagaagaatgatgacatctgct

SEQ ID NO: 221138 - DNA, 1098 bp, Zea Mays
ccggcgccaccgccagtacacaccagctcgccggagatcacaagaagatacaagaccgtgctcctcgacgccgcccgacatggcggacgccgcctctggccgcggccacgtcgtctaccctccccgctccgccgaggacatcttcaaggactaccgcgcccgccggtccgccatcctccgcgccctcactcacgaggtcgaggacttctacgcgcagtgcgatccagacaaggagaacctgtgcctgtacggctacgcgaacgaggcgtgggaggtggcgctgccggcagaggaggtgcccacggagctgccggagcctgcgctgggaatcaacttcgcgcgcgacggaatgaaccgccgggactggcttgcgctcgtcgccgtccactccgactcgtggctcctctccgtcgccttttactatgccgctcggcttaatcgtaatgaccggaagcgcttatttggtatgattaatgaattgcaaactgtttttgaagttgtctccggtgcgagacaacaacaatctaaagagaggtccagtatggacaatggtggtagagccaagcctgtaaagatagaaaataatggaaaagtcacagacgaagcatacgaagatgacagtgatcacggtgaaaccctatgtggaacctgtggtgggatatacaacgcggatgagttttggatcgggtgtgacatgtgcgagcgatggtaccatggcaagtgtgtcaagataactcctgccaaggcagagagcataaagcattacaaatgcccgagctgcagctccaagagggcgaggcagtagcaaaacccatgaacgcaggaagcctccgaatgtgggatgtatggtgcagaagaggcgcattgcaaagtttgcaggcaggagaaggccaagaggcctccatttacaagattagaactatattgctatcttcccagtgccttatgcttgcgtttacctatgataagctgatgtgaggaaagataagacatttggcaaccagaggcacttagttaaatgccccttgatatacatggggatcaatgttgaggacaaaagacctgcgtgcccctacgagaagaatgatgacatctgct

SEQ ID NO: 221139 - DNA, 1879 bp, Zea Mays
cgtgccctcgcccccgtcaaccaccccgtgcgtcgatgcctgcccctgcccccgcccccatccctatgatgcccgcggccacaacgccccctcccctcgacgcgctctgcgcgccatgcctgctaaccatgaccacagcgcctggagcaatggagaggatgtcggccttgcatggcaccggagagggtggcccctgcgcgaacgcagcccccgacctcagccccgatggcggcgcgctgccccaccagccccccgacgcgagcgagcgtggtgcggccccacccaacgacgcgagcgaggcacgcggccctcccggcggggtggacgcggcccctggctgtgaggcgacgatggggctgggggctgcgatggcgctgggcgacccgccggcggactacgcatccatcgcggcggtggggctgttcgtggcactcatgtgcgtctgcatcgtcgtcgggcacctcctcgaggagaaccgctggatgaacgagtccatcaccacgctcttcatcgggctgggaactagagcagtcatcctgttcgcgtcgagcgagaagcattcgcgtgtgttggtgttcagtgaggacctcttatttatttacctgctgccgccgatcatattcaatgcagggttccaagtgaagaagaaacagttctttcgaaacttcattactattacactgtttggtgcagttggcaccttgatctcttttactgtaatatcccttggcgctctaggactaatatcaaggcttaatatcggcgcacttgaactgggagactatcttgcacttggggcaatattctcggccacagactcggtttgcaccttgtaggtgttaagccaagatgagacaccattcttgtatagcctcgtgtttggtgaaggtgttgtcaatgacacaacttctgttgtgttgttcaatgcaatccacaactttgatcctggaaatatcagtggtgccaaattactgaacttcattagcagtttcctttatctgttcggctccaacaccattcttggagtagcttctggacttcttagtgcttataccattaagaagttgtactttggcagaaagttcgagggtcacaaccaacccggtaaagtctatcgctttgagcagcaccattttagccttggtgctggtttcaagagttgcttttgttttcccactatcctttctatcaaatttgaccaaaaaactccaaatggaaagatatcttttaggcagcaggttattgtttggtgggcgggtctcatgagaggtgttgtgtctattgcgttggcttacaataaggcgtttgacttaatgtttccaaggttctgtggcagtgcgaggcattttgggaggtgtgcgaggcattttgggagggacatcatcatgcccaacttgaagtcgtccgtgaccacaatagcgagcgcggtggagtacatggatgaagtattgaaggcgttgccgccaggtgaggccaggaatgaggattcacgaacactgcaattcaattatggttcattcaaacataaggcattggataaatccttaactaaaaagggaaaaacactagcaatcttacatgagttccaagttttgcaggtcgttgctgttggtgaatgtggtttggattatgacagacttcagttctgtccgacagatatgcaaaaaaaattccctggtggggttacatattccttcactgacttagcagaagatcaggataggctactttcttttgagaagatgtttatcggcaagttcttgaggtagtggctggaagcaaagaaatttctgacatagaaggcctgagtagaactctgtaccacaacacatgcaggctcttctttcctcaggatcttgacgcgtctgctaatgcgtag

SEQ ID NO: 221140 - DNA, 2026 bp, Zea Mays
ctgtgcatcgtgccctcgcccccgtcaaccaccccgtgcgtcgatgcctgcccctgcccccgcccccatccctatgatgcccgcggccacaacgccccctcccctcgacgcgctctgcgcgccatgcctgctaaccatgaccacagcgcctggagcaatggagaggatgtcggccttgcatggcaccggagagggtggcccctgcgcgaacgcagcccccgacctcagccccgatggcggcgcgctgccccaccagccccccgacgcgagcgagcgtggtgcggccccacccaacgacgcgagcgaggcacgcggccctcccggcggggtggacgcggcccctggctgtgaggcgacgatggggctgggggctgcgatggcgctgggcgacccgccggcggactacgcatccatcgcggcggtggggctgttcgtggcactcatgtgcgtctgcatcgtcgtcgggcacctcctcgaggagaaccgctggatgaacgagtccatcaccacgctcttcatcgggctgggaactagagcagtcatcctgttcgcgtcgagcgagaagcattcgcgtgtgttggtgttcagtgaggacctcttatttatttacctgctgccgccgatcatattcaatgcagggttccaagtgaagaagaaacagttctttcgaaacttcattactattacactgtttggtgcagttggcaccttgatctcttttactgtaatatcccttggcgctctaggactaatatcaaggcttaatatcggcgcacttgaactgggagactatcttgcacttggggcaatattctcggccacagactcggtttgcaccttgtaggtgttaagccaagatgagacaccattcttgtatagcctcgtgtttggtgaaggtgttgtcaatgacacaacttctgttgtgttgttcaatgcaatccacaactttgatcctggaaatatcagtggtgccaaattactgaacttcattagcagtttcctttatctgttcggctccaacaccattcttggagtagcttctggacttcttagtgcttataccattaagaagttgtactttggcaggcattcaaccgatcgtgaagtttccattatgatgctaatggcttatttatcttacatgctagctgaattgctcgatttgagtggaattctcactgtgtttttctgcggtgtcgtcactatacttgtcacaatgtaacagaaagttcgagggtcacaaccaacccggtaaagtctatcgctttgagcagcaccattttagccttggtgctggtttcaagagttgcttttgttttcccactatcctttctatcaaatttgaccaaaaaactccaaatggaaagatatcttttaggcagcaggttattgtttggtgggcgggtctcatgagaggtgttgtgtctattgcgttggcttacaataaggcgtttgacttaatgtttccaaggttctgtggcagtgcgaggcattttgggaggtgtgcgaggcattttgggagggacatcatcatgcccaacttgaagtcgtccgtgaccacaatagcgagcgcggtggagtacatggatgaagtattgaaggcgttgccgccaggtgaggccaggaatgaggattcacgaacactgcaattcaattatggttcattcaaacataaggcattggataaatccttaactaaaaagggaaaaacactagcaatcttacatgagttccaagttttgcaggtcgttgctgttggtgaatgtggtttggattatgacagacttcagttctgtccgacagatatgcaaaaaaaattccctggtggggttacatattccttcactgacttagcagaagatcaggataggctactttcttttgagaagatgtttatcggcaagttcttgaggtagtggctggaagcaaagaaatttctgacatagaaggcctgagtagaactctgtaccacaacacatgcaggctcttctttcctcaggatcttgacgcgtctgctaatgcgtag

SEQ ID NO: 221141 - DNA, 1497 bp, Zea Mays
tgcaccatttctctgaggttgctgattacagctttacagctaacatggagacagagataatgtctctgctgggctaactgaatggaagggtcttctaaaaggctactgggaacgattcagcaaatattgtgcagatgcgagtaatctggatggcagaaaggtagagagaatgctcgaagaaaaatttggtcctatcctcttccctaatgttgacacagacaatagaatttgccctagttgttctgaaggaaccttgagattcaaagttagtaggtatggtgaaggctattttataggctgtgatcgacatccaaaatgcaagtacattgctcgctcattatcacaacaagaagatgaaaccgaacccaccgaagaatgtcaaaaaacttttacacccagattacttggtgtcatgcctgattctgatgaaaaggtttttttgaaacaaggcccatatggccactatgttcagattggagaggacaaaaagggactgtttccgaaaagggcttccctttccaaggtgtcaaagatatagactctgttactctagaagatgcaatcgagcttttgcaatatcccaaaattttgggaaaacatcctgaagatgattatcctgtacttataacacattctaaagttggatacaacatcaagcataggagatctctagctctagtgccaaagagtgttgacccaaagaagatgacacttgagcgtgcgctcaagctactaagcggtaaaagtgtcagacgaattggtcgaccgaaggggaaggttgaaaacaaggaacccatggaatggcattagctgcctgcactcgttacaagatcctaaacgtgtgtggtttgatagtcagtcagccttatatccatgcaaaaaattcagagagaagtcaatattcatagcatccgaggttcagcctttggtgtgcttaactgcttatgatgagagcggagaaggcaatgtgtgacaaagaatctggtcaacaagaacaaggactgtcctccgctaactgataacttatactccctcagtgccaagtgttgttctcgctttcggagtagtcaaatatatacaacgacaacatagtcttttgtcccactgcaagaaaaaggatagaaaaaaacgctgaaaaggtaaatgaaagacggtagagttaatggtaaccctgcctatgagttgtcaggttattctcattctttaacagccatgcggttagagatcactttctcctttctcctactgcttggaaactcagcatggcttcgtgttctattttactgccattggggtccacatttgggactcatgtttgtccggtgaattgagtttctatttttttacacttataaatctcactctatcttgttttttgatactatctaaaataatcgatgaattatgaccccttcatgcgtactataattagttatttttaaacttaggtaagtgctttaccaacatatgtagtgtagtaaaaacatggaatttgac

SEQ ID NO: 221142 - DNA, 1266 bp, Zea Mays
cttttaagttgttctgaaggaaccttgagattcaaagttagtaggtatggtgaaggctattttataggctgtgatcgacatccaaaatgcaagtacattgctcgctcattatcacaacaagaagatgaaaccgaacccaccgaagaatgtcaaaaaacttttacacccagattacttggtgtcatgcctgattctgatgaaaaggtttttttgaaacaaggcccatatggccactatgttcagattggagaggacaaaaagggactgtttccgaaaagggcttccctttccaaggtcaaagatatagactctgttactctagaagatgcaatcgagcttttgcaatatcccaaaattttgggaaaacatcctgaagatgattatcctgtacttataacacattctaaagttggatacaacatcaagcataggagatctctagctctagtgccaaagagtgttgacccaaagaagatgacacttgagcgtgcgctcaagctactaagcggtaaaagtgtcagacgaattggtcgaccgaaggggaaggttgaaaacaaggaacccatggaatggcattagctgcctgcactcgttacaagatcctaaacgtgtgtggtttgatagtcagtcagccttatatccatgcaaaaaattcagagagaagtcaatattcatagcatccgaggttcagcctttggtgtgcttaactgcttatgatgagagcggagaaggcaatgtgtgacaaagaatctggtcaacaagaacaaggactgtcctccgctaactgataacttatactccctcagtgccaagtgttgttctcgctttcggagtagtcaaatatatacaacgacaacatagtcttttgtcccactgcaagaaaaaggatagaaaaaaacgctgaaaaggtaaatgaaagacggtagagttaatggtaaccctgcctatgagttgtcaggttattctcattctttaacagccatgcggttagagatcactttctcctttctcctactgcttggaaactcagcatggcttcgtgttctattttactgccattggggtccacatttgggactcatgtttgtccggtgaattgagtttctatttttttacacttataaatctcactctatcttgttttttgatactatctaaaataatcgatgaattatgaccccttcatgcgtactataattagttatttttaaacttaggtaagtgctttaccaacatatgtagtgtagtaaaaacatggaatttgac

SEQ ID NO: 221143 - DNA, 927 bp, Zea Mays
atggcggcatgcagaaatggaaccgaaccccgtacgcacaccaaagcaggggtcaaagatatagactctgttactctagaagatgcaatcgagcttttgcaatatcccaaaattttgagtgttgacccaaagaagatgacacttgagcgtgcgctcaagctactaagcggtaaaagtgtcagacgaattggtcgaccgaaggggaaggttgaaaacaaggaacccatggaatggcattagctgcctgcactcgttacaagatcctaaacgtgtgtggtttgatagtcagtcagccttatatccatgcaaaaaattcagagagaagtcaatattcatagcatccgaggttcagcctttggtgtgcttaactgcttatgatgagagcggagaaggcaatgtgtgacaaagaatctggtcaacaagaacaaggactgtcctccgctaactgataacttatactccctcagtgccaagtgttgttctcgctttcggagtagtcaaatatatacaacgacaacatagtcttttgtcccactgcaagaaaaaggatagaaaaaaacgctgaaaaggtaaatgaaagacggtagagttaatggtaaccctgcctatgagttgtcaggttattctcattctttaacagccatgcggttagagatcactttctcctttctcctactgcttggaaactcagcatggcttcgtgttctattttactgccattggggtccacatttgggactcatgtttgtccggtgaattgagtttctatttttttacacttataaatctcactctatcttgttttttgatactatctaaaataatcgatgaattatgaccccttcatgcgtactataattagttatttttaaacttaggtaagtgctttaccaacatatgtagtgtagtaaaaacatggaatttgac

SEQ ID NO: 221144 - DNA, 918 bp, Zea Mays
atttctgcgagcacatgctgttttagcctgttttggtccttttagacctttgtattctgcgcgccttcactttcatctggtgaactggattaccttccctctcgaatccagttacaagagagatcgacattaaaaggaacctcaagctttgtatttcaacaggacctttataaacgaataacttaagtcggctagatttcctgatgtgaaaacgaagaaccaacagaaacggatataatggggcataatgctggtcgcacaccattcatagacatctcaaacacaagcattataggtgatcaaaatggatcaaactcgcttgtaccaatagtcgatgctaatgaatgtaagaggcaaagggataaggaaagatatgccacgatgtccattgaacaaaagaatgagaaaaataggaagcgccgtgaagcacgtcaacgaaataaagcactacccctaaagtccgagtcatctagagacattaatacgaatcagacacgtgagacggttaacgttgaaataagtcgagatgtgcatcttggttcaggtcctattaaaaacactccatcgcctggtaattctatcgaacgaaagaggcaaagggatagagaaaggcgtgcaacaatgtcggttgaacaaaggaatgagtacaataacaagcgtcgtcaaatgcgtcaacgaaataagggacaaaatgtgatgcccaatgtttcaggatgtgatgaaacccgtcaaatttaaattaatatgtatgttcatagacctactattgtaaagtaattgtattcatattttgtagatggcgacaaaaaagtaaacgtggatccagatgatgatagcgactggctgcatcggaacgagacattccagtcaaacgactatgtcgcaacgacggaccttctgccaccaggtacatgactg

SEQ ID NO: 221145 - DNA, 977 bp, Zea Mays
gcttaaaggatactacaaggcaataagggattcaagaaaaaaaaagcggggctggttggaatgacactctatgcatggtactggccaaaccagaagtttggccatggctgattcgtgtagtgtggctatcggagagttaaatttcacatcaactgcttttgatcttcctccaccttcagctccatctaggagtgtgtctggacaaagtccaaatcccttgagtactaattcacttgatttggatggacaagaaaccacaagtgtgttcaatctgtctactaatgctcactctgtcccagtcagtactaatgaacccaccgaagctcagtttgtcccatctaatcaagaatcaagccaaagagaaggtgccagtgggagaaagcgtaagcaaagccatgttggattagccttgaaagttatgtggagtttaaaaagatcaattttctattagcaagtgtcaggctgaattgaaagaaatggatggattaacagtcgtggacaaatcatatgctttggagcttttcgtatctacgacaaacagagagattttcttaacaacaacagagcatgatgttagagaaatttggctcaagcacaaaattaggttgcttcatggcagtgatgcatggcctggacaattgatatgaggaaatttgagtgcaaagtgaaagcaactcatggagccgacatggagaagaaaaatgcaacgacagtctacatgaagcttgtgaaaaaagagttaaatctcaaagttcataataaagagacttgtattacagttttatgttatattgtttatctttttgtgatggatggatgtattacagttttagtttgttgttgcttcagtttgctgcccatacttcagtttgcttgacaaactattgtgatgatggataaagcgtgatgtgatgacggccaaccagtttactacttcagtttgctttcagtttactatgcttcagtttactgtttac

SEQ ID NO: 221146 - DNA, 1511 bp, Zea Mays
tgcaacatgacttctttcggagcggccttgcgggaaaaaaaattcaatcatccaaatagcagaggacctacgttcaccctttggtccgcgtccgtgcgcgcgccctctctcactcctggcgcaactggccgacgaccgccgccgccgtactcctggttctctggtgcccaggtctagcaacgtcagtcccttcgccaggtcttcgttggggccttcactggcgacgagcacccaccagttattgggtgtacatctgtatgctcatgtcctttgctgggtccgctcctgatcctaccatattgatgttttctgagagttggccaggtctaccaaggggtgtagaatttaatcccagtgatagtgatcttctgtggcatctagcagcagaagttgggaacgctctagctgagcgccatccatttatcaacgagttcattaaatttgttgatgatgttagagaatttatttgcactcatcctcaacatataccaggtgttaggcaagatggtcgtgcatcatacttcttccatagaagttttgagccctacatcaatgagaatgatgtaaataactgctggaagaaaattggaagccctagatccatcatcctggatggaacactgacgggttgcaaggaagtgtttgccctgtatgcagacatgccgagtgataaaagatctcaggaaactgattggagattacatcagtatcatttacaaaacacagtgaaggcagagtcagagatagtggcgtcaaaaatattccttgcatcacggaacagtctgtgtgaattggccgaggaaactcatattgaatccgaatgggatgtttccacacataaagattcaagcgtggaatgtgccaaaggctttaatcctgaaatctgtactgaaaccgatgagcttgatcatatatctctgaaagagcgctacaggatccttctagcagacaaaagtctggggcttactacagtatcagctgggaaatctataatgcatgtggaaactagcagagcatctcccaaaagaaatcatgagggaaaaataagcaaagaagatatattcagcatgttgcaggaaatttcttctgcaccttctattatagagagtaatcccatggatgatgacagcaacaggagaatacttggtgaagatcttccagtggagggttccgaaaaccagataggtggcactgcaacttgtatgggtgaaaacagtgagctggttgcaagaaaacaaggggctcatctggctgatgtaaaactggaacctgcattaggaggttatgagattggtccttccgaattacctcaagaaaattctactcatgccgaaggctcagtactatctttaggaataaaagatgaactaactgactgtgagttacctggcttatgtgagaatgtttctttcagttcccgacaacgcagaaaaaggaaaacaagttattcaactgaaaaaacacttaaagaagataaaaaacactgttgatgagggtgttgcaataccgtt

SEQ ID NO: 221147 - DNA, 1493 bp, Zea Mays
aaaaattcaatcatccaaatagcagaggacctacgttcaccctttggtccgcgtccgtgcgcgcgccctctctcactcctggcgcaactggccgacgaccgccgccgccgtactcctggttctctggtgcccaggtctagcaacgtcagtcccttcgccaggtcttcgttggggccttcactggcgacgagcacccaccagttattgggtgtacatctgtatgctcatgtcctttgctgggtccgctcctgatcctaccatattgatgttttctgagagttggccaggtctaccaaggggtgtagaatttaatcccagtgatagtgatcttctgtggcatctagcagcagaagttgggaacgctctagctgagcgccatccatttatcaacgagttcattaaatttgttgatgatgttagagaatttatttgcactcatcctcaacatataccagtttaactgcaatcttgcaggtgttaggcaagatggtcgtgcatcatacttcttccatagaagttttgagccctacatcaatgagaatgatgtaaataactgctggaagaaaattggaagccctagatccatcatcctggatggaacactgacgggttgcaaggaagtgtttgccctgtatgcagacatgccgagtgataaaagatctcaggaaactgattggagattacatcagtatcatttacaaaacacagtgaaggcagagtcagagatagtggcgtcaaaaatattccttgcatcacggaacagtctgtgtgaattggccgaggaaactcatattgaatccgaatgggatgtttccacacataaagattcaagcgtggaatgtgccaaaggctttaatcctgaaatctgtactgaaaccgatgagcttgatcatatatctctgaaagagcgctacaggatccttctagcagacaaaagtctggggcttactacagtatcagctgggaaatctataatgcatgtggaaactagcagagcatctcccaaaagaaatcatgagggaaaaataagcaaagaagatatattcagcatgttgcaggaaatttcttctgcaccttctattatagagagtaatcccatggatgatgacagcaacaggagaatacttggtgaagatcttccagtggagggttccgaaaaccagataggtggcactgcaacttgtatgggtgaaaacagtgagctggttgcaagaaaacaaggggctcatctggctgatgtaaaactggaacctgcattaggaggttatgagattggtccttccgaattacctcaagaaaattctactcatgccgaaggctcagtactatctttaggaataaaagatgaactaactgactgtgagttacctggcttatgtgagaatgtttctttcagttcccgacaacgcagaaaaaggaaaacaagttattcaactgaaaaaacacttaaagaagataaaaaacactgttgatgagggtgttgcaataccgtt

SEQ ID NO: 221148 - DNA, 1468 bp, Zea Mays
aaattcaatcatccaaatagcagaggacctacgttcaccctttggtccgcgtccgtgcgcgcgccctctctcactcctggcgcaactggccgacgaccgccgccgccgtactcctggttctctggtgcccaggtctagcaacgtcagtcccttcgccaggtcttcgttggggccttcactggcgacgagcacccaccagttattgggtgtacatctgtatgctcatgtcctttgctgggtccgctcctgatcctaccatattgatgttttctgagagttggccaggtctaccaaggggtgtagaatttaatcccagtgatagtgatcttctgtggcatctagcagcagaagttgggaacgctctagctgagcgccatccatttatcaacgagttcattaaatttgttgatgatgttagagaatttatttgcactcatcctcaacatataccaggtgttaggcaagatggtcgtgcatcatacttcttccatagaagttttgagccctacatcaatgagaatgatgtaaataactgctggaagaaaattggaagccctagatccatcatcctggatggaacactgacgggttgcaaggaagtgtttgccctgtatgcagacatgccgagtgataaaagatctcaggaaactgattggagattacatcagtatcatttacaaaacacagtgaaggcagagtcagagatagtggcgtcaaaaatattccttgcatcacggaacagtctgtgtgaattggccgaggaaactcatattgaatccgaatgggatgtttccacacataaagattcaagcgtggaatgtgccaaaggctttaatcctgaaatctgtactgaaaccgatgagcttgatcatatatctctgaaagagcgctacaggatccttctagcagacaaaagtctggggcttactacagtatcagctgggaaatctataatgcatgtggaaactagcagagcatctcccaaaagaaatcatgagggaaaaataagcaaagaagatatattcagcatgttgaaatttcttctgcaccttctattatagagagtaatcccatggatgatgacagcaacaggagaatacttggtgaagatcttccagtggagggttccgaaaaccagataggtggcactgcaacttgtatgggtgaaaacagtgagctggttgcaagaaaacaaggggctcatctggctgatgtaaaactggaacctgcattaggaggttatgagattggtccttccgaattacctcaagaaaattctactcatgccgaaggctcagtactatctttaggaataaaagatgaactaactgactgtgagttacctggcttatgtgagaatgtttctttcagttcccgacaacgcagaaaaaggaaaacaagttattcaactgaaaaaacacttaaagaagataaaaaacactgttgatgagggtgttgcaataccgtt

SEQ ID NO: 221149 - DNA, 1556 bp, Zea Mays
aaattcaatcatccaaatagcagaggacctacgttcaccctttggtccgcgtccgtgcgcgcgccctctctcactcctggcgcaactggccgacgaccgccgccgccgtactcctggttctctggtgcccaggtctagcaacgtcagtcccttcgccaggtcttcgttggggccttcactggcgacgagcacccaccagttattgggtgtacatctgtatgctcatgtcctttgctgggtccgctcctgatcctaccatattgatgttttctgagagttggccaggtctaccaaggggtgtagaatttaatcccagtgatagtgatcttctgtggcatctagcagcagaagttgggaacgctctagctgagcgccatccatttatcaacgagttcattaaatttgttgatgatgttagagaatttatttgcactcatcctcaacatataccaggtgttaggcaagatggtcgtgcatcatacttcttccatagaagttttgagccctacatcaatgagaatgatgtaaataactgctggaagaaaattggaagccctagatccatcatcctggatggaacactgacgggttgcaaggaagtgtttgccctgtatgcagacatgccgagtgataaaagatctcaggaaactgattggagattacatcagtatcatttacaaaacacagtgaaggcagagtcagagatagtggcgtcaaaaatattccttgcatcacggaacagtctgtgtgaattggccgaggaaactcatattgaatccgaatgggatgtttccacacataaagattcaagcgtggaatgtgccaaaggctttaatcctgaaatctgtactgaaaccgatgagcttgatcatatatctctgaaagagcgctacaggatccttctagcagacaaaagtctggggcttactacagtatcagctgggaaatctataatgcatgtggaaactagcagagcatctcccaaaagaaatcatgagggaaaaataagcaaagaagatatattcagcatgttgcaggaaatttcttctgcaccttctattatagagagtaatcccatggatgatgacagcaacaggagaatacttggtgaagatcttccagggaactcaggtttcctgaatgtttttggtatgtcatctaatagtaaaccatgcctatttgaacttggatattgtcatgatccagtggagggttccgaaaaccagataggtggcactgcaacttgtatgggtgaaaacagtgagctggttgcaagaaaacaaggggctcatctggctgatgtaaaactggaacctgcattaggaggttatgagattggtccttccgaattacctcaagaaaattctactcatgccgaaggctcagtactatctttaggaataaaagatgaactaactgactgtgagttacctggcttatgtgagaatgtttctttcagttcccgacaacgcagaaaaaggaaaacaagttattcaactgaaaaaacacttaaagaagataaaaaacactgttgatgagggtgttgcaataccgtt

SEQ ID NO: 221150 - DNA, 4449 bp, Zea Mays
cttccaggtgcttcttccccctcccaaaattcttctcctcgcggtctccctcgccgccacgcctgcatccgccactctccgcgctcgcacacgccgcctcctcctccccgtcaccccttcgccgtggtggctcccgtcgtcccacgcctccctcgtctgcaagcgctgacgcctcctcctctccaaccctaccttcgtccgccgcttccatgtcctccacagggcgcctcacctcctcagcttcttcgccgaccacaacaccggcgctccccctccctccctccggtcgtcgtcacgctgcgtcttggcccaaccgttcaggtgctcggtgcttaactctcctattgcacacccatgtttaacttttcttgaattttcttaggaattgaggctgtagggtatatatgaggggttaattcagccgaactgttcagtaacgtggtaactgttcttcagggtgcgagtttgttgtactataaaggtttggtaacctgaataaaacaaatgaacttctgttctagtttcactatcaccaggttgcgggtttgaaggccaaaaccttcagcactggtcctccaaaaccttcagcgctggtcctgcctatgctagtttcatttgcatggataagttatgaatgaagaaaacatacattttaatatctaggcgaccatttcagaagacgtgtagttagaaatcagtaactaagaacagatcttaaccttatacattcttggtctttctttttgtcctgtatttttttattgtttgggtgtaacaccattattacatagcttggttgatgcatacactactacatggtatttatatcgtcctgacgattgttacatcaaccacattacacattatatatagcagtatagaataaatgttgtacatgtctaataatgcacactaataattgtaaatttgcaacccacttatccagctgattgatattgtgatcagttcacgttgcaagagtttctataaggtggtctgttatccacactacaatctacaaacttcatcagtacatcctcatacaagtgcagatcaaattgcatggtgaaatgtgtacttacaaattcgtttgtaagtgaacttagctaattatatggatactcacatagttttttggataccgatcataccaataatttacgaggaggtgcacccattcagcttcccagtatctaattgtactatacactccttccataggtaagtttataaataaagcttcgttttccatacaatatgattatgctcctttttatgtgaactgcaatattggtcactctatatcagtaaagattgagtgttgcacatgtctaacaatgtgcagtgactgtaaatttgcatcccgcttatccagctgatcaacattgtgattggtttacattgcaggaatttctgtaaggtggactgttatccagagcacgtacttcatttgtacagccttatacaagtacagattcgaattgcatgatgaaatgtgtattttcaaattcatctttaagtgaactcagctaattatatgtgcactcatatacttatttgttttggattataccaataatttatgaggagttgcacccatttatttcctagtttttaatagtgctgcacacttcttctttaggtaagtttataaataaagcttcattttcatgcaatttatgattttatgagattttcccatacacttgcacgttcccatgaaagattcctctcacaaaaaaaacttaaatttcatttaatgtgtaactctctaactcctttcttacatccattgagttatattgcaggttgctagatctattacattttcagacgacgacgacactagtagaaaaaacaattcaaagacgaatgttgaagcgtcacatgaggtataatttataaccttaacagaacaagcttatattcagttatacttaactgttaaaataaacctcatcgtatggtacaaatgttttaccacccaacactcccgaaagttcaagaacattagaatcactagcgaaaaggttcttcaaacttttcttttttcttttaactttgaacatctgttttatcatgacaaatattgtgtgtttaatacattcctcatcaaacaaatttggtgtcatatgctcaaaccaaacccttcagcagtccacaaccctagttctgcaaatccacctacaagacacgaataaggtatttcctttagcactttctacaatttatcaatacgaaattgacatacaaaatataatttagcatgcctgctccattttctttcttggtatctaaaatagaaattttatgaacaatttgacctttatgagttctactaaaacttgaaatttatataaactaattgtactccagttatctcgttgccgtcttttcgtaataggtttcttaaacgtatatgttcacctatttcaagagtaatttttttaccaaacatgtatacatacataggagtatatgtgaatagtgtggtatacaatacatcgacactcccactattttaattatggcccattaattcatgcatgcattcatttattcccttgctgcattttttctatatatttgccttcatctaattttgactgttcatttgatcaaacaacaatgtgtgttgaactaaaatagaggcattagtagaccaggatgaaaaaatagcgttaatacatgttaactaaaagtttaagactccatcctggtccgattctatagtggtacacttttttcttgactaattgcttcgtgctttcagtctttttagtttaaactttcagggatgtgtccactgagattgttgctgctcaagtccagcagactctgcgactattatagcttgccgatatccgaagggatcagaccggacagacctgagatctggttgtgtgcgagattcagcacgttgagggacaccaggctgtcgagtttaggcggcattgttccaggtttactttgttcagttcaatttgtctagattttacatattcatgaatagccctttattattggtgcaactaatattcagtcgctaaaatatcaatggcctaccaaatttcgcaaaaaaggatgagcactacacgaaccattcctgtactttgtaagccttccctcctaaaagcttcagaatcttaacatgttacagttagttcttagaagattttatgtgcatcataattctaaaactttagccagtttacacctgttatttagtctactccttgaaaaaagtttttccctttgatctaaacatgaatgcttccttttactccaacatcacagcaaaaaaaaatcaaaagcattgcacttcttactactgatacccctatgtcactactaccatacaggttagtgcacgatccttacctttatgttctacatgtctttgggtttctctttttttcaagtgcgttctattattgtttatatgtccaccttcacactgattagctgttccttgttcctacacagttattatctgttatgtacatttttatacctttccaaattagcttattatctttaaaaaattgtattttcttggctactttacatttgaatgaccaatggcaacatcttcaaacaaacatagctaacttagaggaaagaaaacataatctttaaattgctcataagagagaatgtcatttttcagaaaaaaagaaaaacagtattgatgctttagaaaatcttaaactgatgcatgttaatattatcatatcaatgccaacaacatatgtttaagctggtttcatccttcctagcagctctacttgcttcatctcgctcttcactgctattttttaaattggaaggaaaataagagtacgatagaagaacttgaagcgcattcactggtctcttatttaaagtccataaagcaaagttccaaaaaaacaaaaagaaacattgagttgccttcacccggcttctcttgagaaaatacaaggcgttaagaaattctttagaaaggcatattattactacatatagagctaggagtagatcttcatccgaacccctccaacgacgactaggtcggcgttttctctccctgctgtttcagcttaaaaactagatgtaccaaacatgctatctgagcaccgcactgatacaacctttgatagtctgcgttttctctccctgctgtttcagttccggtatgcaaactacacgaatgatgcctacaacaagagtgggaacgaatccttgtggctgcagctgataaaccagagagcatagacttaacctttgtgctcttctcgacaggcttctttgctgttagactttaaccaattcatctcatgtcccaagttcaattttatgtaatgaggattgcatggtattttttggcaatttatctttaatgaactataatgtatagctgaagttggttgcagtttgaaacaatgcgacatttaaaaacccatagac

SEQ ID NO: 221151 - DNA, 4549 bp, Zea Mays
aattcttctcctcgcggtctccctcgccgccacgcctgcatccgccactctccgcgctcgcacacgccgcctcctcctccccgtcaccccttcgccgtggtggctcccgtcgtcccacgcctccctcgtctgcaagcgctgacgcctcctcctctccaaccctaccttcgtccgccgcttccatgtcctccacagggcgcctcacctcctcagcttcttcgccgaccacaacaccggcgctccccctccctccctccggtcgtcgtcacgctgcgtcttggcccaaccgttcaggtgctcggtgcttaactctcctattgcacacccatgtttaacttttcttgaattttcttaggaattgaggctgtagggtatatatgaggggttaattcagccgaactgttcagtaacgtggtaactgttcttcagggtgcgagtttgttgtactataaaggtttggtaacctgaataaaacaaatgaacttctgttctagtttcactatcaccaggttgcgggtttgaaggccaaaaccttcagcactggtcctccaaaaccttcagcgctggtcctgcctatgctagtttcatttgcatggataagttatgaatgaagaaaacatacattttaatatctaggcgaccatttcagaagacgtgtagttagaaatcagtaactaagaacagatcttaaccttatacattcttggtctttctttttgtcctgtatttttttattgtttgggtgtaacaccattattacatagcttggttgatgcatacactactacatggtatttatatcgtcctgacgattgttacatcaaccacattacacattatatatagcagtatagaataaatgttgtacatgtctaataatgcacactaataattgtaaatttgcaacccacttatccagctgattgatattgtgatcagttcacgttgcaagagtttctataaggtggtctgttatccacactacaatctacaaacttcatcagtacatcctcatacaagtgcagatcaaattgcatggtgaaatgtgtacttacaaattcgtttgtaagtgaacttagctaattatatggatactcacatagttttttggataccgatcataccaataatttacgaggaggtgcacccattcagcttcccagtatctaattgtactatacactccttccataggaatttctgtaaggtggactgttatccagagcacgtacttcatttgtacagccttatacaagtacagattcgaattgcatgatgaaatgtgtattttcaaattcatctttaagtgaactcagctaattatatgtgcactcatatacttatttgttttggattataccaataatttatgaggagttgcacccatttatttcctagtttttaatagtgctgcacacttcttctttaggtaagtttataaataaagcttcattttcatgcaatttatgattttatgagattttcccatacacttgcacgttcccatgaaagattcctctcacaaaaaaaacttaaatttcatttaatgtgtaactctctaactcctttcttacatccattgagttatattgcaggttgctagatctattacattttcagacgacgacgacactagtagaaaaaacaattcaaagacgaatgttgaagcgtcacatgaggtataatttataaccttaacagaacaagcttatattcagttatacttaactgttaaaataaacctcatcgtatggtacaaatgttttaccacccaacactcccgaaagttcaagaacattagaatcactagcgaaaaggttcttcaaacttttcttttttcttttaactttgaacatctgttttatcatgacaaatattgtgtgtttaatacattcctcatcaaacaaatttggtgtcatatgctcaaaccaaacccttcagcagtccacaaccctagttctgcaaatccacctacaagacacgaataaggtatttcctttagcactttctacaatttatcaatacgaaattgacatacaaaatataatttagcatgcctgctccattttctttcttggtatctaaaatagaaattttatgaacaatttgacctttatgagttctactaaaacttgaaatttatataaactaattgtactccagttatctcgttgccgtcttttcgtaataggtttcttaaacgtatatgttcacctatttcaagagtaatttttttaccaaacatgtatacatacataggagtatatgtgaatagtgtggtatacaatacatcgacactcccactattttaattatggcccattaattcatgcatgcattcatttattcccttgctgcattttttctatatatttgccttcatctaattttgactgttcatttgatcaaacaacaatgtgtgttgaactaaaatagaggcattagtagaccaggatgaaaaaatagcgttaatacatgttaactaaaagtttaagactccatcctggtccgattctatagtggtacacttttttcttgactaattgcttcgtgctttcagtctttttagtttaaactttcagggatgtgtccactgagattgttgctgctcaagtccagcagactctgcgactattatagcttgccgatatccgaagggatcagaccggacagcacgttgagggacaccaggctgtcgagtttaggcggcattgttccaggtttactttgttcagttcaatttgtctagattttacatattcatgaatagccctttattattggtgcaactaatattcagtcgctaaaatatcaatggcctaccaaatttcgcaaaaaaggatgagcactacacgaaccattcctgtactttgtaagccttccctcctaaaagcttcagaatcttaacatgttacagttagttcttagaagattttatgtgcatcataattctaaaactttagccagtttacacctgttatttagtctactccttgaaaaaagtttttccctttgatctaaacatgaatgcttccttttactccaacatcacagcaaaaaaaaatcaaaagcattgcacttcttactactgatacccctatgtcactactaccatacaggttagtgcacgatccttacctttatgttctacatgtctttgggtttctctttttttcaagtgcgttctattattgtttatatgtccaccttcacactgattagctgttccttgttcctacacagttattatctgttatgtacatttttatacctttccaaattagcttattatctttaaaaaattgtattttcttggctactttacatttgaatgaccaatggcaacatcttcaaacaaacatagctaacttagaggaaagaaaacataatctttaaattgctcataagagagaatgtcatttttcagaaaaaaagaaaaacagtattgatgctttagaaaatcttaaactgatgcatgttaatattatcatatcaatgccaacaacatatgtttaagctggtttcatccttcctagcagctctacttgcttcatctcgctcttcactgctattttttaaattggaaggaaaataagagtacgatagaagaacttgaagcgcattcactggtctcttatttaaagtccataaagcaaagttccaaaaaaacaaaaagaaacattgagttgccttcacccggcttctcttgagaaaatacaaggcgttaagaaattctttagaaaggcatattattactacatatagagctaggagtagatcttcatccgaacccctccaacgacgactaggtcggcgttttctctccctgctgtttcaggtttgttacatttcaacctgtgggctttctttcagacaattgcatttcatctagcattcacatgggaagctctgaaatctgccagcttaaaaactagatgtaccaaacatgctatctgagcaccgcactgatacaacctttgatagtctgcgttttctctccctgctgtttcaggtttgttacatttcaacctgtggggtttctttcagacaattgcatttcatctagcattcacatgggaagctctcaaatctgccagcttaaaaactagatgtaccaaacatgctatctgagcaccgcactgatacaacctttgatcagtatttagtactacttgctcttccatattaatactactggtactactatttcattgcacgtttacatgacatggaacagagactgaatttagtcgagtgggttcacctgcagttccggtatgcaaactacacgaatgatgcctacaacaagagtgggaacgaatccttgtggctgcagctgataaaccagagagcatagacttaacctttgtgctcttctcgacaggcttctttgctgttagactttaaccaattcatctcatgtcccaagttcaattttatgtaatgaggattgcatggtattttttggcaatttatctttaatgaactataatgtatagctgaagttggttgcagtttgaaacaatgcgacatttaaaaacccatagac

SEQ ID NO: 221152 - DNA, 4583 bp, Zea Mays
aattcttctcctcgcggtctccctcgccgccacgcctgcatccgccactctccgcgctcgcacacgccgcctcctcctccccgtcaccccttcgccgtggtggctcccgtcgtcccacgcctccctcgtctgcaagcgctgacgcctcctcctctccaaccctaccttcgtccgccgcttccatgtcctccacagggcgcctcacctcctcagcttcttcgccgaccacaacaccggcgctccccctccctccctccggtcgtcgtcacgctgcgtcttggcccaaccgttcaggtgctcggtgcttaactctcctattgcacacccatgtttaacttttcttgaattttcttaggaattgaggctgtagggtatatatgaggggttaattcagccgaactgttcagtaacgtggtaactgttcttcagggtgcgagtttgttgtactataaaggtttggtaacctgaataaaacaaatgaacttctgttctagtttcactatcaccaggttgcgggtttgaaggccaaaaccttcagcactggtcctccaaaaccttcagcgctggtcctgcctatgctagtttcatttgcatggataagttatgaatgaagaaaacatacattttaatatctaggcgaccatttcagaagacgtgtagttagaaatcagtaactaagaacagatcttaaccttatacattcttggtctttctttttgtcctgtatttttttattgtttgggtgtaacaccattattacatagcttggttgatgcatacactactacatggtatttatatcgtcctgacgattgttacatcaaccacattacacattatatatagcagtatagaataaatgttgtacatgtctaataatgcacactaataattgtaaatttgcaacccacttatccagctgattgatattgtgatcagttcacgttgcaagagtttctataaggtggtctgttatccacactacaatctacaaacttcatcagtacatcctcatacaagtgcagatcaaattgcatggtgaaatgtgtacttacaaattcgtttgtaagtgaacttagctaattatatggatactcacatagttttttggataccgatcataccaataatttacgaggaggtgcacccattcagcttcccagtatctaattgtactatacactccttccataggtaagtttataaataaagcttcgttttccatacaatatgattatgctcctttttatgtgaactgcaatattggtcactctatatcagtaaagattgagtgttgcacatgtctaacaatgtgcagtgactgtaaatttgcatcccgcttatccagctgatcaacattgtgattggtttacattgcaggaatttctgtaaggtggactgttatccagagcacgtacttcatttgtacagccttatacaagtacagattcgaattgcatgatgaaatgtgtattttcaaattcatctttaagtgaactcagctaattatatgtgcactcatatacttatttgttttggattataccaataatttatgaggagttgcacccatttatttcctagtttttaatagtgctgcacacttcttctttaggtaagtttataaataaagcttcattttcatgcaatttatgattttatgagattttcccatacacttgcacgttcccatgaaagattcctctcacaaaaaaaacttaaatttcatttaatgtgtaactctctaactcctttcttacatccattgagttatattgcaggttgctagatctattacattttcagacgacgacgacactagtagaaaaaacaattcaaagacgaatgttgaagcgtcacatgaggtataatttataaccttaacagaacaagcttatattcagttatacttaactgttaaaataaacctcatcgtatggtacaaatgttttaccacccaacactcccgaaagttcaagaacattagaatcactagcgaaaaggttcttcaaacttttcttttttcttttaactttgaacatctgttttatcatgacaaatattgtgtgtttaatacattcctcatcaaacaaatttggtgtcatatgctcaaaccaaacccttcagcagtccacaaccctagttctgcaaatccacctacaagacacgaataaggtatttcctttagcactttctacaatttatcaatacgaaattgacatacaaaatataatttagcatgcctgctccattttctttcttggtatctaaaatagaaattttatgaacaatttgacctttatgagttctactaaaacttgaaatttatataaactaattgtactccagttatctcgttgccgtcttttcgtaataggtttcttaaacgtatatgttcacctatttcaagagtaatttttttaccaaacatgtatacatacataggagtatatgtgaatagtgtggtatacaatacatcgacactcccactattttaattatggcccattaattcatgcatgcattcatttattcccttgctgcattttttctatatatttgccttcatctaattttgactgttcatttgatcaaacaacaatgtgtgttgaactaaaatagaggcattagtagaccaggatgaaaaaatagcgttaatacatgttaactaaaagtttaagactccatcctggtccgattctatagtggtacacttttttcttgactaattgcttcgtgctttcagtctttttagtttaaactttcagggatgtgtccactgagattgttgctgctcaagtccagcagactctgcgactattatagcttgccgatatccgaagggatcagaccggacagcacgttgagggacaccaggctgtcgagtttaggcggcattgttccaggtttactttgttcagttcaatttgtctagattttacatattcatgaatagccctttattattggtgcaactaatattcagtcgctaaaatatcaatggcctaccaaatttcgcaaaaaaggatgagcactacacgaaccattcctgtactttgtaagccttccctcctaaaagcttcagaatcttaacatgttacagttagttcttagaagattttatgtgcatcataattctaaaactttagccagtttacacctgttatttagtctactccttgaaaaaagtttttccctttgatctaaacatgaatgcttccttttactccaacatcacagcaaaaaaaaatcaaaagcattgcacttcttactactgatacccctatgtcactactaccatacaggttagtgcacgatccttacctttatgttctacatgtctttgggtttctctttttttcaagtgcgttctattattgtttatatgtccaccttcacactgattagctgttccttgttcctacacagttattatctgttatgtacatttttatacctttccaaattagcttattatctttaaaaaattgtattttcttggctactttacatttgaatgaccaatggcaacatcttcaaacaaacatagctaacttagaggaaagaaaacataatctttaaattgctcataagagagaatgtcatttttcagaaaaaaagaaaaacagtattgatgctttagaaaatcttaaactgatgcatgttaatattatcatatcaatgccaacaacatatgtttaagctggtttcatccttcctagcagctctacttgcttcatctcgctcttcactgctattttttaaattggaaggaaaataagagtacgatagaagaacttgaagcgcattcactggtctcttatttaaagtccataaagcaaagttccaaaaaaacaaaaagaaacattgagttgccttcacccggcttctcttgagaaaatacaagacaattgcatttcatctagcattcacatgggaagctctgaaatctgccagcttaaaaactagatgtaccaaacatgctatctgagcaccgcactgatacaacctttgatagtctgcgttttctctccctgctgtttcaggtttgttacatttcaacctgtggggtttctttcagacaattgcatttcatctagcattcacatgggaagctctcaaatctgccagcttaaaaactagatgtaccaaacatgctatctgagcaccgcactgatacaacctttgatcagtatttagtactacttgctcttccatattaatactactggtactactatttcattgcacgtttacatgacatggaacagagactgaatttagtcgagtgggttcacctgcagttccggtatgcaaactacacgaatgatgcctacaacaagagtgggaacgaatccttgtggctgcagctgataaaccagagagcatagacttaacctttgtgctcttctcgacaggcttctttgctgttagactttaaccaattcatctcatgtcccaagttcaattttatgtaatgaggattgcatggtattttttggcaatttatctttaatgaactataatgtatagctgaagttggttgcagtttgaaacaatgcgacatttaaaaacccatagac

SEQ ID NO: 221153 - DNA, 3924 bp, Zea Mays
aattcttctcctcgcggtctccctcgccgccacgcctgcatccgccactctccgcgctcgcacacgccgcctcctcctccccgtcaccccttcgccgtggtggctcccgtcgtcccacgcctccctcgtctgcaagcgctgacgcctcctcctctccaaccctaccttcgtccgccgcttccatgtcctccacagggcgcctcacctcctcagcttcttcgccgaccacaacaccggcgctccccctccctccctccggtcgtcgtcacgctgcgtcttggcccaaccgttcaggtgctcggtgcttaactctcctattgcacacccatgtttaacttttcttgaattttcttaggaattgaggctgtagggtatatatgaggggttaattcagccgaactgttcagtaacgtggtaactgttcttcagggtgcgagtttgttgtactataaaggtttggtaacctgaataaaacaaatgaacttctgttctagtttcactatcaccaggttgcgggtttgaaggccaaaaccttcagcactggtcctccaaaaccttcagcgctggtcctgcctatgctagtttcatttgcatggataagttatgaatgaagaaaacatacattttaatatctaggcgaccatttcagaagacgtgtagttagaaatcagtaactaagaacagatcttaaccttatacattcttggtctttctttttgtcctgtatttttttattgtttgggtgtaacaccattattacatagcttggttgatgcatacactactacatggtatttatatcgtcctgacgattgttacatcaaccacattacacattatatatagcagtatagaataaatgttgtacatgtctaataatgcacactaataattgtaaatttgcaacccacttatccagctgattgatattgtgatcagttcacgttgcaagagtttctataaggtggtctgttatccacactacaatctacaaacttcatcagtacatcctcatacaagtgcagatcaaattgcatggtgaaatgtgtacttacaaattcgtttgtaagtgaacttagctaattatatggatactcacatagttttttggataccgatcataccaataatttacgaggaggtgcacccattcagcttcccagtatctaattgtactatacactccttccataggtaagtttataaataaagcttcgttttccatacaatatgattatgctcctttttatgtgaactgcaatattggtcactctatatcagtaaagattgagtgttgcacatgtctaacaatgtgcagtgactgtaaatttgcatcccgcttatccagctgatcaacattgtgattggtttacattgcaggaatttctgtaaggtggactgttatccagagcacgtacttcatttgtacagccttatacaagtacagattcgaattgcatgatgaaatgtgtattttcaaattcatctttaagtgaactcagctaattatatgtgcactcatatacttatttgttttggattataccaataatttatgaggagttgcacccatttatttcctagtttttaatagtgctgcacacttcttctttaggtaagtttataaataaagcttcattttcatgcaatttatgattttatgagattttcccatacacttgcacgttcccatgaaagattcctctcacaaaaaaaacttaaatttcatttaatgtgtaactctctaactcctttcttacatccattgagttatattgcaggttgctagatctattacattttcagacgacgacgacactagtagaaaaaacaattcaaagacgaatgttgaagcgtcacatgaggtataatttataaccttaacagaacaagcttatattcagttatacttaactgttaaaataaacctcatcgtatggtacaaatgttttaccacccaacactcccgaaagttcaagaacattagaatcactagcgaaaaggttcttcaaacttttcttttttcttttaactttgaacatctgttttatcatgacaaatattgtgtgtttaatacattcctcatcaaacaaatttggtgtcatatgctcaaaccaaacccttcagcagtccacaaccctagttctgcaaatccacctacaagacacgaataaggtatttcctttagcactttctacaatttatcaatacgaaattgacatacaaaatataatttagcatgcctgctccattttctttcttggtatctaaaatagaaattttatgaacaatttgacctttatgagttctactaaaacttgaaatttatataaactaattgtactccagttatctcgttgccgtcttttcgtaataggtttcttaaacgtatatgttcacctatttcaagagtaatttttttaccaaacatgtatacatacataggagtatatgtgaatagtgtggtatacaatacatcgacactcccactattttaattatggcccattaattcatgcatgcattcatttattcccttgctgcattttttctatatatttgccttcatctaattttgactgttcatttgatcaaacaacaatgtgtgttgaactaaaatagaggcattagtagaccaggatgaaaaaatagcgttaatacatgttaactaaaagtttaagactccatcctggtccgattctatagtggtacacttttttcttgactaattgcttcgtgctttcagtctttttagtttaaactttcagggatgtgtccactgagattgttgctgctcaagtccagcagactctgcgactattatagcttgccgatatccgaagggatcagaccggacagcaaaaaaaaatcaaaagcattgcacttcttactactgatacccctatgtcactactaccatacaggaaaataagagtacgatagaagaacttgaagcgcattcactggtctcttatttaaagtccataaagcaaagttccaaaaaaacaaaaagaaacattgagttgccttcacccggcttctcttgagaaaatacaagtaggcaactcagaagagacaacaactgtactttctcaggcgttaagaaattctttagaaaggcatattattactacatatagagctaggagtagatcttcatccgaacccctccaacgacgactaggtcggcgttttctctccctgctgtttcaggtttgttacatttcaacctgtgggctttctttcagacaattgcatttcatctagcattcacatgggaagctctgaaatctgccagcttaaaaactagatgtaccaaacatgctatctgagcaccgcactgatacaacctttgatagtctgcgttttctctccctgctgtttcaggtttgttacatttcaacctgtggggtttctttcagacaattgcatttcatctagcattcacatgggaagctctcaaatctgccagcttaaaaactagatgtaccaaacatgctatctgagcaccgcactgatacaacctttgatcagtatttagtactacttgctcttccatattaatactactggtactactatttcattgcacgtttacatgacatggaacagagactgaatttagtcgagtgggttcacctgcagttccggtatgcaaactacacgaatgatgcctacaacaagagtgggaacgaatccttgtggctgcagctgataaaccagagagcatagacttaacctttgtgctcttctcgacaggcttctttgctgttagactttaaccaattcatctcatgtcccaagttcaattttatgtaatgaggattgcatggtattttttggcaatttatctttaatgaactataatgtatagctgaagttggttgcagtttgaaacaatgcgacatttaaaaacccatagac

SEQ ID NO: 221154 - DNA, 3837 bp, Zea Mays
tcttctcctcgcggtctccctcgccgccacgcctgcatccgccactctccgcgctcgcacacgccgcctcctcctccccgtcaccccttcgccgtggtggctcccgtcgtcccacgcctccctcgtctgcaagcgctgacgcctcctcctctccaaccctaccttcgtccgccgcttccatgtcctccacagggcgcctcacctcctcagcttcttcgccgaccacaacaccggcgctccccctccctccctccggtcgtcgtcacgctgcgtcttggcccaaccgttcaggtgctcggtgcttaactctcctattgcacacccatgtttaacttttcttgaattttcttaggaattgaggctgtagggtatatatgaggggttaattcagccgaactgttcagtaacgtggtaactgttcttcagggtgcgagtttgttgtactataaaggtttggtaacctgaataaaacaaatgaacttctgttctagtttcactatcaccaggttgcgggtttgaaggccaaaaccttcagcactggtcctccaaaaccttcagcgctggtcctgcctatgctagtttcatttgcatggataagttatgaatgaagaaaacatacattttaatatctaggcgaccatttcagaagacgtgtagttagaaatcagtaactaagaacagatcttaaccttatacattcttggtctttctttttgtcctgtatttttttattgtttgggtgtaacaccattattacatagcttggttgatgcatacactactacatggtatttatatcgtcctgacgattgttacatcaaccacattacacattatatatagcagtatagaataaatgttgtacatgtctaataatgcacactaataattgtaaatttgcaacccacttatccagctgattgatattgtgatcagttcacgttgcaagagtttctataaggtggtctgttatccacactacaatctacaaacttcatcagtacatcctcatacaagtgcagatcaaattgcatggtgaaatgtgtacttacaaattcgtttgtaagtgaacttagctaattatatggatactcacatagttttttggataccgatcataccaataatttacgaggaggtgcacccattcagcttcccagtatctaattgtactatacactccttccataggtaagtttataaataaagcttcgttttccatacaatatgattatgctcctttttatgtgaactgcaatattggtcactctatatcagtaaagattgagtgttgcacatgtctaacaatgtgcagtgactgtaaatttgcatcccgcttatccagctgatcaacattgtgattggtttacattgcaggaatttctgtaaggtggactgttatccagagcacgtacttcatttgtacagccttatacaagtacagattcgaattgcatgatgaaatgtgtattttcaaattcatctttaagtgaactcagctaattatatgtgcactcatatacttatttgttttggattataccaataatttatgaggagttgcacccatttatttcctagtttttaatagtgctgcacacttcttctttaggtaagtttataaataaagcttcattttcatgcaatttatgattttatgagattttcccatacacttgcacgttcccatgaaagattcctctcacaaaaaaaacttaaatttcatttaatgtgtaactctctaactcctttcttacatccattgagttatattgcaggttgctagatctattacattttcagacgacgacgacactaggtaagtatatttccattaacattctattcaactcactattatatgcttctattatatactcctatttaataacatttattttttgttaataaaccagtagaaaaaacaattcaaagacgaatgttgaagcgtcacatgaggtataatttataaccttaacagaacaagcttatattcagttatacttaactgttaaaataaacctcatcgtatggtacaaatgttttaccacccaacactcccgaaagttcaagaacattagaatcactagcgaaaaggttcttcaaacttttcttttttcttttaactttgaacatctgttttatcatgacaaatattgtgtgtttaatacattcctcatcaaacaaatttggtgtcatatgctcaaaccaaacccttcagcagtccacaaccctagttctgcaaatccacctacaagacacgaataagggatgtgtccactgagattgttgctgctcaagtccagcagactctgcgactattatagcttgccgatatccgaagggatcagaccggacagcacgttgagggacaccaggctgtcgagtttaggcggcattgttccaggtttactttgttcagttcaatttgtctagattttacatattcatgaatagccctttattattggtgcaactaatattcagtcgctaaaatatcaatggcctaccaaatttcgcaaaaaaggatgagcactacacgaaccattcctgtactttgtaagccttccctcctaaaagcttcagaatcttaacatgttacagttagttcttagaagattttatgtgcatcataattctaaaactttagccagtttacacctgttatttagtctactccttgaaaaaagtttttccctttgatctaaacatgaatgcttccttttactccaacatcacagcaaaaaaaaatcaaaagcattgcacttcttactactgatacccctatgtcactactaccatacaggttagtgcacgatccttacctttatgttctacatgtctttgggtttctctttttttcaagtgcgttctattattgtttatatgtccaccttcacactgattagctgttccttgttcctacacagttattatctgttatgtacatttttatacctttccaaattagcttattatctttaaaaaattgtattttcttggctactttacatttgaatgaccaatggcaacatcttcaaacaaacatagctaacttagaggaaagaaaacataatctttaaattgctcataagagagaatgtcatttttcagaaaaaaagaaaaacagtattgatgctttagaaaatcttaaactgatgcatgttaatattatcatatcaatgccaacaacatatgtttaagctggtttcatccttcctagcagctctacttgcttcatctcgctcttcactgctattttttaaattggaaggaaaataagagtacgatagaagaacttgaagcgcattcactggtctcttatttaaagtccataaagcaaagttccaaaaaaacaaaaagaaacattgagttgccttcacccggcttctcttgagaaaatacaaggcgttaagaaattctttagaaaggcatattattactacatatagagctaggagtagatcttcatccgaacccctccaacgacgactaggtcggcgttttctctccctgctgtttcagagactgaatttagtcgagtgggttcacctgcagttccggtatgcaaactacacgaatgatgcctacaacaagagtgggaacgaatccttgtggctgcagctgataaaccagagagcatagacttaacctttgtgctcttctcgacaggcttctttgctgttagactttaaccaattcatctcatgtcccaagttcaattttatgtaatgaggattgcatggtattttttggcaatttatctttaatgaactataatgtatagctgaagttggttgcagtttgaaacaatgcgacatttaaaaacccatagac

SEQ ID NO: 221155 - DNA, 2856 bp, Zea Mays
cttctcctcgcggtctccctcgccgccacgcctgcatccgccactctccgcgctcgcacacgccgcctcctcctccccgtcaccccttcgccgtggtggctcccgtcgtcccacgcctccctcgtctgcaagcgctgacgcctcctcctctccaaccctaccttcgtccgccgcttccatgtcctccacagggcgcctcacctcctcagcttcttcgccgaccacaacaccggcgctccccctccctccctccggtcgtcgtcacgctgcgtcttggcccaaccgttcaggaatttctgtaaggtggactgttatccagagcacgtacttcatttgtacagccttatacaagtacagattcgaattgcatgatgaaatgtgtattttcaaattcatctttaagtgaactcagctaattatatgtgcactcatatacttatttgttttggattataccaataatttatgaggagttgcacccatttatttcctagtttttaatagtgctgcacacttcttctttaggtaagtttataaataaagcttcattttcatgcaatttatgattttatgagattttcccatacacttgcacgttcccatgaaagattcctctcacaaaaaaaacttaaatttcatttaatgtgtaactctctaactcctttcttacatccattgagttatattgcaggttgctagatctattacattttcagacgacgacgacactagtagaaaaaacaattcaaagacgaatgttgaagcgtcacatgaggtataatttataaccttaacagaacaagcttatattcagttatacttaactgttaaaataaacctcatcgtatggtacaaatgttttaccacccaacactcccgaaagttcaagaacattagaatcactagcgaaaaggttcttcaaacttttcttttttcttttaactttgaacatctgttttatcatgacaaatattgtgtgtttaatacattcctcatcaaacaaatttggtgtcatatgctcaaaccaaacccttcagcagtccacaaccctagttctgcaaatccacctacaagacacgaataaggtatttcctttagcactttctacaatttatcaatacgaaattgacatacaaaatataatttagcatgcctgctccattttctttcttggtatctaaaatagaaattttatgaacaatttgacctttatgagttctactaaaacttgaaatttatataaactaattgtactccagttatctcgttgccgtcttttcgtaataggtttcttaaacgtatatgttcacctatttcaagagtaatttttttaccaaacatgtatacatacataggagtatatgtgaatagtgtggtatacaatacatcgacactcccactattttaattatggcccattaattcatgcatgcattcatttattcccttgctgcattttttctatatatttgccttcatctaattttgactgttcatttgatcaaacaacaatgtgtgttgaactaaaatagaggcattagtagaccaggatgaaaaaatagcgttaatacatgttaactaaaagtttaagactccatcctggtccgattctatagtggtacacttttttcttgactaattgcttcgtgctttcagtctttttagtttaaactttcagggatgtgtccactgagattgttgctgctcaagtccagcagactctgcgactattatagcttgccgatatccgaagggatcagaccggacagacctgagatctggttgtgtgcgagattcagcacgttgagggacaccaggctgtcgagtttaggcggcattgttccaggtttactttgttcagttcaatttgtctagattttacatattcatgaatagccctttattattggtgcaactaatattcagtcgctaaaatatcaatggcctaccaaatttcgcaaaaaaggatgagcactacacgaaccattcctgtactttgtaagccttccctcctaaaagcttcagaatcttaacatgttacagttagttcttagaagattttatgtgcatcataattctaaaactttagccagtttacacctgttatttagtctactccttgaaaaaagtttttccctttgatctaaacatgaatgcttccttttactccaacatcacagcaaaaaaaaatcaaaagcattgcacttcttactactgatacccctatgtcactactaccatacaggttagtgcacgatccttacctttatgttctacatgtctttgggtttctctttttttcaagaaaataagagtacgatagaagaacttgaagcgcattcactggtctcttatttaaagtccataaagcaaagttccaaaaaaacaaaaagaaacattgagttgccttcacccggcttctcttgagaaaatacaagacaattgcatttcatctagcattcacatgggaagctctgaaatctgccagcttaaaaactagatgtaccaaacatgctatctgagcaccgcactgatacaacctttgatagtctgcgttttctctccctgctgtttcagttccggtatgcaaactacacgaatgatgcctacaacaagagtgggaacgaatccttgtggctgcagctgataaaccagagagcatagacttaacctttgtgctcttctcgacaggcttctttgctgttagactttaaccaattcatctcatgtcccaagttcaattttatgtaatgaggattgcatggtattttttggcaatttatctttaatgaactataatgtatagctgaagttggttgcagtttgaaacaatgcgacatttaaaaacccatagac

SEQ ID NO: 221156 - DNA, 3432 bp, Zea Mays
cttctcctcgcggtctccctcgccgccacgcctgcatccgccactctccgcgctcgcacacgccgcctcctcctccccgtcaccccttcgccgtggtggctcccgtcgtcccacgcctccctcgtctgcaagcgctgacgcctcctcctctccaaccctaccttcgtccgccgcttccatgtcctccacagggcgcctcacctcctcagcttcttcgccgaccacaacaccggcgctccccctccctccctccggtcgtcgtcacgctgcgtcttggcccaaccgttcaggaatttctgtaaggtggactgttatccagagcacgtacttcatttgtacagccttatacaagtacagattcgaattgcatgatgaaatgtgtattttcaaattcatctttaagtgaactcagctaattatatgtgcactcatatacttatttgttttggattataccaataatttatgaggagttgcacccatttatttcctagtttttaatagtgctgcacacttcttctttaggtaagtttataaataaagcttcattttcatgcaatttatgattttatgagattttcccatacacttgcacgttcccatgaaagattcctctcacaaaaaaaacttaaatttcatttaatgtgtaactctctaactcctttcttacatccattgagttatattgcaggttgctagatctattacattttcagacgacgacgacactaggtaagtatatttccattaacattctattcaactcactattatatgcttctattatatactcctatttaataacatttattttttgttaataaaccagtagaaaaaacaattcaaagacgaatgttgaagcgtcacatgaggtataatttataaccttaacagaacaagcttatattcagttatacttaactgttaaaataaacctcatcgtatggtacaaatgttttaccacccaacactcccgaaagttcaagaacattagaatcactagcgaaaaggttcttcaaacttttcttttttcttttaactttgaacatctgttttatcatgacaaatattgtgtgtttaatacattcctcatcaaacaaatttggtgtcatatgctcaaaccaaacccttcagcagtccacaaccctagttctgcaaatccacctacaagacacgaataaggtatttcctttagcactttctacaatttatcaatacgaaattgacatacaaaatataatttagcatgcctgctccattttctttcttggtatctaaaatagaaattttatgaacaatttgacctttatgagttctactaaaacttgaaatttatataaactaattgtactccagttatctcgttgccgtcttttcgtaataggtttcttaaacgtatatgttcacctatttcaagagtaatttttttaccaaacatgtatacatacataggagtatatgtgaatagtgtggtatacaatacatcgacactcccactattttaattatggcccattaattcatgcatgcattcatttattcccttgctgcattttttctatatatttgccttcatctaattttgactgttcatttgatcaaacaacaatgtgtgttgaactaaaatagaggcattagtagaccaggatgaaaaaatagcgttaatacatgttaactaaaagtttaagactccatcctggtccgattctatagtggtacacttttttcttgactaattgcttcgtgctttcagtctttttagtttaaactttcagggatgtgtccactgagattgttgctgctcaagtccagcagactctgcgactattatagcttgccgatatccgaagggatcagaccggacaggtaattttgtgaattgtgatagatttagctcatagagactgctcagttttgtgaccgccatcaaaatcagacctgagatctggttgtgtgcgagattcagcacgttgagggacaccaggctgtcgagtttaggcggcattgttccaggtttactttgttcagttcaatttgtctagattttacatattcatgaatagccctttattattggtgcaactaatattcagtcgctaaaatatcaatggcctaccaaatttcgcaaaaaaggatgagcactacacgaaccattcctgtactttgtaagccttccctcctaaaagcttcagaatcttaacatgttacagttagttcttagaagattttatgtgcatcataattctaaaactttagccagtttacacctgttatttagtctactccttgaaaaaagtttttccctttgatctaaacatgaatgcttccttttactccaacatcacagcaaaaaaaaatcaaaagcattgcacttcttactactgatacccctatgtcactactaccatacaggttagtgcacgatccttacctttatgttctacatgtctttgggtttctctttttttcaagtgcgttctattattgtttatatgtccaccttcacactgattagctgttccttgttcctacacagttattatctgttatgtacatttttatacctttccaaattagcttattatctttaaaaaattgtattttcttggctactttacatttgaatgaccaatggcaacatcttcaaacaaacatagctaacttagaggaaagaaaacataatctttaaattgctcataagagagaatgtcatttttcagaaaaaaagaaaaacagtattgatgctttagaaaatcttaaactgatgcatgttaatattatcatatcaatgccaacaacatatgtttaagctggtttcatccttcctagcagctctacttgcttcatctcgctcttcactgctattttttaaattggaaggaaaataagagtacgatagaagaacttgaagcgcattcactggtctcttatttaaagtccataaagcaaagttccaaaaaaacaaaaagaaacattgagttgccttcacccggcttctcttgagaaaatacaagacaattgcatttcatctagcattcacatgggaagctctgaaatctgccagcttaaaaactagatgtaccaaacatgctatctgagcaccgcactgatacaacctttgatagtctgcgttttctctccctgctgtttcagttccggtatgcaaactacacgaatgatgcctacaacaagagtgggaacgaatccttgtggctgcagctgataaaccagagagcatagacttaacctttgtgctcttctcgacaggcttctttgctgttagactttaaccaattcatctcatgtcccaagttcaattttatgtaatgaggattgcatggtattttttggcaatttatctttaatgaactataatgtatagctgaagttggttgcagtttgaaacaatgcgacatttaaaaacccatagac

SEQ ID NO: 221157 - DNA, 1949 bp, Zea Mays
cttctcctcgcggtctccctcgccgccacgcctgcatccgccactctccgcgctcgcacacgccgcctcctcctccccgtcaccccttcgccgtggtggctcccgtcgtcccacgcctccctcgtctgcaagcgctgacgcctcctcctctccaaccctaccttcgtccgccgcttccatgtcctccacagggcgcctcacctcctcagcttcttcgccgaccacaacaccggcgctccccctccctccctccggtcgtcgtcacgctgcgtcttggcccaaccgttcaggaatttctgtaaggtggactgttatccagagcacgtacttcatttgtacagccttatacaagtacagattcgaattgcatgatgaaatgtgtattttcaaattcatctttaagtgaactcagctaattatatgtgcactcatatacttatttgttttggattataccaataatttatgaggagttgcacccatttatttcctagtttttaatagtgctgcacacttcttctttaggtaagtttataaataaagcttcattttcatgcaatttatgattttatgagattttcccatacacttgcacgttcccatgaaagattcctctcacaaaaaaaacttaaatttcatttaatgtgtaactctctaactcctttcttacatccattgagttatattgcaggttgctagatctattacattttcagacgacgacgacactaggtaagtatatttccattaacattctattcaactcactattatatgcttctattatatactcctatttaataacatttattttttgttaataaaccagtagaaaaaacaattcaaagacgaatgttgaagcgtcacatgaggtataatttataaccttaacagaacaagcttatattcagttatacttaactgttaaaataaacctcatcgtatggtacaaatgttttaccacccaacactcccgaaagttcaagaacattagaatcactagcgaaaaggttcttcaaacttttcttttttcttttaactttgaacatctgttttatcatgacaaatattgtgtgtttaatacattcctcatcaaacaaatttggtgtcatatgctcaaaccaaacccttcagcagtccacaaccctagttctgcaaatccacctacaagacacgaataagggatgtgtccactgagattgttgctgctcaagtccagcagactctgcgactattatagcttgccgatatccgaagggatcagaccggacagcaaaaaaaaatcaaaagcattgcacttcttactactgatacccctatgtcactactaccatacagctctacttgcttcatctcgctcttcactgctattttttaaattggaaggaaaataagagtacgatagaagaacttgaagcgcattcactggtctcttatttaaagtccataaagcaaagttccaaaaaaacaaaaagaaacattgagttgccttcacccggcttctcttgagaaaatacaaggcgttaagaaattctttagaaaggcatattattactacatatagagctaggagtagatcttcatccgaacccctccaacgacgactaggtcggcgttttctctccctgctgtttcagagactgaatttagtcgagtgggttcacctgcagttccggtatgcaaactacacgaatgatgcctacaacaagagtgggaacgaatccttgtggctgcagctgataaaccagagagcatagacttaacctttgtgctcttctcgacaggcttctttgctgttagactttaaccaattcatctcatgtcccaagttcaattttatgtaatgaggattgcatggtattttttggcaatttatctttaatgaactataatgtatagctgaagttggttgcagtttgaaacaatgcgacatttaaaaacccatagac

SEQ ID NO: 221158 - DNA, 3645 bp, Zea Mays
cttctcctcgcggtctccctcgccgccacgcctgcatccgccactctccgcgctcgcacacgccgcctcctcctccccgtcaccccttcgccgtggtggctcccgtcgtcccacgcctccctcgtctgcaagcgctgacgcctcctcctctccaaccctaccttcgtccgccgcttccatgtcctccacagggcgcctcacctcctcagcttcttcgccgaccacaacaccggcgctccccctccctccctccggtcgtcgtcacgctgcgtcttggcccaaccgttcaggaatttctgtaaggtggactgttatccagagcacgtacttcatttgtacagccttatacaagtacagattcgaattgcatgatgaaatgtgtattttcaaattcatctttaagtgaactcagctaattatatgtgcactcatatacttatttgttttggattataccaataatttatgaggagttgcacccatttatttcctagtttttaatagtgctgcacacttcttctttaggtaagtttataaataaagcttcattttcatgcaatttatgattttatgagattttcccatacacttgcacgttcccatgaaagattcctctcacaaaaaaaacttaaatttcatttaatgtgtaactctctaactcctttcttacatccattgagttatattgcaggttgctagatctattacattttcagacgacgacgacactagtagaaaaaacaattcaaagacgaatgttgaagcgtcacatgaggtataatttataaccttaacagaacaagcttatattcagttatacttaactgttaaaataaacctcatcgtatggtacaaatgttttaccacccaacactcccgaaagttcaagaacattagaatcactagcgaaaaggttcttcaaacttttcttttttcttttaactttgaacatctgttttatcatgacaaatattgtgtgtttaatacattcctcatcaaacaaatttggtgtcatatgctcaaaccaaacccttcagcagtccacaaccctagttctgcaaatccacctacaagacacgaataaggtatttcctttagcactttctacaatttatcaatacgaaattgacatacaaaatataatttagcatgcctgctccattttctttcttggtatctaaaatagaaattttatgaacaatttgacctttatgagttctactaaaacttgaaatttatataaactaattgtactccagttatctcgttgccgtcttttcgtaataggtttcttaaacgtatatgttcacctatttcaagagtaatttttttaccaaacatgtatacatacataggagtatatgtgaatagtgtggtatacaatacatcgacactcccactattttaattatggcccattaattcatgcatgcattcatttattcccttgctgcattttttctatatatttgccttcatctaattttgactgttcatttgatcaaacaacaatgtgtgttgaactaaaatagaggcattagtagaccaggatgaaaaaatagcgttaatacatgttaactaaaagtttaagactccatcctggtccgattctatagtggtacacttttttcttgactaattgcttcgtgctttcagtctttttagtttaaactttcagggatgtgtccactgagattgttgctgctcaagtccagcagactctgcgactattatagcttgccgatatccgaagggatcagaccggacagcacgttgagggacaccaggctgtcgagtttaggcggcattgttccaggtttactttgttcagttcaatttgtctagattttacatattcatgaatagccctttattattggtgcaactaatattcagtcgctaaaatatcaatggcctaccaaatttcgcaaaaaaggatgagcactacacgaaccattcctgtactttgtaagccttccctcctaaaagcttcagaatcttaacatgttacagttagttcttagaagattttatgtgcatcataattctaaaactttagccagtttacacctgttatttagtctactccttgaaaaaagtttttccctttgatctaaacatgaatgcttccttttactccaacatcacagcaaaaaaaaatcaaaagcattgcacttcttactactgatacccctatgtcactactaccatacaggttagtgcacgatccttacctttatgttctacatgtctttgggtttctctttttttcaagtgcgttctattattgtttatatgtccaccttcacactgattagctgttccttgttcctacacagttattatctgttatgtacatttttatacctttccaaattagcttattatctttaaaaaattgtattttcttggctactttacatttgaatgaccaatggcaacatcttcaaacaaacatagctaacttagaggaaagaaaacataatctttaaattgctcataagagagaatgtcatttttcagaaaaaaagaaaaacagtattgatgctttagaaaatcttaaactgatgcatgttaatattatcatatcaatgccaacaacatatgtttaagctggtttcatccttcctagcagctctacttgcttcatctcgctcttcactgctattttttaaattggaaggaaaataagagtacgatagaagaacttgaagcgcattcactggtctcttatttaaagtccataaagcaaagttccaaaaaaacaaaaagaaacattgagttgccttcacccggcttctcttgagaaaatacaaggcgttaagaaattctttagaaaggcatattattactacatatagagctaggagtagatcttcatccgaacccctccaacgacgactaggtcggcgttttctctccctgctgtttcaggtttgttacatttcaacctgtgggctttctttcagacaattgcatttcatctagcattcacatgggaagctctgaaatctgccagcttaaaaactagatgtaccaaacatgctatctgagcaccgcactgatacaacctttgatagtctgcgttttctctccctgctgtttcaggtttgttacatttcaacctgtggggtttctttcagacaattgcatttcatctagcattcacatgggaagctctcaaatctgccagcttaaaaactagatgtaccaaacatgctatctgagcaccgcactgatacaacctttgatcagtatttagtactacttgctcttccatattaatactactggtactactatttcattgcacgtttacatgacatggaacagagactgaatttagtcgagtgggttcacctgcagttccggtatgcaaactacacgaatgatgcctacaacaagagtgggaacgaatccttgtggctgcagctgataaaccagagagcatagacttaacctttgtgctcttctcgacaggcttctttgctgttagactttaaccaattcatctcatgtcccaagttcaattttatgtaatgaggattgcatggtattttttggcaatttatctttaatgaactataatgtatagctgaagttggttgcagtttgaaacaatgcgacatttaaaaacccatagac

SEQ ID NO: 221159 - DNA, 3428 bp, Zea Mays
cttctcctcgcggtctccctcgccgccacgcctgcatccgccactctccgcgctcgcacacgccgcctcctcctccccgtcaccccttcgccgtggtggctcccgtcgtcccacgcctccctcgtctgcaagcgctgacgcctcctcctctccaaccctaccttcgtccgccgcttccatgtcctccacagggcgcctcacctcctcagcttcttcgccgaccacaacaccggcgctccccctccctccctccggtcgtcgtcacgctgcgtcttggcccaaccgttcaggaatttctgtaaggtggactgttatccagagcacgtacttcatttgtacagccttatacaagtacagattcgaattgcatgatgaaatgtgtattttcaaattcatctttaagtgaactcagctaattatatgtgcactcatatacttatttgttttggattataccaataatttatgaggagttgcacccatttatttcctagtttttaatagtgctgcacacttcttctttaggtaagtttataaataaagcttcattttcatgcaatttatgattttatgagattttcccatacacttgcacgttcccatgaaagattcctctcacaaaaaaaacttaaatttcatttaatgtgtaactctctaactcctttcttacatccattgagttatattgcaggttgctagatctattacattttcagacgacgacgacactagaaaaaacaattcaaagacgaatgttgaagcgtcacatgaggtataatttataaccttaacagaacaagcttatattcagttatacttaactgttaaaataaacctcatcgtatggtacaaatgttttaccacccaacactcccgaaagttcaagaacattagaatcactagcgaaaaggttcttcaaacttttcttttttcttttaactttgaacatctgttttatcatgacaaatattgtgtgtttaatacattcctcatcaaacaaatttggtgtcatatgctcaaaccaaacccttcagcagtccacaaccctagttctgcaaatccacctacaagacacgaataaggtatttcctttagcactttctacaatttatcaatacgaaattgacatacaaaatataatttagcatgcctgctccattttctttcttggtatctaaaatagaaattttatgaacaatttgacctttatgagttctactaaaacttgaaatttatataaactaattgtactccagttatctcgttgccgtcttttcgtaataggtttcttaaacgtatatgttcacctatttcaagagtaatttttttaccaaacatgtatacatacataggagtatatgtgaatagtgtggtatacaatacatcgacactcccactattttaattatggcccattaattcatgcatgcattcatttattcccttgctgcattttttctatatatttgccttcatctaattttgactgttcatttgatcaaacaacaatgtgtgttgaactaaaatagaggcattagtagaccaggatgaaaaaatagcgttaatacatgttaactaaaagtttaagactccatcctggtccgattctatagtggtacacttttttcttgactaattgcttcgtgctttcagtctttttagtttaaactttcagggatgtgtccactgagattgttgctgctcaagtccagcagactctgcgactattatagcttgccgatatccgaagggatcagaccggacagcacgttgagggacaccaggctgtcgagtttaggcggcattgttccaggtttactttgttcagttcaatttgtctagattttacatattcatgaatagccctttattattggtgcaactaatattcagtcgctaaaatatcaatggcctaccaaatttcgcaaaaaaggatgagcactacacgaaccattcctgtactttgtaagccttccctcctaaaagcttcagaatcttaacatgttacagttagttcttagaagattttatgtgcatcataattctaaaactttagccagtttacacctgttatttagtctactccttgaaaaaagtttttccctttgatctaaacatgaatgcttccttttactccaacatcacagcaaaaaaaaatcaaaagcattgcacttcttactactgatacccctatgtcactactaccatacaggttagtgcacgatccttacctttatgttctacatgtctttgggtttctctttttttcaagtgcgttctattattgtttatatgtccaccttcacactgattagctgttccttgttcctacacagttattatctgttatgtacatttttatacctttccaaattagcttattatctttaaaaaattgtattttcttggctactttacatttgaatgaccaatggcaacatcttcaaacaaacatagctaacttagaggaaagaaaacataatctttaaattgctcataagagagaatgtcatttttcagaaaaaaagaaaaacagtattgatgctttagaaaatcttaaactgatgcatgttaatattatcatatcaatgccaacaacatatgtttaagctggtttcatccttcctagcagctctacttgcttcatctcgctcttcactgctattttttaaattggaaggaaaataagagtacgatagaagaacttgaagcgcattcactggtctcttatttaaagtccataaagcaaagttccaaaaaaacaaaaagaaacattgagttgccttcacccggcttctcttgagaaaatacaaggtaccagtaggcaactcagaagagacaacaactgtactttctcaggcgttaagaaattctttagaaaggcatattattactacatatagagctaggagtagatcttcatccgaacccctccaacgacgactaggtcggcgttttctctccctgctgtttcagcttaaaaactagatgtaccaaacatgctatctgagcaccgcactgatacaacctttgatcagtatttagtactacttgctcttccatattaatactactggtactactatttcattgcacgtttacatgacatggaacagagactgaatttagtcgagtgggttcacctgcagttccggtatgcaaactacacgaatgatgcctacaacaagagtgggaacgaatccttgtggctgcagctgataaaccagagagcatagacttaacctttgtgctcttctcgacaggcttctttgctgttagactttaaccaattcatctcatgtcccaagttcaattttatgtaatgaggattgcatggtattttttggcaatttatctttaatgaactataatgtatagctgaagttggttgcagtttgaaacaatgcgacatttaaaaacccatagac

SEQ ID NO: 221160 - DNA, 3425 bp, Zea Mays
cttctcctcgcggtctccctcgccgccacgcctgcatccgccactctccgcgctcgcacacgccgcctcctcctccccgtcaccccttcgccgtggtggctcccgtcgtcccacgcctccctcgtctgcaagcgctgacgcctcctcctctccaaccctaccttcgtccgccgcttccatgtcctccacagggcgcctcacctcctcagcttcttcgccgaccacaacaccggcgctccccctccctccctccggtcgtcgtcacgctgcgtcttggcccaaccgttcaggaatttctgtaaggtggactgttatccagagcacgtacttcatttgtacagccttatacaagtacagattcgaattgcatgatgaaatgtgtattttcaaattcatctttaagtgaactcagctaattatatgtgcactcatatacttatttgttttggattataccaataatttatgaggagttgcacccatttatttcctagtttttaatagtgctgcacacttcttctttaggtaagtttataaataaagcttcattttcatgcaatttatgattttatgagattttcccatacacttgcacgttcccatgaaagattcctctcacaaaaaaaacttaaatttcatttaatgtgtaactctctaactcctttcttacatccattgagttatattgcaggttgctagatctattacattttcagacgacgacgacactaggtaagtatatttccattaacattctattcaactcactattatatgcttctattatatactcctatttaataacatttattttttgttaataaaccagtagaaaaaacaattcaaagacgaatgttgaagcgtcacatgaggtataatttataaccttaacagaacaagcttatattcagttatacttaactgttaaaataaacctcatcgtatggtacaaatgttttaccacccaacactcccgaaagttcaagaacattagaatcactagcgaaaaggttcttcaaacttttcttttttcttttaactttgaacatctgttttatcatgacaaatattgtgtgtttaatacattcctcatcaaacaaatttggtgtcatatgctcaaaccaaacccttcagcagtccacaaccctagttctgcaaatccacctacaagacacgaataaggtatttcctttagcactttctacaatttatcaatacgaaattgacatacaaaatataatttagcatgcctgctccattttctttcttggtatctaaaatagaaattttatgaacaatttgacctttatgagttctactaaaacttgaaatttatataaactaattgtactccagttatctcgttgccgtcttttcgtaataggtttcttaaacgtatatgttcacctatttcaagagtaatttttttaccaaacatgtatacatacataggagtatatgtgaatagtgtggtatacaatacatcgacactcccactattttaattatggcccattaattcatgcatgcattcatttattcccttgctgcattttttctatatatttgccttcatctaattttgactgttcatttgatcaaacaacaatgtgtgttgaactaaaatagaggcattagtagaccaggatgaaaaaatagcgttaatacatgttaactaaaagtttaagactccatcctggtccgattctatagtggtacacttttttcttgactaattgcttcgtgctttcagtctttttagtttaaactttcagggatgtgtccactgagattgttgctgctcaagtccagcagactctgcgactattatagcttgccgatatccgaagggatcagaccggacagcacgttgagggacaccaggctgtcgagtttaggcggcattgttccaggtttactttgttcagttcaatttgtctagattttacatattcatgaatagccctttattattggtgcaactaatattcagtcgctaaaatatcaatggcctaccaaatttcgcaaaaaaggatgagcactacacgaaccattcctgtactttgtaagccttccctcctaaaagcttcagaatcttaacatgttacagttagttcttagaagattttatgtgcatcataattctaaaactttagccagtttacacctgttatttagtctactccttgaaaaaagtttttccctttgatctaaacatgaatgcttccttttactccaacatcacagcaaaaaaaaatcaaaagcattgcacttcttactactgatacccctatgtcactactaccatacaggttagtgcacgatccttacctttatgttctacatgtctttgggtttctctttttttcaagtgcgttctattattgtttatatgtccaccttcacactgattagctgttccttgttcctacacagttattatctgttatgtacatttttatacctttccaaattagcttattatctttaaaaaattgtattttcttggctactttacatttgaatgaccaatggcaacatcttcaaacaaacatagctaacttagaggaaagaaaacataatctttaaattgctcataagagagaatgtcatttttcagaaaaaaagaaaaacagtattgatgctttagaaaatcttaaactgatgcatgttaatattatcatatcaatgccaacaacatatgtttaagctggtttcatccttcctagcagctctacttgcttcatctcgctcttcactgctattttttaaattggaaggaaaataagagtacgatagaagaacttgaagcgcattcactggtctcttatttaaagtccataaagcaaagttccaaaaaaacaaaaagaaacattgagttgccttcacccggcttctcttgagaaaatacaaggtaaacatatttggcaattgtaatatatgttgttattttgctctttagttgcttcaaattgtttatgggtaccagtaggcaactcagaagagacaacaactgtactttctcaggcgttaagaaattctttagaaaggcatattattactacatatagagctaggagtagatcttcatccgaacccctccaacgacgactaggtcggcgttttctctccctgctgtttcagagttccggtatgcaaactacacgaatgatgcctacaacaagagtgggaacgaatccttgtggctgcagctgataaaccagagagcatagacttaacctttgtgctcttctcgacaggcttctttgctgttagactttaaccaattcatctcatgtcccaagttcaattttatgtaatgaggattgcatggtattttttggcaatttatctttaatgaactataatgtatagctgaagttggttgcagtttgaaacaatgcgacatttaaaaacccatagac

SEQ ID NO: 221161 - DNA, 3541 bp, Zea Mays
ccctcgccgccacgcctgcatccgccactctccgcgctcgcacacgccgcctcctcctccccgtcaccccttcgccgtggtggctcccgtcgtcccacgcctccctcgtctgcaagcgctgacgcctcctcctctccaaccctaccttcgtccgccgcttccatgtcctccacagggcgcctcacctcctcagcttcttcgccgaccacaacaccggcgctccccctccctccctccggtcgtcgtcacgctgcgtcttggcccaaccgttcaggaatttctgtaaggtggactgttatccagagcacgtacttcatttgtacagccttatacaagtacagattcgaattgcatgatgaaatgtgtattttcaaattcatctttaagtgaactcagctaattatatgtgcactcatatacttatttgttttggattataccaataatttatgaggagttgcacccatttatttcctagtttttaatagtgctgcacacttcttctttaggtaagtttataaataaagcttcattttcatgcaatttatgattttatgagattttcccatacacttgcacgttcccatgaaagattcctctcacaaaaaaaacttaaatttcatttaatgtgtaactctctaactcctttcttacatccattgagttatattgcaggttgctagatctattacattttcagacgacgacgacactagaaaaaacaattcaaagacgaatgttgaagcgtcacatgaggtataatttataaccttaacagaacaagcttatattcagttatacttaactgttaaaataaacctcatcgtatggtacaaatgttttaccacccaacactcccgaaagttcaagaacattagaatcactagcgaaaaggttcttcaaacttttcttttttcttttaactttgaacatctgttttatcatgacaaatattgtgtgtttaatacattcctcatcaaacaaatttggtgtcatatgctcaaaccaaacccttcagcagtccacaaccctagttctgcaaatccacctacaagacacgaataaggtatttcctttagcactttctacaatttatcaatacgaaattgacatacaaaatataatttagcatgcctgctccattttctttcttggtatctaaaatagaaattttatgaacaatttgacctttatgagttctactaaaacttgaaatttatataaactaattgtactccagttatctcgttgccgtcttttcgtaataggtttcttaaacgtatatgttcacctatttcaagagtaatttttttaccaaacatgtatacatacataggagtatatgtgaatagtgtggtatacaatacatcgacactcccactattttaattatggcccattaattcatgcatgcattcatttattcccttgctgcattttttctatatatttgccttcatctaattttgactgttcatttgatcaaacaacaatgtgtgttgaactaaaatagaggcattagtagaccaggatgaaaaaatagcgttaatacatgttaactaaaagtttaagactccatcctggtccgattctatagtggtacacttttttcttgactaattgcttcgtgctttcagtctttttagtttaaactttcagggatgtgtccactgagattgttgctgctcaagtccagcagactctgcgactattatagcttgccgatatccgaagggatcagaccggacagcacgttgagggacaccaggctgtcgagtttaggcggcattgttccaggtttactttgttcagttcaatttgtctagattttacatattcatgaatagccctttattattggtgcaactaatattcagtcgctaaaatatcaatggcctaccaaatttcgcaaaaaaggatgagcactacacgaaccattcctgtactttgtaagccttccctcctaaaagcttcagaatcttaacatgttacagttagttcttagaagattttatgtgcatcataattctaaaactttagccagtttacacctgttatttagtctactccttgaaaaaagtttttccctttgatctaaacatgaatgcttccttttactccaacatcacagcaaaaaaaaatcaaaagcattgcacttcttactactgatacccctatgtcactactaccatacaggttagtgcacgatccttacctttatgttctacatgtctttgggtttctctttttttcaagtgcgttctattattgtttatatgtccaccttcacactgattagctgttccttgttcctacacagttattatctgttatgtacatttttatacctttccaaattagcttattatctttaaaaaattgtattttcttggctactttacatttgaatgaccaatggcaacatcttcaaacaaacatagctaacttagaggaaagaaaacataatctttaaattgctcataagagagaatgtcatttttcagaaaaaaagaaaaacagtattgatgctttagaaaatcttaaactgatgcatgttaatattatcatatcaatgccaacaacatatgtttaagctggtttcatccttcctagcagctctacttgcttcatctcgctcttcactgctattttttaaattggaaggaaaataagagtacgatagaagaacttgaagcgcattcactggtctcttatttaaagtccataaagcaaagttccaaaaaaacaaaaagaaacattgagttgccttcacccggcttctcttgagaaaatacaaggcgttaagaaattctttagaaaggcatattattactacatatagagctaggagtagatcttcatccgaacccctccaacgacgactaggtcggcgttttctctccctgctgtttcagcttaaaaactagatgtaccaaacatgctatctgagcaccgcactgatacaacctttgatagtctgcgttttctctccctgctgtttcaggtttgttacatttcaacctgtggggtttctttcagacaattgcatttcatctagcattcacatgggaagctctcaaatctgccagcttaaaaactagatgtaccaaacatgctatctgagcaccgcactgatacaacctttgatcagtatttagtactacttgctcttccatattaatactactggtactactatttcattgcacgtttacatgacatggaacagagactgaatttagtcgagtgggttcacctgcagttccggtatgcaaactacacgaatgatgcctacaacaagagtgggaacgaatccttgtggctgcagctgataaaccagagagcatagacttaacctttgtgctcttctcgacaggcttctttgctgttagactttaaccaattcatctcatgtcccaagttcaattttatgtaatgaggattgcatggtattttttggcaatttatctttaatgaactataatgtatagctgaagttggttgcagtttgaaacaatgcgacatttaaaaacccatagac

SEQ ID NO: 221162 - DNA, 2637 bp, Zea Mays
ccctcgccgccacgcctgcatccgccactctccgcgctcgcacacgccgcctcctcctccccgtcaccccttcgccgtggtggctcccgtcgtcccacgcctccctcgtctgcaagcgctgacgcctcctcctctccaaccctaccttcgtccgccgcttccatgtcctccacagggcgcctcacctcctcagcttcttcgccgaccacaacaccggcgctccccctccctccctccggtcgtcgtcacgctgcgtcttggcccaaccgttcaggaatttctgtaaggtggactgttatccagagcacgtacttcatttgtacagccttatacaagtacagattcgaattgcatgatgaaatgtgtattttcaaattcatctttaagtgaactcagctaattatatgtgcactcatatacttatttgttttggattataccaataatttatgaggagttgcacccatttatttcctagtttttaatagtgctgcacacttcttctttaggtaagtttataaataaagcttcattttcatgcaatttatgattttatgagattttcccatacacttgcacgttcccatgaaagattcctctcacaaaaaaaacttaaatttcatttaatgtgtaactctctaactcctttcttacatccattgagttatattgcaggttgctagatctattacattttcagacgacgacgacactagtagaaaaaacaattcaaagacgaatgttgaagcgtcacatgaggtataatttataaccttaacagaacaagcttatattcagttatacttaactgttaaaataaacctcatcgtatggtacaaatgttttaccacccaacactcccgaaagttcaagaacattagaatcactagcgaaaaggttcttcaaacttttcttttttcttttaactttgaacatctgttttatcatgacaaatattgtgtgtttaatacattcctcatcaaacaaatttggtgtcatatgctcaaaccaaacccttcagcagtccacaaccctagttctgcaaatccacctacaagacacgaataagggatgtgtccactgagattgttgctgctcaagtccagcagactctgcgactattatagcttgccgatatccgaagggatcagaccggacagcacgttgagggacaccaggctgtcgagtttaggcggcattgttccaggtttactttgttcagttcaatttgtctagattttacatattcatgaatagccctttattattggtgcaactaatattcagtcgctaaaatatcaatggcctaccaaatttcgcaaaaaaggatgagcactacacgaaccattcctgtactttgtaagccttccctcctaaaagcttcagaatcttaacatgttacagttagttcttagaagattttatgtgcatcataattctaaaactttagccagtttacacctgttatttagtctactccttgaaaaaagtttttccctttgatctaaacatgaatgcttccttttactccaacatcacagcaaaaaaaaatcaaaagcattgcacttcttactactgatacccctatgtcactactaccatacaggttagtgcacgatccttacctttatgttctacatgtctttgggtttctctttttttcaagtgcgttctattattgtttatatgtccaccttcacactgattagctgttccttgttcctacacagttattatctgttatgtacatttttatacctttccaaattagcttattatctttaaaaaattgtattttcttggctactttacatttgaatgaccaatggcaacatcttcaaacaaacatagctaacttagaggaaagaaaacataatctttaaattgctcataagagagaatgtcatttttcagaaaaaaagaaaaacagtattgatgctttagaaaatcttaaactgatgcatgttaatattatcatatcaatgccaacaacatatgtttaagctggtttcatccttcctagcagctctacttgcttcatctcgctcttcactgctattttttaaattggaaggaaaataagagtacgatagaagaacttgaagcgcattcactggtctcttatttaaagtccataaagcaaagttccaaaaaaacaaaaagaaacattgagttgccttcacccggcttctcttgagaaaatacaaggcgttaagaaattctttagaaaggcatattattactacatatagagctaggagtagatcttcatccgaacccctccaacgacgactaggtcggcgttttctctccctgctgtttcagagactgaatttagtcgagtgggttcacctgcagttccggtatgcaaactacacgaatgatgcctacaacaagagtgggaacgaatccttgtggctgcagctgataaaccagagagcatagacttaacctttgtgctcttctcgacaggcttctttgctgttagactttaaccaattcatctcatgtcccaagttcaattttatgtaatgaggattgcatggtattttttggcaatttatctttaatgaactataatgtatagctgaagttggttgcagtttgaaacaatgcgacatttaaaaacccatagac

SEQ ID NO: 221163 - DNA, 4403 bp, Zea Mays
ctcgccgccacgcctgcatccgccactctccgcgctcgcacacgccgcctcctcctccccgtcaccccttcgccgtggtggctcccgtcgtcccacgcctccctcgtctgcaagcgctgacgcctcctcctctccaaccctaccttcgtccgccgcttccatgtcctccacagggcgcctcacctcctcagcttcttcgccgaccacaacaccggcgctccccctccctccctccggtcgtcgtcacgctgcgtcttggcccaaccgttcaggtgctcggtgcttaactctcctattgcacacccatgtttaacttttcttgaattttcttaggaattgaggctgtagggtatatatgaggggttaattcagccgaactgttcagtaacgtggtaactgttcttcagggtgcgagtttgttgtactataaaggtttggtaacctgaataaaacaaatgaacttctgttctagtttcactatcaccaggttgcgggtttgaaggccaaaaccttcagcactggtcctccaaaaccttcagcgctggtcctgcctatgctagtttcatttgcatggataagttatgaatgaagaaaacatacattttaatatctaggcgaccatttcagaagacgtgtagttagaaatcagtaactaagaacagatcttaaccttatacattcttggtctttctttttgtcctgtatttttttattgtttgggtgtaacaccattattacatagcttggttgatgcatacactactacatggtatttatatcgtcctgacgattgttacatcaaccacattacacattatatatagcagtatagaataaatgttgtacatgtctaataatgcacactaataattgtaaatttgcaacccacttatccagctgattgatattgtgatcagttcacgttgcaagagtttctataaggtggtctgttatccacactacaatctacaaacttcatcagtacatcctcatacaagtgcagatcaaattgcatggtgaaatgtgtacttacaaattcgtttgtaagtgaacttagctaattatatggatactcacatagttttttggataccgatcataccaataatttacgaggaggtgcacccattcagcttcccagtatctaattgtactatacactccttccataggtaagtttataaataaagcttcgttttccatacaatatgattatgctcctttttatgtgaactgcaatattggtcactctatatcagtaaagattgagtgttgcacatgtctaacaatgtgcagtgactgtaaatttgcatcccgcttatccagctgatcaacattgtgattggtttacattgcaggaatttctgtaaggtggactgttatccagagcacgtacttcatttgtacagccttatacaagttgctagatctattacattttcagacgacgacgacactagtagaaaaaacaattcaaagacgaatgttgaagcgtcacatgaggtataatttataaccttaacagaacaagcttatattcagttatacttaactgttaaaataaacctcatcgtatggtacaaatgttttaccacccaacactcccgaaagttcaagaacattagaatcactagcgaaaaggttcttcaaacttttcttttttcttttaactttgaacatctgttttatcatgacaaatattgtgtgtttaatacattcctcatcaaacaaatttggtgtcatatgctcaaaccaaacccttcagcagtccacaaccctagttctgcaaatccacctacaagacacgaataaggtatttcctttagcactttctacaatttatcaatacgaaattgacatacaaaatataatttagcatgcctgctccattttctttcttggtatctaaaatagaaattttatgaacaatttgacctttatgagttctactaaaacttgaaatttatataaactaattgtactccagttatctcgttgccgtcttttcgtaataggtttcttaaacgtatatgttcacctatttcaagagtaatttttttaccaaacatgtatacatacataggagtatatgtgaatagtgtggtatacaatacatcgacactcccactattttaattatggcccattaattcatgcatgcattcatttattcccttgctgcattttttctatatatttgccttcatctaattttgactgttcatttgatcaaacaacaatgtgtgttgaactaaaatagaggcattagtagaccaggatgaaaaaatagcgttaatacatgttaactaaaagtttaagactccatcctggtccgattctatagtggtacacttttttcttgactaattgcttcgtgctttcagtctttttagtttaaactttcagggatgtgtccactgagattgttgctgctcaagtccagcagactctgcgactattatagcttgccgatatccgaagggatcagaccggacagacctgagatctggttgtgtgcgagattcagcacgttgagggacaccaggctgtcgagtttaggcggcattgttccaggtttactttgttcagttcaatttgtctagattttacatattcatgaatagccctttattattggtgcaactaatattcagtcgctaaaatatcaatggcctaccaaatttcgcaaaaaaggatgagcactacacgaaccattcctgtactttgtaagccttccctcctaaaagcttcagaatcttaacatgttacagttagttcttagaagattttatgtgcatcataattctaaaactttagccagtttacacctgttatttagtctactccttgaaaaaagtttttccctttgatctaaacatgaatgcttccttttactccaacatcacagcaaaaaaaaatcaaaagcattgcacttcttactactgatacccctatgtcactactaccatacaggttagtgcacgatccttacctttatgttctacatgtctttgggtttctctttttttcaagtgcgttctattattgtttatatgtccaccttcacactgattagctgttccttgttcctacacagttattatctgttatgtacatttttatacctttccaaattagcttattatctttaaaaaattgtattttcttggctactttacatttgaatgaccaatggcaacatcttcaaacaaacatagctaacttagaggaaagaaaacataatctttaaattgctcataagagagaatgtcatttttcagaaaaaaagaaaaacagtattgatgctttagaaaatcttaaactgatgcatgttaatattatcatatcaatgccaacaacatatgtttaagctggtttcatccttcctagcagctctacttgcttcatctcgctcttcactgctattttttaaattggaaggaaaataagagtacgatagaagaacttgaagcgcattcactggtctcttatttaaagtccataaagcaaagttccaaaaaaacaaaaagaaacattgagttgccttcacccggcttctcttgagaaaatacaaggcgttaagaaattctttagaaaggcatattattactacatatagagctaggagtagatcttcatccgaacccctccaacgacgactaggtcggcgttttctctccctgctgtttcaggtttgttacatttcaacctgtgggctttctttcagacaattgcatttcatctagcattcacatgggaagctctgaaatctgccagcttaaaaactagatgtaccaaacatgctatctgagcaccgcactgatacaacctttgatagtctgcgttttctctccctgctgtttcaggtttgttacatttcaacctgtggggtttctttcagacaattgcatttcatctagcattcacatgggaagctctcaaatctgccagcttaaaaactagatgtaccaaacatgctatctgagcaccgcactgatacaacctttgatcagtatttagtactacttgctcttccatattaatactactggtactactatttcattgcacgtttacatgacatggaacagagactgaatttagtcgagtgggttcacctgcagttccggtatgcaaactacacgaatgatgcctacaacaagagtgggaacgaatccttgtggctgcagctgataaaccagagagcatagacttaacctttgtgctcttctcgacaggcttctttgctgttagactttaaccaattcatctcatgtcccaagttcaattttatgtaatgaggattgcatggtattttttggcaatttatctttaatgaactataatgtatagctgaagttggttgcagtttgaaacaatgcgacatttaaaaacccatagac

SEQ ID NO: 221164 - DNA, 2754 bp, Zea Mays
cctgcatccgccactctccgcgctcgcacacgccgcctcctcctccccgtcaccccttcgccgtggtggctcccgtcgtcccacgcctccctcgtctgcaagcgctgacgcctcctcctctccaaccctaccttcgtccgccgcttccatgtcctccacagggcgcctcacctcctcagcttcttcgccgaccacaacaccggcgctccccctccctccctccggtcgtcgtcacgctgcgtcttggcccaaccgttcagctgattgatattgtgatcagttcacgttgcaagagtttctataaggtggtctgttatccacactacaatctacaaacttcatcagtacatcctcatacaagtgcagatcaaattgcatggtgaaatgtgtacttacaaattcgtttgtaagtgaacttagctaattatatggatactcacatagttttttggataccgatcataccaataatttacgaggaggtgcacccattcagcttcccagtatctaattgtactatacactccttccataggaatttctgtaaggtggactgttatccagagcacgtacttcatttgtacagccttatacaagtacagattcgaattgcatgatgaaatgtgtattttcaaattcatctttaagtgaactcagctaattatatgtgcactcatatacttatttgttttggattataccaataatttatgaggagttgcacccatttatttcctagtttttaatagtgctgcacacttcttctttaggtaagtttataaataaagcttcattttcatgcaatttatgattttatgagattttcccatacacttgcacgttcccatgaaagattcctctcacaaaaaaaacttaaatttcatttaatgtgtaactctctaactcctttcttacatccattgagttatattgcaggttgctagatctattacattttcagacgacgacgacactaggtaagtatatttccattaacattctattcaactcactattatatgcttctattatatactcctatttaataacatttattttttgttaataaaccagtagaaaaaacaattcaaagacgaatgttgaagcgtcacatgaggtataatttataaccttaacagaacaagcttatattcagttatacttaactgttaaaataaacctcatcgtatggtacaaatgttttaccacccaacactcccgaaagttcaagaacattagaatcactagcgaaaaggttcttcaaacttttcttttttcttttaactttgaacatctgttttatcatgacaaatattgtgtgtttaatacattcctcatcaaacaaatttggtgtcatatgctcaaaccaaacccttcagcagtccacaaccctagttctgcaaatccacctacaagacacgaataaggtatttcctttagcactttctacaatttatcaatacgaaattgacatacaaaatataatttagcatgcctgctccattttctttcttggtatctaaaatagaaattttatgaacaatttgacctttatgagttctactaaaacttgaaatttatataaactaattgtactccagttatctcgttgccgtcttttcgtaataggtttcttaaacgtatatgttcacctatttcaagagtaatttttttaccaaacatgtatacatacataggagtatatgtgaatagtgtggtatacaatacatcgacactcccactattttaattatggcccattaattcatgcatgcattcatttattcccttgctgcattttttctatatatttgccttcatctaattttgactgttcatttgatcaaacaacaatgtgtgttgaactaaaatagaggcattagtagaccaggatgaaaaaatagcgttaatacatgttaactaaaagtttaagactccatcctggtccgattctatagtggtacacttttttcttgactaattgcttcgtgctttcagtctttttagtttaaactttcagggatgtgtccactgagattgttgctgctcaagtccagcagactctgcgactattatagcttgccgatatccgaagggatcagaccggacagcaaaaaaaaatcaaaagcattgcacttcttactactgatacccctatgtcactactaccatacagctctacttgcttcatctcgctcttcactgctattttttaaattggaaggaaaataagagtacgatagaagaacttgaagcgcattcactggtctcttatttaaagtccataaagcaaagttccaaaaaaacaaaaagaaacattgagttgccttcacccggcttctcttgagaaaatacaaggcgttaagaaattctttagaaaggcatattattactacatatagagctaggagtagatcttcatccgaacccctccaacgacgactaggtcggcgttttctctccctgctgtttcagttccggtatgcaaactacacgaatgatgcctacaacaagagtgggaacgaatccttgtggctgcagctgataaaccagagagcatagacttaacctttgtgctcttctcgacaggcttctttgctgttagactttaaccaattcatctcatgtcccaagttcaattttatgtaatgaggattgcatggtattttttggcaatttatctttaatgaactataatgtatagctgaagttggttgcagtttgaaacaatgcgacatttaaaaacccatagac

SEQ ID NO: 221165 - DNA, 922 bp, Zea Mays
tcatgaatagccctttattattggtgcaactaatattcagtcgctaaaatatcaatggcctaccaaatttcgcaaaaaaggatgagcactacacgaaccattcctgtactttgtaagccttccctcctaaaagcttcagaatcttaacatgttacagttagttcttagaagattttatgtgcatcataattctaaaactttagccagtttacacctgttatttagtctactccttgaaaaaagtttttccctttgatctaaacatgaatgcttccttttactccaacatcacagcaaaaaaaaatcaaaagcattgcacttcttactactgatacccctatgtcactactaccatacaggaaaataagagtacgatagaagaacttgaagcgcattcactggtctcttatttaaagtccataaagcaaagttccaaaaaaacaaaaagaaacattgagttgccttcacccggcttctcttgagaaaatacaaggcgttaagaaattctttagaaaggcatattattactacatatagagctaggagtagatcttcatccgaacccctccaacgacgactaggtcggcgttttctctccctgctgtttcagagactgaatttagtcgagtgggttcacctgcagttccggtatgcaaactacacgaatgatgcctacaacaagagtgggaacgaatccttgtggctgcagctgataaaccagagagcatagacttaacctttgtgctcttctcgacaggcttctttgctgttagactttaaccaattcatctcatgtcccaagttcaattttatgtaatgaggattgcatggtattttttggcaatttatctttaatgaactataatgtatagctgaagttggttgcagtttgaaacaatgcgacatttaaaaacccatagac

SEQ ID NO: 221166 - DNA, 3747 bp, Zea Mays
ctccacctctccctctcggcctcgccgacgccgaccccgaactctgctgccctcgtctcccggctagcggatgaggaagacgcccccgatgggggaggaggcggagggaagcccgcggaaaaaagctccccgcctggacgacgctgctcggactacggctcctgtggcgtcggcaccgagtccgacgcggaagacgccgccggagggggaggagacggagggaaacccgcggaacaaatctccccgcccggacgacgctgctcggactacggttcctgtggcgtcggcaccgagtccgacgcggaagacgccgccgaatggggaggaagcggagggaagcccgcggaagaaatctccccgcctggacgacgctgctcggactacggttcctgtggcgtcggcaccgagtccgacgcggaagacgccgccgaatggggaggagacggggggaagcccgcggaagaaatctccgcggcccgcggaggctctgcctgtggctatggttcctgtggaagcggcagtgggggccagcgatgagaagctgtgcaagtgcaaccacgccatcactgacagtgatatctgggaactggttcattcgctaacgaccaaggatgcgtggatttgctgtgcttgtcggcgcaaagacgagaagagggacctcttgatctgcgtgggatgctacagccatctctgctgtggggttgggtcaattgcttacccgtttgggcactctcgatcacacgccctgaagaagaagcactggtttgctgttctgtacagtgatccagaaagaggatactgcttcaagtgtaacgctgaggtgccaatgctgcgcaaatgtggagaagacggcaacgagggtggtcttgaactgatccgcgatattgtcagtcagttgccggatcaaccatctgttgattttccttcgcccgggaacacgccaccgaaggggaaggagacggagcggctggacgacgcggctcggactacggttcctgtggcgtcggcaccgagaccaacggtgcagacgccgccgaagggggaggaggcgggcttccggaacaaagctccgcggctggacgacgcggctctgattaccgttcctgtggcgtcggcaccgacactgacggggaagacgccgccgaagggggaggaggcacagggaagcccgcggaacaaagcttcgcggctggacgacgcggctctggctacaccgagaccgacggggacggcgccgccgaagggggaggaggcggagggaagcccgcggaacaaatctccgctgctgcaggacaaacggccctcggaggctctgcctgtggctaaggttgagtccaccgatgagaagcggtgcaagtgcaatcacgtcatcgatgttcttgatatccatggattggttggatcgctaacgaccaaggacgcatggatttgctgtgattgtcggagcgaagacgagaagttgatcttcaaagccaggcccgagaagagcgacctcttgatctgcgtgagatgctaccgccatctctgctgcggggttgggtcaattgcttacccatttgggcactctcgagcacacgccctgaagaaggagcactggtttgctgttctgtacagtgatccagaaagacgatactgcttcaagtgtaacgctgaggtgccaatgccggtcaaatctggagaagacggcaacgaggttgatattgaagtgatccgcgatattgtccgtcagttgccgtctcacccgtcatctgttgtcataagtccagtcataagtcaaaccgagccggaggtcatcaatccaggagaggaggaagtagcagaaagcgccccatctgggtttgttgtggctgtggatcctgcagatagatggccttgctatgagtccaaatcatctgatgcgcaaggctatgctatcaaagggataccaaatctcggaaacacatgctacctgagtgcagtattgcagtgcctgtttgtgcttggtaagctgcgagaaaggatgttaacactggatggtccaaaaagtctcattaccgaggtactcgaggagctttttttggaggcaagtgctgcaggaggcgtccttaatccgattaaacttttgaattgtttaaatctgcgtgatccttcgggatttcaaattggaactatggaagacagccacgacttgcttacggccttgcgcgctatttggaatgaaagcgacaagaataataacaagcaaagtgatgcacctacaatgatggattcgatttttaggtttgagatggctcggacactgtcctgcaaaaaatgtggtcattcgtctgctgctgttcgctatcctttcgaggacctgttattgggtttcccatcaaaggggcatccaaccaaaagtgctgcattaccacaaacaagtgagagtcccggatgggccggatctcgaaagagagtgattgctcgtcaattatttccagaagacgtgcagggaagcgtggattcagaggtgtttgatgtggaaaccttggaagttgattttactgaagtgcagcgtatcagtcaaagcaaggatgctgtacagagtcctttgcagattcaggatgggaagcctgttgattcagagacagcagattcaatatttattgaagacttgatattgcagttttgtgatgatcatcagatgcaatggcgctgtccaaattgtgccaaggatcatgaggagccaagtgccagtgaaagtaaaaatggtgagcagatggtgggaagcggcaaagaagacacaacagttgttggggaccagattgaacaatcagacaggaaagcaaggcacagtaaagaatctgaatgtcacggaggtaatctttcagctgcaaaacagactgagctgttgggaaccaaccaaactgcagatgacagcaaacaacttatgatgcatccggagaacgtgaaggaatcagagcagaaagatgatggtggagataatattatgattcatcgttttgccacgcttccacctgtattaactcttcagcttaagagaaccagccaccacatagttgggagcaaaataagtgaccatgtgagatttatggagtaccttgatgtagagcgattcatggaccccagctgtgccgacaaaggtagcaccctctttcgtctagctgctgttgtagtgcacattggcatgggatccttgaagtccggacactacattgcgtacgttagagcaagaaagcttggatgtcagcaagaggaggcctcatggttttgtgcagacgacagtcagatcagacgagtcactattgaacaagttctcaacagtcaggcctatattcttttctatgagaggatggaagaccaggacgtttctggcatgacacgtcagaactgaagaatgcagtgatagaacaagcagatgagtgagataagcagaccttctctctcgaccgcaaggatctagtctagtcagtgttcatagtaagacaggctcttgaccaagctcatttttgtcgctgggcttgaaacttactctgtaactttgtaccaaatcggaggttctttctgatcttgtcaactcagctgatctggtctttccgttgcttcgcatttgaggatgaaactgtgaatagaatagtggtgagatcggtgatacgggctttgtaaagtttctgtcggatgatattgttacatgataatggtttacactgcctcttcatgttttgaggtttccctgaaatcgaaaagagcaggtacgagagaatgttacat

SEQ ID NO: 221167 - DNA, 6102 bp, Zea Mays
agaagggtagttcaattcgggtatgggctttactctggcttttgatggtgctgtcgcgcaggttacaacgagagcaaggccatccctgattccctgatgccttcttccttgagaaggcctccgcggaggcgttcatggagcgagtcgagtcggtagtgggcgaggtattcaacatcgtcaggcagtggcaaactcagcagcagaagcaggtccaggagttccaggcactacacgacacacacttggctccagatgagcattcatagtatttcgtcttccatgtcaattaacctataaactctttaataattgacgtctcgatgatgtgttatcatccatgtttaacttaaatgtgttctagttctgaaataccaaagtttataaaacaaaagatatgcaacaaggaatcaacattgaactgtaggtgtatgtgtgatagcctaccaagtgtaaaagtagatatgttcccttggttaggtgtagctaaacatatggtgaaaattggcagaagggaaatggtcctaacattcattttttggaagaactatatggtatagactacagagttcagatgctcaaggtagacagtggctgtttggtttggaggtataacataaataaaatgttccatgttattattgataaatgcattacatacaataaagaataccattgcatactttttttttatttcattctttattttctataaccctggttgtacctcacatgctactgaattctcttatatatatgatacatataagaggaagtatttcaatgagcccaaaaggctaaggagagagctgcaactgaagctagtgaagataaggggacaaggtctctaagggaatcttcagcaactactctaatgactacaccaatgtcatctccccctactattcccacacagacagaatagttctagaattcttggtggtaataaagagttgttgctgaagtaaatgcagttctttctgcagccaaaaaaactttagttggctttcacatgatatgtggcgatgaaaatatgttttcgtatgaatggcatcgtgaggaagaacttttgcatctagagtgtttgggtatatgtaatatgttgtatgccaaatgcaacttcaaaaaccttggtaacaatatagaattagtgtcttgatttatgctatttactaatatttttaacttagaatggggaattaattgcagaagcttcagaggagatttctgaaagaatggtttaatctagaaaataatgaattaatgttctttttgtatcaaatgccatatgcagaggtattgtttcattgaggacttccattcttctagtgacaatatgtatgtgtactggattgtgcaagcaattgctgattactttgatgtgtggattcatgcttacactttgcatcattcatggttctgtcatattgtctcccaagttgattcctatatgtcactatgtaatgcatgatttaatgtagatggccactagttatgtgtgcaaattctagttgatgaagtggcaatgtgttctcacttatcagtccctgataagctaaaatttcaccaaaacctggtcatatagaccaagtgcaggtaaccatatcataaaaaatgcaattatattatttttgttgtcgtgttattgaaatgttggaaatatattttgggctagaaggaggatggccagactatgtactctactactctgcttcttccttttcagtaaactccctttagatacatatttgaaaaaaataagcttagattttattatggcactggcatacatgggcatgagaaaaattacggtgtaaacatttttaacaaatcattgagtaatgtagaaacaaggactttgagaattctgtatttctgtactaggaaaccatatgcttaggcaattcttcagaggccatctctatctgttcatagcccttgataaacttgctataccatttagcagacaattttggtgttcgctttagtgacttgaaattcacatgacaaagaccatactttacggtgtaaccagagatccattcgaagttatccatcaaagaccacacaaaataacctctcacatctgctcctttcctgcacaaaagtagcaaagttttattattacctggctggagagcagtttacatgaaaagataattgaggcatgcaacaaccttattgcaaagctcaagtaagtgaggtagtcacgaatgtaagttgatctttcaatatcattaattatttcttctgctgtagtgctaatattggctatttgggcataacctgaaagataaaaaaagggtgatcaagagatccatacagatattttttatggtaccagtgtactacaagtgtaatatatgtaaataagcatggaagtgaatcattgttatgcacaaaggcatatattttgtatctaatttgtagattttagggaacctagtaacccaccgttctctgtgatgtacaaaggtatgcttttatatctctgctttaaatacatgaccaacttctccatggagcttggaacgacataggtgtttgcaacaggtgtctgcaatattagtttagttgtgttagcttgtgcataattaatttgtaactaggattcttgttgaatagaataatgcaatatacaatgccgatttttaccggttttccaatgggtatcccatttcgttctgttgatatagaaactaaagcttcagaagggtaggcgtccatatcacatagagaatatatgcaatccttgacatagaatgtttggtagtgatttaccccgatgaagtcaatttggttcttcagtagtttcttctctccttctgtaaattttggcaagtttggacctaagatttggcgcatctggtgaggatagtcaccaaagaacaagggatccaagatcctgttttagcatatatcatcaagtgagcattcaatcgtgaagatcaaaagttagttccaatcgtaaaatgctagtatgatggaaggttactgaatcaattgataccatggagcatcgaaagacagagctcggcttactgccaagtggtcctctgtgatattccttagtggttcataccatcttagatgtaatgaaattcctacaaagccaccttgcttggactgagaaggatggggaacaaggaaaacaaattatacaactttcatgagtatttaagagcaagcacacgggctcagttgatgaattccctgaatcacatttcccatatggctcggaacaacggttgggtggaaatgccccaatggagtatgcaagctttacaataagatttggctcattgaatgtgacccagtgctttactcggtcaccaaacatcttgaagcaaagctcaacgaagatggcatttgtggagggaggtagctgcccgcataatagcagaacagaaggcgtacctttttctagcagtccgttgatgaggctattgtagaatttaacgcctgcctgattaacacctccgaagcgaccctctggccatggatatttgaaaggtacaagcatataatttaagttaaacaccggcactaaggaaggatcacgtgcgtgttgtcgagctggtagctgtgtcagaagtcattgacagttggtgtaattctgagaatgagctcacttggaagaattctcgaccacgacaatgagaatctgtaggagctgagaccaatcgaatgcatcatttctatgtcgtcctgccggtgctgactttgtgtgagattgttgaccccctcatctttcttgataaagtatctttttgtttctaatgatgcttaccttgtatcgatgataatggtcagcagctacgtcgccattgcttccatcgtcaatatttcctgatttatggttaatagccaagactaagacagcaacaaaatcaagcacgtctgtgattttcacgatttcagcactccacaggggcaaccggcccttcgtgacctcgtcgtgcagtcctcgctccggtagctcgaaggaacgtcgcgatccaacgcgcggtgtcctggcgtcgtgagcttagacgggcctagtgcaagctgagcggctggatgtgctggacagcgctgtcgagcggcgagagccgtcgagtaggccgacttcagacgatctgacgaatccgagccgaagagtcatcctaatcgggccctctatttcctaagcccggccctcccagttctagctagctaaacagaagatgcatcatgcattcactagccaaaaaaaaaaatgttcacttcctcccctgattcaagagcgtgaaatgattttctaactgagacaaaaagagaaagaggaaagcgcagtgcgcaatgaccttctaaatagatacgtctaattaacatgcaaaatgtatgagcgtcgaaattaggttaaaccatttaatttatgacatcaagaagagtgttgaaaaatatttagtacaacataattgaaagtaccaagcaaaaagagaaggagatggtattgccacctgctgatccggtctggctaattccatatatattgtctagaactggttaggatggttcattaaccggccgagccggtttgcttgctgtgtccgaaacttatcgtgcttaaatacgttaagcgacaaacaaacaacacaaattattagttggatatgtaatcatgtctagattataataatatataaacagatcattaagtggttatataatttataagttggattatataatcctgagaggaaacaaacatagcctaagttgatttataaattagtattggatctattttagcgtgtaggtcatattttggacttggtttttactatgatgataccaactctttctatatgtgagagcattatggctgattaaggataccaagctttcaatcgtcagaaaatacatcatctaatttatttaccatactttctctctatcttattgttcatcaggagattttataggtgaccttaacaaccctagagaaatcttcgcgtactattctctgatagatcttttcgagaggtgactaagagtaggggggcctgggtcgggcgcgtatcctctaacatcgactgcactgacgttgggtcactgcacgtggccctaggcccacgcgtcagtgacccaccttgacgtcagaggatctcgacccgtctggaccacccgggccatggcattgggacgtgaccccaaatttgttaactcccacgaaaatattaaaatattatatgattaatatttgttaaatggtttaagtgtttaatatatatatttcattcttgtactagattgtatctctagacttgaaataattgatgaaaaagaacaaaggtattactttacaatgatgttttttgtcatgtaacttttaaactacttgtttttgccatgctttcatcaaaaattggtccatatggctttagtcaatcttggttctgccattgccgagagtttaccgataaacgaaaaacggactcaatatcagcctaaccaagacctcaatctgtttagttgatccattgcatttttgttgcaatcaagattatttacaaccacaggcatactaattttaacaaaagctacgaaaatatcccaagaatccccttaactataagggctagttggagagccataaaaccggagtagattagaggggctaaaattcccttcttagggttgatttggtgacaaggagatcacgaggggattaaggaggaaattagatggactaatttccccctcaataccctccaatccccccgtgattcctggtcaccaatagggctagttggcacctccattttcctatgagatttccaatttttcaagggaaaatgaactaatttccctgaaaaaaaataaaaaactcttgggaaaataaggttcccaaactagcccttatttaaaattgaataaggacgagattttagtttttctaaccctcttcggtttttggactctcaaactagccataatagtagctacttccactaaggtggccaaagtttgcttgtactcattattgagtcgcttagatggattagatcatcgtatgcataactgacacatttggaagcacctggaacatgggagaagacatcccaattgcttaggcccttg

SEQ ID NO: 221168 - DNA, 1740 bp, Zea Mays
agatcttgtcaagactgtggacaatgatcttgcactgaaaatttacataaaggctagggcaacccctaaagttgttgctgcttttgctgaaaggagggagtttgacaagatactgatatactcaaagcaggttgggtacactccagattatctcttcctcctccagaccatcttgcgtacagatccacagggagctgtgaactttgctcttatgatgtcacaaatggagggaggctgcccagtagattataatacaataactgatcttttccttcagagaaatatgataagggaggcaacagcttttctgttggatgttctgaaaccaaacttgccagagcatgcttttcttcaaaccaagtcattacgatcgccctcgtattgctcagctgtgtgaaaaggctggtttgtacttgcgagccctccagcattacgcagagttgcctgatatcaagcgtgccattgtaaatacccatgccattgaaccacaggcacttgttgagttttttggcaccttgtcaagagagtgggctttggaatgcatgaaagaccttctacttgttaatctgaggggaaatcttcagattgttgtgcaggctgcgaaagagtactctgaacagctaggggttgatgcttgtatcaaattatttgagcaattcaaatcttatgagggcctttactttttcttggggtcttatctgagctccagtgaggacccagagatccatttcaagtacatagaagcagcagcaaggactggacaaatcaaagaagttgaacgtgtaaccagggagtcaaacttctatgatgctgagaagacaaagaactttttgatggaagcaaaactacctgatgcccgtccactgattaatgtttgtgaccgctttggttttgtgccagatctcactcactatctgtacacaaacaacatgcttcgatatatcgaaggctatgttcaaaaggtgaatcccgggaacgctcctttggtagtgggccagttacttgatgatgaatgccctgaagattttatcaagggcttgatcctctctgttcgttctctccttcctgttgaaccactggttgatgaatgtgagaagaggaatcgcctacgtttgctcactcaattcctggagcacttagtgagtgaaggtagccaagatgtgcatgtccataatgctcttggtaaaatcatcattgacagcaacaacaatcctgagcatttccttactaccaacccattttacgactctcgtgttgtgggtaaatattgtgaaaagcgggatcctacacttgctgttgttgcttacagacgtggacagtgtgatgatgaacttattattgtcaccaacaaaaactcattattcaagctgcaagctaggtatgtggttgagagaatggatggtgatctgtgggataaagttcttcagcctgagaatgaatatagaaggcaactcattgaccaagtggtttccactgcattacctgagagcaagagccctgagcaagtgtctgctgctgttaaggctttcatgactgctgacctgccacatgaactgattgagcttcttgaaaaaattgttcttcaaaattctgctttcagtggaaatttcaatctgcaaaacctgctcatcttgactgctatcaaggcagatccatccagagtcatggattatgtcaacagacttgataactttgatgggcctgctgttggagaagttgctgttgaagcacaactgtatg

SEQ ID NO: 221169 - DNA, 5014 bp, Zea Mays
ctatactcgatgggccgggcgcccgggcctcgttgcatctcctaaagctcaccggatacgtattcctcagttacgccttcgtcgcacgttcacgcctccaccgattcaaacgccggaacacccacgcggtcggcggaggcctccccgtcgtttgcccatgcccttgcgccgccatgccggccgcgccatcgccgccgcgcccggcggtttcctccacctctccctgctcgcctccctccgccaccgcccctcgcttcaggcgcacgcgcagctcctgctcttgggcctcccgctgccccccgccgcggcctcacacctcctccgcccgcacctccgcgccggccatccgcttgcctcgctccgcctcttcctccgcgtgctccgcgaccaccaccccgccacaaccggcgccaccgcttcccaggaggagggggctgttcccgactcccgctccctctccgcggttctcgcagcctgctcccgcctcgagtccccttcccccggactctgcatccacgccttcctcctaaagtcgggattcgcctccgacgtcttcgccgccaattcgctcctccatttctatgccgcgttcggtctccacgccctcgcgtgcaagctgttcgacgaaatgccgaccagggacaccgtgtcgttcaacaccctgatcggttcgtacgtgcagtcgggacgcgttgaacgcgcgttggtggtgttcaggaacatggtggagggagggttccggctggacgagtggaccatcagagcgttgctgggtgcctgtgctgggctaggcgatttcatggtggccaaagctgcgcatgggtttgccagcaggacattgaggcatagattgctcgactctggagaggtggtgattgggttagtggacatgtatgtcaagtgtggtgcagtgcacctcgccaggaaaacatttgatttgtttggggagaaggtgaaggacgtgagagtttggagtgtgatggtatcagggtatgctagggttggggagatcggcatggctcggaagttgtttgatgagatgcccaataaggacttggttgcgtggacagttttggtcggtggatatgtgcaggcaggtagatacaaggaggcacttgggttgttcgaggagatggaagcggcaggacttgaggctgatgagatgacggtcgtcaccgtgctttcagcttgtgcccagaatgatgctattagccttgtaaagaggctccattatcgtatgaaccagaatggattggttagcagaaatgcaagagttgccaccagcttcgtgcacatatatgcaaaacatgggtgcatacagacagctatggatgtgtttcgtggaatcactgatgaattcaagactgtggagttgttcaatgctatgatacatggactcgctcaccatggttatggtgagaaagctatctcactttttgataaaatggaaagcctggggctccaacctgatgacatcacatttgtgggaatcctgtgcgcatgcagtcgcagtaacttggtcgaacaagggtgtaagatgttctcatcaatgctggacaagtacggtgtcaaaccagatgtcaagcatcacgcttgcatggctgatcttcttggaagagctggacgtcttgatgatgcttacaactttatccagaatatgcctttcaaagcaaatcttgtgatatggtcatctcttctgacagcttgcaagatccatggaaataacaagattaggaagcttgtagagaggcaaattctcggattagatgctacctacaagcctgaaaagctgaccttatctggcttattttctgatgagaagaggaaagagctatctgcaagggcgagaaaagctataaagcacaaatctgagcacagatgtacctagtagaactcacatcgaatgatactgtttatcagattgtaattactgatacttccgagctccaccctcagggaaaggtgattgattggatgcctgaagatgtccaaggcattggatttttttcaggatgcattgggagaaggctgcttggaatatcgagagacagctgctctagcattttccttgataaactcacttcctgaaaccccaacagaaggtgtcaccaaccattgtacatatggtacttgccattcatcactctgagtattcgctgaaaatataaagtaggggtgttagttccaatgttaggctaagttttgaaaggaaacatataggtcaatggtgatgcattttcaaatcttgtgtacaagctctggtagtcagcttctgatatggtaggttaatctctgttttcctggcgcagctgctaacctagatttgtcttgaattcactgcaaggattacaattaatcaggcacttgtgcaactgatcttatgacttctgggaatgagatggcagaatagagaaagactggtgaaagagctgtaagctctgagatgctcttttagggcccgtttggttggagagccaggggagtggagcggttccattccagatttagagggtggagcagctgcattccagattctgagagcggagtagaatcgttccattttctgtttggacccaccgcaaagagatagggagaagttgaacggtaggattccaccgttttttggagcgagcttgttccaaatccggtgggaatattcctgatttagagccgttccaccctgaccgctccgtttgctctccaaccaaaagcagaatggatcggctccatcccatctcactcaaccaaatggaccttagaagagcagtagatgaatctaagcggcaaatgtggatggaaatagttcagctagcttcaaccattattttttcagttgaagaggatactatgaatctatgatttggcaattcacttctaatggaatgtacttgtcattctttatataggattattaacttcaactttcagcggtatatataattccagtttacagaatgtagcttgtaagggtatggcgattttgctacagaagataacagggctagcgcaaaaatttggggggaaatcatctattgaatggagagtagacttttgttggaagttggaacaaaagttgctagatttgaggcaggtggccagcataccggaaagaatcagccggtgagctgtggtgtgtgggttatagttactggttgcaaggggtggtgactcgatactagcttccgtccctcccttggctacttgtgtcaggtggttctctcttggagtttgtgggtggactgctctactctgtagaagaagcgtctgggcatggaagcaatcttttctttggaacggaacctcttggagtggagttatgtggtgaaaagccatggatcagtgaagaagaggacctggagaaggcaatgtcgtcgggcctttggatctagccccgaggatgatggcttggttggtcaggttcaggtgtttatttcgtgcgtggagctgtgcggttacgtacaggatgtcagttgtcaggggaggtggtgtggtggccaaccactggaaagctaacttttgctctgagtataaaatatggtggcatccttcctggctatatactgtcttgaatgaagtaccaaactagagttggagagcaacctcaaaggcaggggcataagtgatcatgggaaagggacaatgcaaggctgctggtggctcaaagacgtacgttctgaagctggacatgcactgccaatgcaatggctgtgtcaagaagatgaaggacgcggtgaaggagatgatgagcctctcgcaaggggtggagagagctgatgtttcagcagaggcagaggcgggagaggtgagggtggaagtgacgggcggaattgacatggacccagcgaagctctgctgcctgctgcaagaggcgacgaagaagaagcgtgtgaggatagccgaagaagcgagcgtcccatcgcctgggcggcaaaccactctgtctggtcagggtcaggcagaggctgctggtggctggcggcgagatggcgcgggcaccttccctacaaccgtcccgatcccgagcgccccgccggcgccggcgccagaggaggaggcggaggcatggagcgagacgacggcgccttcggagcgttgccggtaccgctgggcggcgcctgtcagcacgttcggtgtgtgggctgcatcggacatcaccgggacgttggccatgttgtaccaccaccacctatgaaccccgcctcatgctgtgtataaaacgaagcagtccgcgccctctctctctccctctctctctctccctccctctctccctctctctctctctgtcgagttagatgggtgtttgatattttggacgcgtttgggcccggggttaaatttagtcctaggttttatatgccaaatatgagggttttaacatttactaatcataaattgataaggcttacttacgggtacctaaaagcttagggtgtgtttggatggagggacgaggaaggatgaagagagataggatgggatcattttaatttgacccgcgtttggtttggaggtccacagtcagggtcaaaaaatattgttcaaaaatggtggatgggactatccctcaaaaaataagggacggggtcaacccagggttgatcccgtctcatccctcgttgacaccgaaccaaacactaccttaaattatcatcacgcaatgcagtcctgagatcccaaacgcgtcgtctataggttgggacaacagcaacgcggcaccgtactagtgcaaagtggggcgaagccgtgaagtgacgcggaagtcgggtgtgtagcagcgcgtcaaccacgcaagtcaaggagggaatcaccacaaaaaaatatagaatagtttcagtttgtatccaccttgattggttatccgcacccttttatcttagatcatcgtatgtattgactttatttgagattatgtttggttgattgtatgtgtgagtcatagtctacatggtgcatacaaaataagtcattttgatattattaacatgcatccatctatatgatgcttaaaatt

SEQ ID NO: 221170 - DNA, 4159 bp, Zea Mays
gcacgttcccattgcgctttccctcgccatttcgcccccgccccccaatctctgcgtctctagctctcgggagaggcggctcgccgcgacatcgatcccgaccgggcaccggctcaccccggcccccagcgtagcagctcgccactagggctagcgctctgtccatggaggatgacgagtacgaggatgggatggacatgggctacggcgggcatcaccagcgcggcggcggccacgcggggtacggcgcggaggaggacgacgagatggggtatggcgaggggggtggggacggggacgagatggaggaggaggcggatggggacgccgagcagcaggaagatatcacgcaggacgacgcctgggccgtcatctccgcctacttcgaggagaagggcctcgtgcgccagcagctcgactccttcgatgagttcatccagaacaccatgcaagagattgtcgatgagtccgccgacatcgagatccggcccgagtcgcagcacaaccccggccgtcaggccgagtttgccgagagtaatgaagaaaggacatgactgtgaggaagttacagagactgctgagtatccaaaagtgtttattgggaaggttccaatcatgttgcgttctagttactgcacactgtatcaacagtctgagaaggatctcactgaacttggggagtgtccttatgatcaaggtggttatttcattatcaatggaagcgaaaaggtccttattgcccaggagaagatgagcaccaaccatgtctatgtttttaagaagaggcagcctaacaaattcgcatatgtggctgaagtccgctccatggctgagaaccagaacagaccagccagcagcatgtttgtacggatgctttcacgagcaggagcaaaagggggatcatctggtcaatatatccgtgctactctgccttatattcgagcggacattcccattattattgtatttcgagcattaggatttgttgccgacaaggatatactggagcatatatgttatgacttttctgatacacaaatgatggaattgctacgtccatccctggaggaagcttttgtcattcaaaatcaacaggttgctctggactacattggaaagcgtggcgcaacagttggtgtcactcgagaaaagagaattaaatacgcaaaggaaatacttcagaaggaaatgttgcctcatgttggtgttggggaattctgtgaaactaagaaggcatactattttgggtatattattcaccgcctactgatgtgcgctcttagtcgaagagctgaggatgaccgagatcattatggaaacaaacgactagatcttgctggtccactgcttggagggctgtttagaatgcttttcaggaagttaacaagggacgtgagatcttatgtgcaaaagtgtgtagataatggaaaggaagttaatttgcaatttgctataaaagcaaaaactattaccagtggtttgaagtactcccttgctactggaaactggggacaggctaaccaagctggaaccagagcaggggtttctcaggtgctcaatcgcctgacctatgcttctacactttcacatctccggaggcttaactctcccattgggcgtgaaggaaaattggcaaaaccccgccagttgcataattcgcattggggaatgatgtgtcctgctgaaacaccagaaggacaagtaagcttgtggcttggtgaaaaatcttgccttgatggtatatatcactgttggttctgccgcaaatccaattttggaatttttggaggagtggggcacagaaaattttgaggagatatcaccagccgtcattccacaagctgctaaaatttttgtcaatggttgttgggttggaattcataggaaccctgacctgttggttaagactcttagacgtttaagaagacagattgatgtcaacactgaagttggtgtggtgcgtgatatccgtcttaaagaacttcgactctacacggattatggacgctgcagtcgtccattgtttattgttgagggccagaggctgctcatcaagaaggcgcatatccgagccttgcaacaaagggagactcctgatgaaggctggcatgaattggtctcaaaaggatatatagaatacatagacactgaagaagaggagactaccatgatctccatgaccataaatgaccttcaaaatgcaaggcacaacccagaggaggcttactctgaaacttacacgcattgtgagattcatccttcattgatacttggtgtttgtgcgtcgattataccttttcctgatcacaaccagtcacctcgtaatacatatcagtctgctatgggaaagcaagccatgggaatttatgtcaccaactaccaattaaggatggacacgttggcctacgttctatactacccacaaaagcctctagttactactcgtgctatggaacatttgcacttcagacagttaccagctggcattaatgcaattgttgctattgcttgttattctggatataatcaagaagattcagttattatgaatcaatcttccatagatcgtgggttctttcggtcactatttttccgctcttacagagacgaggaaaagaagatgggcacacttatcaaagaggaatttggtcgtccaaatagggaaaatactatgggaatgcgccatgggtcatatgataaactagatgatgatggccttgcaccacctggaacaagggtctcaggggaagatgtcattattgggaagacatctcctattccacaagatgacgctcaagggcaagcttctagatactcaaagcgtgaccatagtactgctctgcgtcacagtgaaagtggcatggtagatcaggttctgttaacaacaaatgcggatggtctaagatttgtcaaggttaggatgcgatctgttcgcataccacaaattggcgacaagtttagcagcaggcatggacaaaaaggaactgttgggatgacttacactcaagaggatatgccatggacaatcgaaggcattacacctgatattattgtgaatccacatgctattccatcccgtatgactattgggcagctgattgagtgtattatgggtaaagttgctgctcagatggggaaggaaggcgatgccactccattcacggatgtgactgtggataacatcagcaaagctcttcataaatgtaattatcaaatgcgtggatttgagacaatgtacaatggtcacactggaagaaaactgactgcgatgattttcctgggccccacatattaccaaagactcaagcacatggtggatgacaagatacattcgagaggacgtggtcctgtgcagatactcacccggcaaccagcagaggggcggtctcgtgatggaggtctccgctttggagaaatggaaagggattgtatgatcgcacatggagcagctttcttcctgaaggaaaggctgtttgaccagagtgacgcatacagagtccatgtatgcgagaaatgtggtctcatcgcaattgctaacctaaagaaaaactcgttcgaatgcaggggctgcaagaacaagactgacattgtccaagtacacataccctatgcttgtaagcttctgtttcaggagcttatggcaatggccattgctcccagaatgcttacccatgatatgaagacagggaaggatcagaagaagcgctgaacgtgtatcacgtgagatgtaaccagaactcatgccccgttgctatattcctggatcctggttcacacaatagtaccctgttgaggaactttgtggtcacttcttttctgatttggacttcggttcttcgcgatcgatggagggctgttactatctcttgatggattattatcctatctgtgctcgtgttgcctgaagatcagtgctagcagatcgtcgagttaattttgtacattaggaatgtgttgtaatgtattaatctgtgcgagtagaaagatttttgactaaaggtgtcaatttggaggtgtaactgtacgttaatactaaacgcgatgccattgcaatttcagttttattttgaaatacatggggttttagtggcatgtctctaaactatcacaatcttaatggcatggttctaattaatctttttcttcttatacaacaacc

SEQ ID NO: 221171 - DNA, 4337 bp, Zea Mays
caaaaataatgtgaaccatacatactccttcgagcacgttcccattgcgctttccctcgccatttcgcccccgccccccaatctctgcgtctctagctctcgggagaggcggctcgccgcgacatcgatcccgaccgggcaccggctcaccccggcccccagcgtagcagctcgccactagggctagcgctctgtccatggaggatgacgagtacgaggatgggatggacatgggctacggcgggcatcaccagcgcggcggcggccacgcggggtacggcgcggaggaggacgacgagatggggtatggcgaggggggtggggacggggacgagatggaggaggaggcggatggggacgccgagcagcaggaagatatcacgcaggacgacgcctgggccgtcatctccgcctacttcgaggagaagggcctcgtgcgccagcagctcgactccttcgatgagttcatccagaacaccatgcaagagattgtcgatgagtccgccgacatcgagatccggcccgagtcgcagcacaaccccggccgtcaggccgagtttgccgagactctgcacaagatcagctttggtcaaatctatctcagcaagccaatgatgactgaagccgatggagagacagctactttatttccaaaatcagcaaggctcaggaacctgacatactctgctccactgtatgttgatgtgtcatacagagtaatgaagaaaggacatgactgtgaggaagttacagagactgctgagtatccaaaagtgtttattgggaaggttccaatcatgttgcgttctagttactgcacactgtatcaacagtctgagaaggatctcactgaacttggggagtgtccttatgatcaaggtggttatttcattatcaatggaagcgaaaaggtccttattgcccaggagaagatgagcaccaaccatgtctatgtttttaagaagaggcagcctaacaaattcgcatatgtggctgaagtccgctccatggctgagaaccagaacagaccagccagcagcatgtttgtacggatgctttcacgagcaggagcaaaagggggatcatctggtcaatatatccgtgctactctgccttatattcgagcggacattcccattattattgtatttcgagcattaggatttgttgccgacaaggatatactggagcatatatgttatgacttttctgatacacaaatgatggaattgctacgtccatccctggaggaagcttttgtcattcaaaatcaacaggttgctctggactacattggaaagcgtggcgcaacagttggtgtcactcgagaaaagagaattaaatacgcaaaggaaatacttcagaaggaaatgttgcctcatgttggtgttggggaattctgtgaaactaagaaggcatactattttgggtatattattcaccgcctactgatgtgcgctcttagtcgaagagctgaggatgaccgagatcattatggaaacaaacgactagatcttgctggtccactgcttggagggctgtttagaatgcttttcaggaagttaacaagggacgtgagatcttatgtgcaaaagtgtgtagataatggaaaggaagttaatttgcaatttgctataaaagcaaaaactattaccagtggtttgaagtactcccttgctactggaaactggggacaggctaaccaagctggaaccagagcaggggtttctcaggtgctcaatcgcctgacctatgcttctacactttcacatctccggaggcttaactctcccattgggcgtgaaggaaaattggcaaaaccccgccagttgcataattcgcattggggaatgatgtgtcctgctgaaacaccagaaggacaagcttgtggcttggtgaaaaatcttgccttgatggtatatatcactgttggttctgccgcaaatccaattttggaatttttggaggagtggggcacagaaaattttgaggagatatcaccagccgtcattccacaagctgctaaaatttttgtcaatggttgttgggttggaattcataggaaccctgacctgttggttaagactcttagacgtttaagaagacagattgatgtcaacactgaagttggtgtggtgcgtgatatccgtcttaaagaacttcgactctacacggattatggacgctgcagtcgtccattgtttattgttgagggccagaggctgctcatcaagaaggcgcatatccgagccttgcaacaaagggagactcctgatgaaggctggcatgaattggtctcaaaaggatatatagaatacatagacactgaagaagaggagactaccatgatctccatgaccataaatgaccttcaaaatgcaaggcacaacccagaggaggcttactctgaaacttacacgcattgtgagattcatccttcattgatacttggtgtttgtgcgtcgattataccttttcctgatcacaaccagtcacctcgtaatacatatcagtctgctatgggaaagcaagccatgggaatttatgtcaccaactaccaattaaggatggacacgttggcctacgttctatactacccacaaaagcctctagttactactcgtgctatggaacatttgcacttcagacagttaccagctggcattaatgcaattgttgctattgcttgttattctggatataatcaagaagattcagttattatgaatcaatcttccatagatcgtgggttctttcggtcactatttttccgctcttacagagacgaggaaaagaagatgggcacacttatcaaagaggaatttggtcgtccaaatagggaaaatactatgggaatgcgccatgggtcatatgataaactagatgatgatggccttgcaccacctggaacaagggtctcaggggaagatgtcattattgggaagacatctcctattccacaagatgacgctcaagggcaagcttctagatactcaaagcgtgaccatagtactgctctgcgtcacagtgaaagtggcatggtagatcaggttctgttaacaacaaatgcggatggtctaagatttgtcaaggttaggatgcgatctgttcgcataccacaaattggcgacaagtttagcagcaggcatggacaaaaaggaactgttgggatgacttacactcaagaggatatgccatggacaatcgaaggcattacacctgatattattgtgaatccacatgctattccatcccgtatgactattgggcagctgattgagtgtattatgggtaaagttgctgctcagatggggaaggaaggcgatgccactccattcacggatgtgactgtggataacatcagcaaagctcttcataaatgtaattatcaaatgcgtggatttgagacaatgtacaatggtcacactggaagaaaactgactgcgatgattttcctgggccccacatattaccaaagactcaagcacatggtggatgacaagatacattcgagaggacgtggtcctgtgcagatactcacccggcaaccagcagaggggcggtctcgtgatggaggtctccgctttggagaaatggaaagggattgtatgatcgcacatggagcagctttcttcctgaaggaaaggctgtttgaccagagtgacgcatacagagtccatgtatgcgagaaatgtggtctcatcgcaattgctaacctaaagaaaaactcgttcgaatgcaggggctgcaagaacaagactgacattgtccaagtacacataccctatgcttgtaagcttctgtttcaggagcttatggcaatggccattgctcccagaatgcttacccatgatatgaagacagggaaggatcagaagaagcgctgaacgtgtatcacgtgagatgtaaccagaactcatgccccgttgctatattcctggatcctggttcacacaatagtaccctgttgaggaactttgtggtcacttcttttctgatttggacttcggttcttcgcgatcgatggagggctgttactatctcttgatggattattatcctatctgtgctcgtgttgcctgaagatcagtgctagcagatcgtcgagttaattttgtacattaggaatgtgttgtaatgtattaatctgtgcgagtagaaagatttttgactaaaggtgtcaatttggaggtgtaactgtacgttaatactaaacgcgatgccattgcaatttcagttttattttgaaatacatggggttttagtggcatgtctctaaactatcacaatcttaatggcatggttctaattaatctttttcttcttatacaacaacc

SEQ ID NO: 221172 - DNA, 4301 bp, Zea Mays
caaaaataatgtgaaccatacatactccttcgagcacgttcccattgcgctttccctcgccatttcgcccccgccccccaatctctgcgtctctagctctcgggagaggcggctcgccgcgacatcgatcccgaccgggcaccggctcaccccggcccccagcgtagcagctcgccactagggctagcgctctgtccatggaggatgacgagtacgaggatgggatggacatgggctacggcgggcatcaccagcgcggcggcggccacgcggggtacggcgcggaggaggacgacgagatggggtatggcgaggggggtggggacggggacgagatggaggaggaggcggatggggacgccgagcagcaggaagatatcacgcaggacgacgcctgggccgtcatctccgcctacttcgaggagaagggcctcgtgcgccagcagctcgactccttcgatgagttcatccagaacaccatgcaagagattgtcgatgagtccgccgacatcgagatccggcccgagtcgcagcacaaccccggccgtcaggccgagtttgccgagactctgcacaagatcagctttggtcaaatctatctcagcaagccaatgatgactgaagccgatggagagacagctactttatttccaaaatcagcaaggctcaggaacctgacatactctgctccactgtatgttgatgtgtcatacagagtaatgaagaaaggacatgactgtgaggaagttacagagactgctgagtatccaaaagtgtttattgggaaggttccaatcatgttgcgttctagttactgcacactgtatcaacagtctgagaaggatctcactgaacttggggagtgtccttatgatcaaggtggttatttcattatcaatggaagcgaaaaggtccttattgcccaggagaagatgagcaccaaccatgtctatgtttttaagaagaggcagcctaacaaattcgcatatgtggctgaagtccgctccatggctgagaaccagaacagaccagccagcagcatgtttgtacggatgctttcacgagcaggagcaaaagggggatcatctggtcaatatatccgtgctactctgccttatattcgagcggacattcccattattattgtatttcgagcattaggatttgttgccgacaaggatatactggagcatatatgttatgacttttctgatacacaaatgatggaattgctacgtccatccctggaggaagcttttgtcattcaaaatcaacaggttgctctggactacattggaaagcgtggcgcaacagttggtgtcactcgagaaaagagaattaaatacgcaaaggaaatacttcagaaggaaatgttgcctcatgttggtgttggggaattctgtgaaactaagaaggcatactattttggtcgaagagctgaggatgaccgagatcattatggaaacaaacgactagatcttgctggtccactgcttggagggctgtttagaatgcttttcaggaagttaacaagggacgtgagatcttatgtgcaaaagtgtgtagataatggaaaggaagttaatttgcaatttgctataaaagcaaaaactattaccagtggtttgaagtactcccttgctactggaaactggggacaggctaaccaagctggaaccagagcaggggtttctcaggtgctcaatcgcctgacctatgcttctacactttcacatctccggaggcttaactctcccattgggcgtgaaggaaaattggcaaaaccccgccagttgcataattcgcattggggaatgatgtgtcctgctgaaacaccagaaggacaagcttgtggcttggtgaaaaatcttgccttgatggtatatatcactgttggttctgccgcaaatccaattttggaatttttggaggagtggggcacagaaaattttgaggagatatcaccagccgtcattccacaagctgctaaaatttttgtcaatggttgttgggttggaattcataggaaccctgacctgttggttaagactcttagacgtttaagaagacagattgatgtcaacactgaagttggtgtggtgcgtgatatccgtcttaaagaacttcgactctacacggattatggacgctgcagtcgtccattgtttattgttgagggccagaggctgctcatcaagaaggcgcatatccgagccttgcaacaaagggagactcctgatgaaggctggcatgaattggtctcaaaaggatatatagaatacatagacactgaagaagaggagactaccatgatctccatgaccataaatgaccttcaaaatgcaaggcacaacccagaggaggcttactctgaaacttacacgcattgtgagattcatccttcattgatacttggtgtttgtgcgtcgattataccttttcctgatcacaaccagtcacctcgtaatacatatcagtctgctatgggaaagcaagccatgggaatttatgtcaccaactaccaattaaggatggacacgttggcctacgttctatactacccacaaaagcctctagttactactcgtgctatggaacatttgcacttcagacagttaccagctggcattaatgcaattgttgctattgcttgttattctggatataatcaagaagattcagttattatgaatcaatcttccatagatcgtgggttctttcggtcactatttttccgctcttacagagacgaggaaaagaagatgggcacacttatcaaagaggaatttggtcgtccaaatagggaaaatactatgggaatgcgccatgggtcatatgataaactagatgatgatggccttgcaccacctggaacaagggtctcaggggaagatgtcattattgggaagacatctcctattccacaagatgacgctcaagggcaagcttctagatactcaaagcgtgaccatagtactgctctgcgtcacagtgaaagtggcatggtagatcaggttctgttaacaacaaatgcggatggtctaagatttgtcaaggttaggatgcgatctgttcgcataccacaaattggcgacaagtttagcagcaggcatggacaaaaaggaactgttgggatgacttacactcaagaggatatgccatggacaatcgaaggcattacacctgatattattgtgaatccacatgctattccatcccgtatgactattgggcagctgattgagtgtattatgggtaaagttgctgctcagatggggaaggaaggcgatgccactccattcacggatgtgactgtggataacatcagcaaagctcttcataaatgtaattatcaaatgcgtggatttgagacaatgtacaatggtcacactggaagaaaactgactgcgatgattttcctgggccccacatattaccaaagactcaagcacatggtggatgacaagatacattcgagaggacgtggtcctgtgcagatactcacccggcaaccagcagaggggcggtctcgtgatggaggtctccgctttggagaaatggaaagggattgtatgatcgcacatggagcagctttcttcctgaaggaaaggctgtttgaccagagtgacgcatacagagtccatgtatgcgagaaatgtggtctcatcgcaattgctaacctaaagaaaaactcgttcgaatgcaggggctgcaagaacaagactgacattgtccaagtacacataccctatgcttgtaagcttctgtttcaggagcttatggcaatggccattgctcccagaatgcttacccatgatatgaagacagggaaggatcagaagaagcgctgaacgtgtatcacgtgagatgtaaccagaactcatgccccgttgctatattcctggatcctggttcacacaatagtaccctgttgaggaactttgtggtcacttcttttctgatttggacttcggttcttcgcgatcgatggagggctgttactatctcttgatggattattatcctatctgtgctcgtgttgcctgaagatcagtgctagcagatcgtcgagttaattttgtacattaggaatgtgttgtaatgtattaatctgtgcgagtagaaagatttttgactaaaggtgtcaatttggaggtgtaactgtacgttaatactaaacgcgatgccattgcaatttcagttttattttgaaatacatggggttttagtggcatgtctctaaactatcacaatcttaatggcatggttctaattaatctttttcttcttatacaacaacc

SEQ ID NO: 221173 - DNA, 3281 bp, Zea Mays
attgagaggatttgtaccatggaccttggcagtgtgttggttagcatttagagcggtggtcgtgccagccattactccccacaacaagaggtgccggctcatgtttgattctgcagctctagatcgtttgctccctcactgagtgtgatgcttcagctctgggttgttccaaaaacttgctaaggtatcatgattttctgccgtttaaatttcatatgccggctatatctttttttttctggtttcatataaacttctttgttgataagaagtgtagagtagtgacatatttgcctgagctcttattacctgagtagtgcattgcaatggtgtgagctataccaagtttctcaaataaccaatgcaagtgtgttatcctgtccatgaggttgagaggtaaggccagctttgcttagctcccttttcatttgagcaagatattgcttctgtcaatgttcactctggtatttgtttatggcttttggtatcttctgcttacacatggccacattctctgattctatatgtgttatgaggtttcatttgttcactatatgatttacttgtaggtatacttactgatgtggttgcataggtgtcatttgtctctctctgcaggaatgtctcgttatcctgcaccgtatcctatgattcgtcctggttttgttccacgtccaatgccgccgcctggtgttgtgccaattcaacgaccaacaataatttctgggatccgggctattcctcctttggtagccccaactgcccggccacctgctccagctgttaagctggcagataaaccgccaaccgcagtttatgttgggaagatcgccccaacagtggacagtgatttccttctttcacttcttcggctttgtggatctgtcaagagttggaagcgtgcccaagatcctagtaatggaaaacctaaaggttttgggttttgtgaatttgaatctgctgaaggcatccttcgtgcgacacggcttctcaacaaattgagcattgatggtcaggaactggtgattaatataaatgatgccaccaaggaatacctgaagaaacatgttgagggaaagaagagagcacaagagaaggaaaaagaaacagaagatgcaagcggggatggaactacagctgttgctgaaaatgaatcatcaaaacctgtccctgatgaattggatgagacaggagatgctggagataagtacagggaagacaacactgataaatttgggattgttactgacgaagactctcaaactgacaaagatgtcgcagaaaaaataagcaatatgattgaggagtggttaaagactagaccgccacccccaccttcaccagttcaaccatctgctgatagctctggcgtagataaggcaaaaaatgattctgatgataagaatgctgctgatgctgataaaagggcagctaatgaaactgagagatctgaaactgcctctcctgataagaggaaggatagagagcatgataaggacaaacgggacaaagatcttgaaaggcatgaccgtgaacgtgaaagagtacggagggatagagagaaggatcataagcatagagaagctgataggctctacagggatcgccttaaggagtgggaatctagggaaagagagagagaatatcagaggtatagtgaaaaggagaaagaaagagatagagatcataaccgcagaagggagatcctgaagcaggaagatgagagcgatgacgaggataataggaaaaggaaacgaaggagtattagctcacttgaagataggaagaggaggaggcaacgtgaaaaggaggaagatttggcagataaaataagggaggaggaggaaattgcagaagcaaggaggctggctgtagagttgcaacggcaagcagatgaagcagctgcggcggcggctgcagccgccgaagagtctgcatcacttatggagattgatggtgatgacgaaaaggaaacagatgcacaaaacaagtcggctgttgtggaagctgataacatctcgagctttgctaatggtgttggtgctgtaagggaaataatggtgaggaaacatgtatgacacctggtcaaaccgcagatactaagcaaaacaacaatgttccagcaaagaaactgggttttggtttgattggcttgggcaaaaggacatctgttccatcagtttttgctgtagaggatgacgaaaataatgttgataaaagcataagacctctagtacctatcgattactccactgaagaattacaagctgtacatgctaattcttctactggggcaaatgtcacagcagctgccgagtttgccaagcgcatctcagtttctaattcaaaggaagagaaggctgaagctgagaaggataggaataggagatccagtgaagctcgtcctaatgatgagcgaagagagaagctacatgatcgcgagaaggataagcccaagtcagagaacaagaagattctggatgcaaagcaactaattgatatgatcccaaggacaaaggaagagctttttgcctatgatataaactgggcgatatatgacaagcatgagttgcaagagagaatgaggccttggatttcaaaaaagataattgaatttcttggcgaggaggaatcaactttggtggactatattgtttcctgcaccaaagaccatgttcaggctgaaaagatgctagatcttctacagtcgattttcgatgttgaggccgagatgtttgtcctcaagatgtggaggatgcttatatttgagatcaagaaagtcgaatctggactatcaggaagagcaaagtcatgaagcgaagcctgttaccctgtatgacctctgatctgcattactcatcaactgtgaccacacttgtaaggtcatactgcactacaagtatcaaaaaccatttttagtgacagagttgatggatctttttacttgtttcttgtacaaatgcatacgagagttaatgagatactgtgcgtaatatttttattttgatagattgcataactgtgtttggcacagttcacacgagtcaactgcctacttttgcttaacttgttctctggtgaacgaagaatgtcaatgctggcagtagccacaagtgatccctaatcatacatggtgtgtgtgcaaagatgttcgtataatcgtatttcacttttgcttctgtactgtagcagtaccgttgagcttttcgtggttgctgctgtgcgataaatctgtagtttcttgctcatatacttatattgctcgttttgttgtgcggtct

SEQ ID NO: 221174 - DNA, 3328 bp, Zea Mays
accggtcttcatgcccgagatcgaaatcgaacccaaacggccaaaccaaccatcgtctactcggcggctgggctagcaccctccctaccaccatggcggccgtcgtgcctccgcccgacaacctggacccgcagccggctactcccccagccgccgctccttccgccacgctcaccccgcctcccgccgccacctccaccccaccaacccccttgacgccgggccccgcggcgcctagcccaaaccctaacctaccccctgcccctgcccctgcccctgcccccgcccccgcttccacgcctccggcggcagtcgcgccaccgatgcccccagctccgatctccttcgctgctaccttccgtccactcggtgccccagcgccaccgccgccgtaccaggtcccgcagtacgtcgcggtgccggcgaacccgggctacccgatgcagccgccgggcgtccccgtcgttatgcctccgggcgccgtgcggctgccggccatgtacgggccgccccagccgggagtatacatgccgcagcagggcgctgcgatcccccatcccgcggtggtcgtgccagccattactccccacaacaagaggtgccggctcatgtttgattctgcagctctagatcgtttgctccctcactgagtgtggaatgtctcgttatcctgcaccgtatcctatgattcgtcctggttttgttccacgtccaatgccgccgcctggtgttgtgccaattcaacgaccaacaataatttctgggatccgggctattcctcctttggtagccccaactgcccggccacctgctccagctgttaagctggcagataaaccgccaaccgcagtttatgttgggaagatcgccccaacagtggacagtgatttccttctttcacttcttcggctttgtggatctgtcaagagttggaagcgtgcccaagatcctagtaatggaaaacctaaaggttttgggttttgtgaatttgaatctgctgaaggcatccttcgtgcgacacggcttctcaacaaattgagcattgatggtcaggaactggtgattaatataaatgatgccaccaaggaatacctgaagaaacatgttgagggaaagaagagagcacaagagaaggaaaaagaaacagaagatgcaagcggggatggaactacagctgttgctgaaaatgaatcatcaaaacctgtccctgatgaattggatgagacaggagatgctggagataagtacagggaagacaacactgataaatttgggattgttactgacgaagactctcaaactgacaaagatgtcgcagaaaaaataagcaatatgattgaggagtggttaaagactagaccgccacccccaccttcaccagttcaaccatctgctgatagctctggcgtagataaggcaaaaaatgattctgatgataagaatgctgctgatgctgataaaagggcagctaatgaaactgagagatctgaaactgcctctcctgataagaggaaggatagagagcatgataaggacaaacgggacaaagatcttgaaaggcatgaccgtgaacgtgaaagagtacggagggatagagagaaggatcataagcatagagaagctgataggctctacagggatcgccttaaggagtgggaatctagggaaagagagagagaatatcagaggtatagtgaaaaggagaaagaaagagatagagatcataaccgcagaagggagatcctgaagcaggaagatgagagcgatgacgaggataataggaaaaggaaacgaaggagtattagctcacttgaagataggaagaggaggaggcaacgtgaaaaggaggaagatttggcagataaaataagggaggaggaggaaattgcagaagcaaggaggctggctgtagagttgcaacggcaagcagatgaagcagctgcggcggcggctgcagccgccgaagagtctgcatcacttatggagattgatggtgatgacgaaaaggaaacagatgcacaaaacaagtcggctgttgtggaagctgataacatctcgagctttgctaatggtgttggtgctggtcgacttagtaagggaaataatggtgaggaaacatgtatgacacctggtcaaaccgcagatactaagcaaaacaacaatgttccagcaaagaaactgggttttggtttgattggcttgggcaaaaggacatctgttccatcagtttttgctgtagaggatgacgaaaataatgttgataaaagcataagacctctagtacctatcgattactccactgaagaattacaagctgtacatgctaattcttctactggggcaaatgtcacagcagctgccgagtttgccaagcgcatctcagtttctaattcaaaggaagagaaggctgaagctgagaaggataggaataggagatccagtgaagctcgtcctaatgatgagcgaagagagaagctacatgatcgcgagaaggataagcccaagtcagagaacaagaagattctggatgcaaagcaactaattgatatgatcccaaggacaaaggaagagctttttgcctatgatataaactgggcgatatatgacaagcatgagttgcaagagagaatgaggccttggatttcaaaaaagataattgaatttcttggcgaggaggaatcaactttggtggactatattgtttcctgcaccaaagaccatgttcaggctgaaaagatgctagatcttctacagtcgattttcgatgttgaggccgagatgtttgtcctcaagatgtggaggatgcttatatttgagatcaagaaagtcgaatctggactatcaggaagagcaaagtcatgaagcgaagcctgttaccctgtatgacctctgatctgcattactcatcaactgtgaccacacttgtaaggtcatactgcactacaagtatcaaaaaccatttttagtgacagagttgatggatctttttacttgtttcttgtacaaatgcatacgagagttaatgagatactgtgcgtaatatttttattttgatagattgcataactgtgtttggcacagttcacacgagtcaactgcctacttttgcttaacttgttctctggtgaacgaagaatgtcaatgctggcagtagccacaagtgatccctaatcatacatggtgtgtgtgcaaagatgttcgtataatcgtatttcacttttgcttctgtactgtagcagtaccgttgagcttttcgtggttgctgctgtgcgataaatctgtagtttcttgctcatatacttatattgctcgttttgttgtgcggtct

SEQ ID NO: 221175 - DNA, 3512 bp, Zea Mays
accggtcttcatgcccgagatcgaaatcgaacccaaacggccaaaccaaccatcgtctactcggcggctgggctagcaccctccctaccaccatggcggccgtcgtgcctccgcccgacaacctggacccgcagccggctactcccccagccgccgctccttccgccacgctcaccccgcctcccgccgccacctccaccccaccaacccccttgacgccgggccccgcggcgcctagcccaaaccctaacctaccccctgcccctgcccctgcccctgcccccgcccccgcttccacgcctccggcggcagtcgcgccaccgatgcccccagctccgatctccttcgctgctaccttccgtccactcggtgccccagcgccaccgccgccgtaccaggtcccgcagtacgtcgcggtgccggcgaacccgggctacccgatgcagccgccgggcgtccccgtcgttatgcctccgggcgccgtgcggctgccggccatgtacgggccgccccagccgggagtatacatgccgcagcagggcgctgcgatcccccatcccgcggtggtcgtgccagccattactccccacaacaagaggtgccggctcatgtttgattctgcagctctagatcgtttgctccctcactgagtgtgatgcttcagctctgggttgttccaaaaacttgctaagtgtagagtagtgacatatttgcctgagctcttattacctgagtagtgcattgcaatggtgtgagctataccaagtttctcaaataaccaatgcaagtgtgttatcctgtccatgaggttgagaggtgtcatttgtctctctctgcaggaatgtctcgttatcctgcaccgtatcctatgattcgtcctggttttgttccacgtccaatgccgccgcctggtgttgtgccaattcaacgaccaacaataatttctgggatccgggctattcctcctttggtagccccaactgcccggccacctgctccagctgttaagctggcagataaaccgccaaccgcagtttatgttgggaagatcgccccaacagtggacagtgatttccttctttcacttcttcggctttgtggatctgtcaagagttggaagcgtgcccaagatcctagtaatggaaaacctaaaggttttgggttttgtgaatttgaatctgctgaaggcatccttcgtgcgacacggcttctcaacaaattgagcattgatggtcaggaactggtgattaatataaatgatgccaccaaggaatacctgaagaaacatgttgagggaaagaagagagcacaagagaaggaaaaagaaacagaagatgcaagcggggatggaactacagctgttgctgaaaatgaatcatcaaaacctgtccctgatgaattggatgagacaggagatgctggagataagtacagggaagacaacactgataaatttgggattgttactgacgaagactctcaaactgacaaagatgtcgcagaaaaaataagcaatatgattgaggagtggttaaagactagaccgccacccccaccttcaccagttcaaccatctgctgatagctctggcgtagataaggcaaaaaatgattctgatgataagaatgctgctgatgctgataaaagggcagctaatgaaactgagagatctgaaactgcctctcctgataagaggaaggatagagagcatgataaggacaaacgggacaaagatcttgaaaggcatgaccgtgaacgtgaaagagtacggagggatagagagaaggatcataagcatagagaagctgataggctctacagggatcgccttaaggagtgggaatctagggaaagagagagagaatatcagaggtatagtgaaaaggagaaagaaagagatagagatcataaccgcagaagggagatcctgaagcaggaagatgagagcgatgacgaggataataggaaaaggaaacgaaggagtattagctcacttgaagataggaagaggaggaggcaacgtgaaaaggaggaagatttggcagataaaataagggaggaggaggaaattgcagaagcaaggaggctggctgtagagttgcaacggcaagcagatgaagcagctgcggcggcggctgcagccgccgaagagtctgcatcacttatggagattgatggtgatgacgaaaaggaaacagatgcacaaaacaagtcggctgttgtggaagctgataacatctcgagctttgctaatggtgttggtgctggtcgacttagtaagggaaataatggtgaggaaacatgtatgacacctggtcaaaccgcagatactaagcaaaacaacaatgttccagcaaagaaactgggttttggtttgattggcttgggcaaaaggacatctgttccatcagtttttgctgtagaggatgacgaaaataatgttgataaaagcataagacctctagtacctatcgattactccactgaagaattacaagctgtacatgctaattcttctactggggcaaatgtcacagcagctgccgagtttgccaagcgcatctcagtttctaattcaaaggaagagaaggctgaagctgagaaggataggaataggagatccagtgaagctcgtcctaatgatgagcgaagagagaagctacatgatcgcgagaaggataagcccaagtcagagaacaagaagattctggatgcaaagcaactaattgatatgatcccaaggacaaaggaagagctttttgcctatgatataaactgggcgatatatgacaagcatgagttgcaagagagaatgaggccttggatttcaaaaaagataattgaatttcttggcgaggaggaatcaactttggtggactatattgtttcctgcaccaaagaccatgttcaggctgaaaagatgctagatcttctacagtcgattttcgatgttgaggccgagatgtttgtcctcaagatgtggaggatgcttatatttgagatcaagaaagtcgaatctggactatcaggaagagcaaagtcatgaagcgaagcctgttaccctgtatgacctctgatctgcattactcatcaactgtgaccacacttgtaaggtcatactgcactacaagtatcaaaaaccatttttagtgacagagttgatggatctttttacttgtttcttgtacaaatgcatacgagagttaatgagatactgtgcgtaatatttttattttgatagattgcataactgtgtttggcacagttcacacgagtcaactgcctacttttgcttaacttgttctctggtgaacgaagaatgtcaatgctggcagtagccacaagtgatccctaatcatacatggtgtgtgtgcaaagatgttcgtataatcgtatttcacttttgcttctgtactgtagcagtaccgttgagcttttcgtggttgctgctgtgcgataaatctgtagtttcttgctcatatacttatattgctcgttttgttgtgcggtct

SEQ ID NO: 221176 - DNA, 3365 bp, Zea Mays
accggtcttcatgcccgagatcgaaatcgaacccaaacggccaaaccaaccatcgtctactcggcggctgggctagcaccctccctaccaccatggcggccgtcgtgcctccgcccgacaacctggacccgcagccggctactcccccagccgccgctccttccgccacgctcaccccgcctcccgccgccacctccaccccaccaacccccttgacgccgggccccgcggcgcctagcccaaaccctaacctaccccctgcccctgcccctgcccctgcccccgcccccgcttccacgcctccggcggcagtcgcgccaccgatgcccccagctccgatctccttcgctgctaccttccgtccactcggtgccccagcgccaccgccgccgtaccaggtcccgcagtacgtcgcggtgccggcgaacccgggctacccgatgcagccgccgggcgtccccgtcgttatgcctccgggcgccgtgcggctgccggccatgtacgggccgccccagccgggagtatacatgccgcagcagggcgctgcgatcccccatcccgcggtggtcgtgccagccattactccccacaacaagaggtgccggctcatgtttgattctgcagctctagatcgtttgctccctcactgagtgtgatgcttcagctctgggttgttccaaaaacttgctaaggaatgtctcgttatcctgcaccgtatcctatgattcgtcctggttttgttccacgtccaatgccgccgcctggtgttgtgccaattcaacgaccaacaataatttctgggatccgggctattcctcctttggtagccccaactgcccggccacctgctccagctgttaagctggcagataaaccgccaaccgcagtttatgttgggaagatcgccccaacagtggacagtgatttccttctttcacttcttcggctttgtggatctgtcaagagttggaagcgtgcccaagatcctagtaatggaaaacctaaaggttttgggttttgtgaatttgaatctgctgaaggcatccttcgtgcgacacggcttctcaacaaattgagcattgatggtcaggaactggtgattaatataaatgatgccaccaaggaatacctgaagaaacatgttgagggaaagaagagagcacaagagaaggaaaaagaaacagaagatgcaagcggggatggaactacagctgttgctgaaaatgaatcatcaaaacctgtccctgatgaattggatgagacaggagatgctggagataagtacagggaagacaacactgataaatttgggattgttactgacgaagactctcaaactgacaaagatgtcgcagaaaaaataagcaatatgattgaggagtggttaaagactagaccgccacccccaccttcaccagttcaaccatctgctgatagctctggcgtagataaggcaaaaaatgattctgatgataagaatgctgctgatgctgataaaagggcagctaatgaaactgagagatctgaaactgcctctcctgataagaggaaggatagagagcatgataaggacaaacgggacaaagatcttgaaaggcatgaccgtgaacgtgaaagagtacggagggatagagagaaggatcataagcatagagaagctgataggctctacagggatcgccttaaggagtgggaatctagggaaagagagagagaatatcagaggtatagtgaaaaggagaaagaaagagatagagatcataaccgcagaagggagatcctgaagcaggaagatgagagcgatgacgaggataataggaaaaggaaacgaaggagtattagctcacttgaagataggaagaggaggaggcaacgtgaaaaggaggaagatttggcagataaaataagggaggaggaggaaattgcagaagcaaggaggctggctgtagagttgcaacggcaagcagatgaagcagctgcggcggcggctgcagccgccgaagagtctgcatcacttatggagattgatggtgatgacgaaaaggaaacagatgcacaaaacaagtcggctgttgtggaagctgataacatctcgagctttgctaatggtgttggtgctggtcgacttagtaagggaaataatggtgaggaaacatgtatgacacctggtcaaaccgcagatactaagcaaaacaacaatgttccagcaaagaaactgggttttggtttgattggcttgggcaaaaggacatctgttccatcagtttttgctgtagaggatgacgaaaataatgttgataaaagcataagacctctagtacctatcgattactccactgaagaattacaagctgtacatgctaattcttctactggggcaaatgtcacagcagctgccgagtttgccaagcgcatctcagtttctaattcaaaggaagagaaggctgaagctgagaaggataggaataggagatccagtgaagctcgtcctaatgatgagcgaagagagaagctacatgatcgcgagaaggataagcccaagtcagagaacaagaagattctggatgcaaagcaactaattgatatgatcccaaggacaaaggaagagctttttgcctatgatataaactgggcgatatatgacaagcatgagttgcaagagagaatgaggccttggatttcaaaaaagataattgaatttcttggcgaggaggaatcaactttggtggactatattgtttcctgcaccaaagaccatgttcaggctgaaaagatgctagatcttctacagtcgattttcgatgttgaggccgagatgtttgtcctcaagatgtggaggatgcttatatttgagatcaagaaagtcgaatctggactatcaggaagagcaaagtcatgaagcgaagcctgttaccctgtatgacctctgatctgcattactcatcaactgtgaccacacttgtaaggtcatactgcactacaagtatcaaaaaccatttttagtgacagagttgatggatctttttacttgtttcttgtacaaatgcatacgagagttaatgagatactgtgcgtaatatttttattttgatagattgcataactgtgtttggcacagttcacacgagtcaactgcctacttttgcttaacttgttctctggtgaacgaagaatgtcaatgctggcagtagccacaagtgatccctaatcatacatggtgtgtgtgcaaagatgttcgtataatcgtatttcacttttgcttctgtactgtagcagtaccgttgagcttttcgtggttgctgctgtgcgataaatctgtagtttcttgctcatatacttatattgctcgttttgttgtgcggtct

SEQ ID NO: 221177 - DNA, 3816 bp, Zea Mays
accggtcttcatgcccgagatcgaaatcgaacccaaacggccaaaccaaccatcgtctactcggcggctgggctagcaccctccctaccaccatggcggccgtcgtgcctccgcccgacaacctggacccgcagccggctactcccccagccgccgctccttccgccacgctcaccccgcctcccgccgccacctccaccccaccaacccccttgacgccgggccccgcggcgcctagcccaaaccctaacctaccccctgcccctgcccctgcccctgcccccgcccccgcttccacgcctccggcggcagtcgcgccaccgatgcccccagctccgatctccttcgctgctaccttccgtccactcggtgccccagcgccaccgccgccgtaccaggtcccgcagtacgtcgcggtgccggcgaacccgggctacccgatgcagccgccgggcgtccccgtcgttatgcctccgggcgccgtgcggctgccggccatgtacgggccgccccagccgggagtatacatgccgcagcagggcgctgcgatcccccatcccgcggtggtcgtgccagccattactccccacaacaagaggtgccggctcatgtttgattctgcagctctagatcgtttgctccctcactgagtgtgtttctttatgtacttagatgcttcagctctgggttgttccaaaaacttgctaaggtatcatgattttctgccgtttaaatttcatatgccggctatatctttttttttctggtttcatataaacttctttgttgataagaagtgtagagtagtgacatatttgcctgagctcttattacctgagtagtgcattgcaatggtgtgagctataccaagtttctcaaataaccaatgcaagtgtgttatcctgtccatgaggttgagaggtaaggccagctttgcttagctcccttttcatttgagcaagatattgcttctgtcaatgttcactctggtatttgtttatggcttttggtatcttctgcttacacatggccacattctctgattctatatgtgttatgaggtttcatttgttcactatatgatttacttgtaggtatacttactgatgtggttgcataggtgtcatttgtctctctctgcaggaatgtctcgttatcctgcaccgtatcctatgattcgtcctggttttgttccacgtccaatgccgccgcctggtgttgtgccaattcaacgaccaacaataatttctgggatccgggctattcctcctttggtagccccaactgcccggccacctgctccagctgttaagctggcagataaaccgccaaccgcagtttatgttgggaagatcgccccaacagtggacagtgatttccttctttcacttcttcggctttgtggatctgtcaagagttggaagcgtgcccaagatcctagtaatggaaaacctaaaggttttgggttttgtgaatttgaatctgctgaaggcatccttcgtgcgacacggcttctcaacaaattgagcattgatggtcaggaactggtgattaatataaatgatgccaccaaggaatacctgaagaaacatgttgagggaaagaagagagcacaagagaaggaaaaagaaacagaagatgcaagcggggatggaactacagctgttgctgaaaatgaatcatcaaaacctgtccctgatgaattggatgagacaggagatgctggagataagtacagggaagacaacactgataaatttgggattgttactgacgaagactctcaaactgacaaagatgtcgcagaaaaaataagcaatatgattgaggagtggttaaagactagaccgccacccccaccttcaccagttcaaccatctgctgatagctctggcgtagataaggcaaaaaatgattctgatgataagaatgctgctgatgctgataaaagggcagctaatgaaactgagagatctgaaactgcctctcctgataagaggaaggatagagagcatgataaggacaaacgggacaaagatcttgaaaggcatgaccgtgaacgtgaaagagtacggagggatagagagaaggatcataagcatagagaagctgataggctctacagggatcgccttaaggagtgggaatctagggaaagagagagagaatatcagaggtatagtgaaaaggagaaagaaagagatagagatcataaccgcagaagggagatcctgaagcaggaagatgagagcgatgacgaggataataggaaaaggaaacgaaggagtattagctcacttgaagataggaagaggaggaggcaacgtgaaaaggaggaagatttggcagataaaataagggaggaggaggaaattgcagaagcaaggaggctggctgtagagttgcaacggcaagcagatgaagcagctgcggcggcggctgcagccgccgaagagtctgcatcacttatggagattgatggtgatgacgaaaaggaaacagatgcacaaaacaagtcggctgttgtggaagctgataacatctcgagctttgctaatggtgttggtgctggtcgacttagtaagggaaataatggtgaggaaacatgtatgacacctggtcaaaccgcagatactaagcaaaacaacaatgttccagcaaagaaactgggttttggtttgattggcttgggcaaaaggacatctgttccatcagtttttgctgtagaggatgacgaaaataatgttgataaaagcataagacctctagtacctatcgattactccactgaagaattacaagctgtacatgctaattcttctactggggcaaatgtcacagcagctgccgagtttgccaagcgcatctcagtttctaattcaaaggaagagaaggctgaagctgagaaggataggaataggagatccagtgaagctcgtcctaatgatgagcgaagagagaagctacatgatcgcgagaaggataagcccaagtcagagaacaagaagattctggatgcaaagcaactaattgatatgatcccaaggacaaaggaagagctttttgcctatgatataaactgggcgatatatgacaagcatgagttgcaagagagaatgaggccttggatttcaaaaaagataattgaatttcttggcgaggaggaatcaactttggtggactatattgtttcctgcaccaaagaccatgttcaggctgaaaagatgctagatcttctacagtcgattttcgatgttgaggccgagatgtttgtcctcaagatgtggaggatgcttatatttgagatcaagaaagtcgaatctggactatcaggaagagcaaagtcatgaagcgaagcctgttaccctgtatgacctctgatctgcattactcatcaactgtgaccacacttgtaaggtcatactgcactacaagtatcaaaaaccatttttagtgacagagttgatggatctttttacttgtttcttgtacaaatgcatacgagagttaatgagatactgtgcgtaatatttttattttgatagattgcataactgtgtttggcacagttcacacgagtcaactgcctacttttgcttaacttgttctctggtgaacgaagaatgtcaatgctggcagtagccacaagtgatccctaatcatacatggtgtgtgtgcaaagatgttcgtataatcgtatttcacttttgcttctgtactgtagcagtaccgttgagcttttcgtggttgctgctgtgcgataaatctgtagtttcttgctcatatacttatattgctcgttttgttgtgcggtct

SEQ ID NO: 221178 - DNA, 3521 bp, Zea Mays
ccaccggtcttcatgcccgagatcgaaatcgaacccaaacggccaaaccaaccatcgtctactcggcggctgggctagcaccctccctaccaccatggcggccgtcgtgcctccgcccgacaacctggacccgcagccggctactcccccagccgccgctccttccgccacgctcaccccgcctcccgccgccacctccaccccaccaacccccttgacgccgggccccgcggcgcctagcccaaaccctaacctaccccctgcccctgcccctgcccctgcccccgcccccgcttccacgcctccggcggcagtcgcgccaccgatgcccccagctccgatctccttcgctgctaccttccgtccactcggtgccccagcgccaccgccgccgtaccaggtcccgcagtacgtcgcggtgccggcgaacccgggctacccgatgcagccgccgggcgtccccgtcgttatgcctccgggcgccgtgcggctgccggccatgtacgggccgccccagccgggagtatacatgccgcagcagggcgctgcgatcccccatcccggagaattgagaggatttgtaccatggaccttggcagtgtgttggttagcatttagaggtgtggtgctagtgctttagagttagagaaactgggctccgctcgcctgataacgatgaccggatatttctctgctacagcggtggtcgtgccagccattactccccacaacaagaggtgccggctcatgtttgattctgcagctctagatcgtttgctccctcactgagtgtgtttctttatgtacttagatgcttcagctctgggttgttccaaaaacttgctaaggaatgtctcgttatcctgcaccgtatcctatgattcgtcctggttttgttccacgtccaatgccgccgcctggtgttgtgccaattcaacgaccaacaataatttctgggatccgggctattcctcctttggtagccccaactgcccggccacctgctccagctgttaagctggcagataaaccgccaaccgcagtttatgttgggaagatcgccccaacagtggacagtgatttccttctttcacttcttcggctttgtggatctgtcaagagttggaagcgtgcccaagatcctagtaatggaaaacctaaaggttttgggttttgtgaatttgaatctgctgaaggcatccttcgtgcgacacggcttctcaacaaattgagcattgatggtcaggaactggtgattaatataaatgatgccaccaaggaatacctgaagaaacatgttgagggaaagaagagagcacaagagaaggaaaaagaaacagaagatgcaagcggggatggaactacagctgttgctgaaaatgaatcatcaaaacctgtccctgatgaattggatgagacaggagatgctggagataagtacagggaagacaacactgataaatttgggattgttactgacgaagactctcaaactgacaaagatgtcgcagaaaaaataagcaatatgattgaggagtggttaaagactagaccgccacccccaccttcaccagttcaaccatctgctgatagctctggcgtagataaggcaaaaaatgattctgatgataagaatgctgctgatgctgataaaagggcagctaatgaaactgagagatctgaaactgcctctcctgataagaggaaggatagagagcatgataaggacaaacgggacaaagatcttgaaaggcatgaccgtgaacgtgaaagagtacggagggatagagagaaggatcataagcatagagaagctgataggctctacagggatcgccttaaggagtgggaatctagggaaagagagagagaatatcagaggtatagtgaaaaggagaaagaaagagatagagatcataaccgcagaagggagatcctgaagcaggaagatgagagcgatgacgaggataataggaaaaggaaacgaaggagtattagctcacttgaagataggaagaggaggaggcaacgtgaaaaggaggaagatttggcagataaaataagggaggaggaggaaattgcagaagcaaggaggctggctgtagagttgcaacggcaagcagatgaagcagctgcggcggcggctgcagccgccgaagagtctgcatcacttatggagattgatggtgatgacgaaaaggaaacagatgcacaaaacaagtcggctgttgtggaagctgataacatctcgagctttgctaatggtgttggtgctggtcgacttagtaagggaaataatggtgaggaaacatgtatgacacctggtcaaaccgcagatactaagcaaaacaacaatgttccagcaaagaaactgggttttggtttgattggcttgggcaaaaggacatctgttccatcagtttttgctgtagaggatgacgaaaataatgttgataaaagcataagacctctagtacctatcgattactccactgaagaattacaagctgtacatgctaattcttctactggggcaaatgtcacagcagctgccgagtttgccaagcgcatctcagtttctaattcaaaggaagagaaggctgaagctgagaaggataggaataggagatccagtgaagctcgtcctaatgatgagcgaagagagaagctacatgatcgcgagaaggataagcccaagtcagagaacaagaagattctggatgcaaagcaactaattgatatgatcccaaggacaaaggaagagctttttgcctatgatataaactgggcgatatatgacaagcatgagttgcaagagagaatgaggccttggatttcaaaaaagataattgaatttcttggcgaggaggaatcaactttggtggactatattgtttcctgcaccaaagaccatgttcaggctgaaaagatgctagatcttctacagtcgattttcgatgttgaggccgagatgtttgtcctcaagatgtggaggatgcttatatttgagatcaagaaagtcgaatctggactatcaggaagagcaaagtcatgaagcgaagcctgttaccctgtatgacctctgatctgcattactcatcaactgtgaccacacttgtaaggtcatactgcactacaagtatcaaaaaccatttttagtgacagagttgatggatctttttacttgtttcttgtacaaatgcatacgagagttaatgagatactgtgcgtaatatttttattttgatagattgcataactgtgtttggcacagttcacacgagtcaactgcctacttttgcttaacttgttctctggtgaacgaagaatgtcaatgctggcagtagccacaagtgatccctaatcatacatggtgtgtgtgcaaagatgttcgtataatcgtatttcacttttgcttctgtactgtagcagtaccgttgagcttttcgtggttgctgctgtgcgataaatctgtagtttcttgctcatatacttatattgctcgttttgttgtgcggtct

SEQ ID NO: 221179 - DNA, 3302 bp, Zea Mays
gtaaaatttgtggcggccagaagctgaaaaaaaagttaaaacaaacgggccttcatcacccaaccgccaccggtcttcatgcccgagatcgaaatcgaacccaaacggccaaaccaaccatcgtctactcggcggctgggctagcaccctccctaccaccatggcggccgtcgtgcctccgcccgacaacctggacccgcagccggctactcccccagccgccgctccttccgccacgctcaccccgcctcccgccgccacctccaccccaccaacccccttgacgccgggccccgcggcgcctagcccaaaccctaacctaccccctgcccctgcccctgcccctgcccccgcccccgcttccacgcctccggcggcagtcgcgccaccgatgcccccagctccgatctccttcgctgctaccttccgtccactcggtgccccagcgccaccgccgccgtaccaggtcccgcagtacgtcgcggtgccggcgaacccgggctacccgatgcagccgccgggcgtccccgtcgttatgcctccgggcgccgtgcggctgccggccatgtacgggccgccccagccgggagtatacatgccgcagcagggcgctgcgatcccccatcccggaatgtctcgttatcctgcaccgtatcctatgattcgtcctggttttgttccacgtccaatgccgccgcctggtgttgtgccaattcaacgaccaacaataatttctgggatccgggctattcctcctttggtagccccaactgcccggccacctgctccagctgttaagctggcagataaaccgccaaccgcagtttatgttgggaagatcgccccaacagtggacagtgatttccttctttcacttcttcggctttgtggatctgtcaagagttggaagcgtgcccaagatcctagtaatggaaaacctaaaggttttgggttttgtgaatttgaatctgctgaaggcatccttcgtgcgacacggcttctcaacaaattgagcattgatggtcaggaactggtgattaatataaatgatgccaccaaggaatacctgaagaaacatgttgagggaaagaagagagcacaagagaaggaaaaagaaacagaagatgcaagcggggatggaactacagctgttgctgaaaatgaatcatcaaaacctgtccctgatgaattggatgagacaggagatgctggagataagtacagggaagacaacactgataaatttgggattgttactgacgaagactctcaaactgacaaagatgtcgcagaaaaaataagcaatatgattgaggagtggttaaagactagaccgccacccccaccttcaccagttcaaccatctgctgatagctctggcgtagataaggcaaaaaatgattctgatgataagaatgctgctgatgctgataaaagggcagctaatgaaactgagagatctgaaactgcctctcctgataagaggaaggatagagagcatgataaggacaaacgggacaaagatcttgaaaggcatgaccgtgaacgtgaaagagtacggagggatagagagaaggatcataagcatagagaagctgataggctctacagggatcgccttaaggagtgggaatctagggaaagagagagagaatatcagaggtatagtgaaaaggagaaagaaagagatagagatcataaccgcagaagggagatcctgaagcaggaagatgagagcgatgacgaggataataggaaaaggaaacgaaggagtattagctcacttgaagataggaagaggaggaggcaacgtgaaaaggaggaagatttggcagataaaataagggaggaggaggaaattgcagaagcaaggaggctggctgtagagttgcaacggcaagcagatgaagcagctgcggcggcggctgcagccgccgaagagtctgcatcacttatggagattgatggtgatgacgaaaaggaaacagatgcacaaaacaagtcggctgttgtggaagctgataacatctcgagctttgctaatggtgttggtgctggtcgacttagtaagggaaataatggtgaggaaacatgtatgacacctggtcaaaccgcagatactaagcaaaacaacaatgttccagcaaagaaactgggttttggtttgattggcttgggcaaaaggacatctgttccatcagtttttgctgtagaggatgacgaaaataatgttgataaaagcataagacctctagtacctatcgattactccactgaagaattacaagctgtacatgctaattcttctactggggcaaatgtcacagcagctgccgagtttgccaagcgcatctcagtttctaattcaaaggaagagaaggctgaagctgagaaggataggaataggagatccagtgaagctcgtcctaatgatgagcgaagagagaagctacatgatcgcgagaaggataagcccaagtcagagaacaagaagattctggatgcaaagcaactaattgatatgatcccaaggacaaaggaagagctttttgcctatgatataaactgggcgatatatgacaagcatgagttgcaagagagaatgaggccttggatttcaaaaaagataattgaatttcttggcgaggaggaatcaactttggtggactatattgtttcctgcaccaaagaccatgttcaggctgaaaagatgctagatcttctacagtcgattttcgatgttgaggccgagatgtttgtcctcaagatgtggaggatgcttatatttgagatcaagaaagtcgaatctggactatcaggaagagcaaagtcatgaagcgaagcctgttaccctgtatgacctctgatctgcattactcatcaactgtgaccacacttgtaaggtcatactgcactacaagtatcaaaaaccatttttagtgacagagttgatggatctttttacttgtttcttgtacaaatgcatacgagagttaatgagatactgtgcgtaatatttttattttgatagattgcataactgtgtttggcacagttcacacgagtcaactgcctacttttgcttaacttgttctctggtgaacgaagaatgtcaatgctggcagtagccacaagtgatccctaatcatacatggtgtgtgtgcaaagatgttcgtataatcgtatttcacttttgcttctgtactgtagcagtaccgttgagcttttcgtggttgctgctgtgcgataaatctgtagtttcttgctcatatacttatattgctcgttttgttgtgcggtct

SEQ ID NO: 221180 - DNA, 1844 bp, Zea Mays
cacactttgcctaaagttagtcgttcaaattgaagaactaaccttaggcaaaaaagttaggcaaagtgtggcaagttaggcaggaaaccaaacatgcccttagggttccgattccggcaactgaaaaaacgagagagtcgttcgttttcatccctaccggccgcctcttctcctctccacctctcaatttcccaaattgaatcctcctcctccccgcctagggttccgattccgcaccgtccgagaaccacccaagcggcggcaactgtcccttctcgtcggccaccgccgcacaactcagttgcttgttcagccgctccgctgccgacccgcctatcgcctgagctccaacggagttacccagaaaccatgattttgaggctctctaattggtctcccaaacaacaacgctccacagcaaattcacaatttatttcattctccatcttttaaaagtgacacgtaacaactttgtaccgctccttacctgtctgtcacatcgcaattgttccccaccagcgtgtatcgtgggtccttccgcttcacccaaccacgaggaagttcttacggtgccacggagttgcaactgcacaaaggccttttgtggtcacaaagggtgctattgtgttacaacaacagttctagttgaagtaataagacattttttaaactgtctgctacattgcttccatggcaaccaatgagaacctcccaccaaatgtcatcaggcaattggctaaagaactgaagaatcttaatgagtcacctgcagaaggaattaatgtgactgtcaatgatgatgacttcactactatttttgctgatattgaaggccctgctggaactccatatgagaatggagtgttcaggatgaagctattattgtctcatgatttccctcaatctcccccaaaaggattcttcttgacaaaaattttccatccaaacatagctactagtggtgagatatgtgtaaacacactgaagaaggattggaatcctagccttggattaagacatgttcttctggtagtgagatgccttctggtcgaaccatttcctgaatctgcacttaatgaacaagctgggaagatgctactcgaaaattatgaggaatatgcacggcatgcaaggttatacactggcatccatgccctcaagaataagtccaagactggagctatatctgagtcgaccacagctctgaatgtcgacaagtcaagcactgctcccaacgagaacgcaccatcgatgccaccggcaatacctacctccgctgcatccagagcacttggcacaaatttgcaggatcagagccctactgtatctgatcctactgtaggagcggcggcggcggcggcggcacgaaggaaggatggcccaatgccttccaaagtacctgttgataggaaaaagatggatgcacggaagaagagcttgaagagattataggcggaaccttcatagtccagcatttaaatctgtcggaaatttagcagatgcctagcgaagctgggagagagacaattagttgggaggcatctgatgacctggcttccgggaggtaggggtcctgggctgggacaaaagtgaataatgtggcctgggtgagtccttcgggacaactgtatgtgcaatgtccaatcatttggaagaacacctgcctatttccttctgtcctctgtattttgttagcttagcggtagtgttagctagctcataggggcaattccctgtctagccatgggctgctgctccgtactctgcttgaataataatttgtccgtgcaattacagctattgttttgtttggaggaatagttgcctttttctgttgattcccg

SEQ ID NO: 221181 - DNA, 880 bp, Zea Mays
acaaattcaaataactccaccggcaagtcccctccgccgtccttcagtaccggaagaaggcgaggcgcccaaccgagagcaccaggggaaaggaagtgcgcctaggcatcgacatggaggacttctacgtcacgatcctctacggcctgctgctcgtagccggcggcgtagccggctacatgaagcgcggcagcgccgcgtctctggtcgccgggggcggattcggcgctgcgctccttctcgctggtgcgctcagcgcctgggccttcgcgcacggcagaggtggcgctgccgccatctttgccaccgtccttcagatcgtttgtgctgtgctattgactgttgtcatgggaataagatacgtcaaaacacaaaagataatgcctgctggaattgtcgcttctatcagtgcactcgtactgatattttacgtgtacaagatatctaccggtggcaacaaggtttatatgtcggtgagtgccgagtgaatctgctgggcgtgtggtgttccgtgtacatgtttgtacggcagctaaatgtgaagacaacaaaatcatctgtgtatcaattgtattttagtgaggcaaacactgtaccaaacaatgatggcatgagttagttaagatgtggatgtggacacatgttcaatttaagctttttgatagtacttgttaaattgctgcaacttcctccatcaatgatgacacacgacacttcaaaattaaaagaaattgagtttcaaaatctaagaatttaaaacaaatacctgagcctctaaacgaacccatgaatgaatttgcaatggtcaagaagaatattttgtctggctttaaaaattcagggtgtgtgctgttcagtattgaagtttgagagggtcttt

SEQ ID NO: 221182 - DNA, 1412 bp, Zea Mays
ctggtcacacacacgcagcaaccaccgagcccagcgcccggcccagccagccagggccaacggcaaggcaacaccctcctcagcccgacgccgacgctcgccgtcatcctcgtaaatccacagcgcgcgcctcccgtcctcccaggcctcacccctagcgatgcgccactcccggcgctcgtgatccatggcctcactccccgttcctcacactcttccgcgggtctcgccagcgatagtgggcgccgcgagggggagggccgcggtgcgcgtacgcactgccaccgcggcattgggcggtgggtgcggcggcggcggcggaatggagcagcgccacggggatgccccgcacagcccagggaaaagtactcttgcatgtgcactgagtcgtgagttgcattgcagaggccacctcacgtatgtacttgatggtgacaacctcagacatggcctaaatagagatttaagctttaaggcagaagaccgtgcagaaaatatacgaagagttggtgaagtggcaaagcttttcgctgatgctggtgtcatatgcattgctagcttgatatctccatacaggagagatcgtgatgcatgccgtgctctacttccacattctaactttattgaagtatttattgatttgcccctaaaaatttgtgaagctcgtgatcctaaaggcctatacaagcttgcacgtacaggaaagattaaaggtttcactggaattgatgatccatacgaaccaccaattaatgatagtaattaagatgaaagatggggaatgcccttcacccaaagcaatggccaagcaagttctatgctaccttgaagagaacggatatttgcaagcttagcatatgtattttgagaagattgatctgattcttgtgtgtccattacttgtggacacaataagatctgttgttggtcacatgaataaaaggcatcaacacgtaggaagtaacagaaggtaccgttcattcagaaacggaaatggattcattcgtttcattgttgatgatatttgtttcgcgtgtattttgcctgcatagctgtgattcatctgcatcagcaattcaggatgcattcggttaactcgcgttgaccgttcgcgtcaattcgggtagttgttctgtgcttgctagttgggttctgttggcaatgtatttgttacaagtaaatacggacaatgtgtgtaatttgtgtatcactttttttcctcttggaataaaaaccgaggaacattgtaacttcttccattgaattcatgcttttggcttttgctgcctctttcattgttgcagtttctgaggcagtaagaacgggtttacgaacccttccacagaaaaagctgccattttatcttgttatatgctcttttttcatacaggaagttatattctcaacttctc

SEQ ID NO: 221183 - DNA, 1077 bp, Zea Mays
taaccctcttaggaactgtcttgagaagggaaaagtactcttgcatgtgcactgagtcgtgagttgcattgcagaggccacctcacgtatgtacttgatggtgacaacctcagacatggcctaaatagagatttaagctttaaggcagaagaccgtgcagaaaatatacgaagagttggtgaagtggcaaagcttttcgctgatgctggtgtcatatgcattgctagcttgatatctccatacaggagagatcgtgatgcatgccgtgctctacttccacattctaactttattgaagtatttattgatttgcccctaaaaatttgtgaagctcgtgatcctaaaggcctatacaagcttgcacgtacaggaaagattaaaggtttcactggaattgatgatccatacgaaccaccaattaatgtaattaagatgaaagatggggaatgcccttcacccaaagcaatggccaagcaagttctatgctaccttgaagagaacggatatttgcaagcttagcatatgtattttgagaagattgatctgattcttgtgtgtccattacttgtggacacaataagatctgttgttggtcacatgaataaaaggcatcaacacgtaggaagtaacagaaggtaccgttcattcagaaacggaaatggattcattcgtttcattgttgatgatatttgtttcgcgtgtattttgcctgcatagctgtgattcatctgcatcagcaattcaggatgcattcggttaactcgcgttgaccgttcgcgtcaattcgggtagttgttctgtgcttgctagttgggttctgttggcaatgtatttgttacaagtaaatacggacaatgtgtgtaatttgtgtatcactttttttcctcttggaataaaaaccgaggaacattgtaacttcttccattgaattcatgcttttggcttttgctgcctctttcattgttgcagtttctgaggcagtaagaacgggtttacgaacccttccacagaaaaagctgccattttatcttgttatatgctcttttttcatacaggaagttatattctcaacttctc

SEQ ID NO: 221184 - DNA, 1011 bp, Zea Mays
gtcctttctcttccctttcttctgcacgcaagcacccaaaccctaattgtactgggttcgtcctgcacgcttaagatcgatcttggttgacgataggacttgttgtccaggagacatatcaagttgtttggtgataatggatccaaagcattcggctgaagtgtccaagcatttagacaagcaaaatcaagcactaatggaaacatatggagcaatgtcccatgagttgcataaactgcaggtagaagaagagacaatcatgcgcaagttgtatgaactgatgtccgcggaagggcttcttccaaagcgcaagaaagaaaagcaacatggggaaaatatagtggcttcaactgagagcaaagaacaggaaccataaattcttatgcgacgtgtaatgtgatatgacagcaatgccattttatctggagagttggtgcttgttaacttctgtatagcagttctctatcatcacaactctgcgaccactacatttaacttcacagttgaaaatttaacctgagtatgagttccgtgaggaattacttacagacaaacataatcattccttttgctcatatgcttcaactgaggttttatattttgttttccctttcttctatttccagggacattattacacacaagactgcttctctttcttttcgttttggcgacacaagtgttacgaattctgattcatcccatataagttccatgcacaactgtgacatgctatttggttttgtcagctcccttggagctctggcacacctaattaatctatcgaatattcgaattgtaatacgaaggcctcctgtagcaggatatatgattttaaacgggtaaatagcagtgtgttgggtgcatggcctacagtcgcccactgaattaggaggtgtttgagctaatagttagctgtgctaaaattagctgaagacatccaaacagtttagctaatagtttagttattagctatttttagcaaattagctactagttagctagatattc

SEQ ID NO: 221185 - DNA, 911 bp, Zea Mays
tataacagacatgtctagggtataaaggagattcttaaaagtaacatggattgaaattatcatttttttgagtttacatcttctgctattcaagcaataatagttcccatgcctgtgagacctaactgatgttctgacagaagtaaacctgcatcttcttctactgtttgagcaatttatagcattcatatttaagaccaaaaggagcgcaagaaagaaaagcaacatggggaaaatatagtggcttcaactgagagcaaagaacaggaaccataaattcttatgcgacgtgtaatgtgatatgacagcaatgccattttatctggagagttggtgcttgttaacttctgtatagcagttctctatcatcacaactctgcgaccactacatttaacttcacagttgaaaatttaacctgagtatgagttccgtgaggaattacttacagacaaacataatcattccttttgctcatatgcttcaactgaggttttatattttgttttccctttcttctatttccagggacattattacacacaagactgcttctctttcttttcgttttggcgacacaagtgttacgaattctgattcatcccatataagttccatgcacaactgtgacatgctatttggttttgtcagctcccttggagctctggcacacctaattaatctatcgaatattcgaattgtaatacgaaggcctcctgtagcaggatatatgattttaaacgggtaaatagcagtgtgttgggtgcatggcctacagtcgcccactgaattaggaggtgtttgagctaatagttagctgtgctaaaattagctgaagacatccaaacagtttagctaatagtttagttattagctatttttagcaaattagctactagttagctagatattc

SEQ ID NO: 221186 - DNA, 2269 bp, Zea Mays
agcgtcctctagcttcttgcccagcccgggtagtacaatacaacccccgtcccatcagctggcagaggccaggccatcagcacccacacccacacccactccctccgttcctcctccatcctcctgcccccaagtacggccgccgccgccgctcaccggatccaagaagaacagccgaggggttcggtctccctcccagcagtgacgagctagctgctccgtgcgttgattgcgtgtttgttattacgtgtacgtcgtgtaccggccgtgtttagctgcagaaaatatagtcgattgggcttaggccccgaagagattgacagaagagagcgagcacctggcgcggcgaccggcatggaacgcatgccgtccccgccgcgtgctcgcttctctttctgtcagcctctccctcgtcctgagccgacgccgatcgagcgtcgtgtgtgtgtagctagctataccttgctctgggcagcatcagtcgctgcctgcctagtggctgctggcgctagtggggcggcagacgctgagacgccaccaccgatactggaaggcaaggagccaaggagggagggggaagggaagggggagagagaggaattggcacgggcgggtgcggtggaaactgtgccacgcagccgcgcgcgcgcagagatgggcaaggacgacacgcatgctgcgaggggacgacggcttttgcaggcaccaagggcatgtcacctcattatcttctagagatacgcacagatttctcgcattttttttgctcgttcctttcggtcaggttgtcggggggttactaccgaggaagaggatgaggctgggaggggggcatggagacttggagaggagcagccaagaagagtagtagtagtactttccttccacttccacgcctctcagtacactgagaaaaccacttcggagcgcgagttcgtggttggttttgcggtacactgaaaaatgattgctagttttattcgccgtttatttatttatctatatttttgctcgcatgctcgcaagatttccttctcttccgctccactcccgggtctctcttgctgcctcagctcacctcgcctcaccttggtgggatgctggcagtacactgcggcactgtaaggatttaacagaacgaagactagtgctgcatcatctctcgctctcgctctcgctctctttctctttcctttctccctccctcgtggtgcaggttcagctcatctttgaacactgtagccattattccagctagctcgcgctgtttctgctcttgcttgctcgggggttctcttctcgctctctcgagttcttgctcggttcctcctgcggccatggcggtccgggtggttgcgcgcgccggcgctagcaagctcctgtttgcacaaaaatggagcgtggggggcaccatgtgatgacccaaatttggcaaagaccgtggactcgccttgccctttgccagatctggtctgcatctgaggtaggattgggtactttcttgtctctctcgctgcacacagtcaaacacatctggtcttttcattcgtgtggtttcggcgccgtgaacatgaattttcagctcctctctctactactcaccttcgtcgacctctcagatgtacgtacgcaggtaggggtggagagaagaggacgacgctgctgctcgttatactgatggaaagtgctgctgcatatggatatgagggagcatcatgaactaatggggaacgtcatttgcagattttacttgaccaaggttttggaccaagctacagaaaaggcttaggttttgaaccaagctacagaaaagtgaagaggaagatgaccaaataaagaccgcttgtcgacaattagagacagtggcaatggagatttctgctcatcatagatgggggtttacaaatagaattgcattgtaaccaaattatctatccctttgtttttctagttatccagtttagaggtttgtccctcccacttgtgcagaccgatgagctgatgagctgttagttctgtaataagtttggccctatcctcgctatgaggtgaaagtcggaaattttggttccattatttaaaaaaataaggatctatattatattagttattcataaaagtatctagaaacatcgatgtaattgctctgatgtctttgtcaagactcaagaatggttgaagaagcaataatagaattggccattgagtttttgcttcctcttgtgtaccctttcccttcatttgttgattaatgatcaataaaactgaa

SEQ ID NO: 221187 - DNA, 2202 bp, Zea Mays
agcgtcctctagcttcttgcccagcccgggtagtacaatacaacccccgtcccatcagctggcagaggccaggccatcagcacccacacccacacccactccctccgttcctcctccatcctcctgcccccaagtacggccgccgccgccgctcaccggatccaagaagaacagccgaggggttcggtctccctcccagcagtgacgagctagctgctccgtgcgttgattgcgtgtttgttattacgtgtacgtcgtgtaccggccgtgtttagctgcagaaaatatagtcgattgggcttaggccccgaagagattgacagaagagagcgagcacctggcgcggcgaccggcatggaacgcatgccgtccccgccgcgtgctcgcttctctttctgtcagcctctccctcgtcctgagccgacgccgatcgagcgtcgtgtgtgtgtagctagctataccttgctctgggcagcatcagtcgctgcctgcctagtggctgctggcgctagtggggcggcagacgctgagacgccaccaccgatactggaaggcaaggagccaaggagggagggggaagggaagggggagagagaggaattggcacgggcgggtgcggtggaaactgtgccacgcagccgcgcgcgcgcagagatgggcaaggacgacacgcatgctgcgaggggacgacggcttttgcaggcaccaagggcatgtcacctcattatcttctagagatacgcacagatttctcgcattttttttgctcgttcctttcggtcaggttgtcggggggttactaccgaggaagaggatgaggctgggaggggggcatggagacttggagaggagcagccaagaagagtagtagtagtactttccttccacttccacgcctctcagtacactgagaaaaccacttcggagcgcgagttcgtggttggttttgcggtacactgaaaaatgattgctagttttattcgccgtttatttatttatctatatttttgctcgcatgctcgcaagatttccttctcttccgctccactcccgggtctctcttgctgcctcagctcacctcgcctcaccttggtgggatgctggcagtacactgcggcactgtaaggatttaacagaacgaagactagtgctgcatcatctctcgctctcgctctcgctctctttctctttcctttctccctccctcgtggtgcaggttcagctcatctttgaacactgtagccattattccagctagctcgcgctgtttctgctcttgcttgctcgggggttctcttctcgctctctcgagttcttgctcggttcctcctgcggccatggcggtccgggtggttgcgcgcgccggcgctagcaagctcctgtttgcacaaaaatggagcgtggggggcaccatgtgatgacccaaatttggcaaagaccgtggactcgccttgccctttgccagatctggtctgcatctgaggtaggggtggagagaagaggacgacgctgctgctcgttatactgatggaaagtgctgctgagtgactcttgtgctctttgctgcttttccatcgccgtcgtcttcctccccagcatatggatatgagggagcatcatgaactaatggggaacgtcatttgcagattttacttgaccaaggtgatcttcggggggaacataatggcttaggttttggaccaagctacagaaaaggcttaggttttgaaccaagctacagaaaagtgaagaggaagatgaccaaataaagaccgcttgtcgacaattagagacagtggcaatggagatttctgctcatcatagatgggggtttacaaatagaattgcattgtaaccaaattatctatccctttgtttttctagttatccagtttagaggtttgtccctcccacttgtgcagaccgatgagctgatgagctgttagttctgtaataagtttggccctatcctcgctatgaggtgaaagtcggaaattttggttccattatttaaaaaaataaggatctatattatattagttattcataaaagtatctagaaacatcgatgtaattgctctgatgtctttgtcaagactcaagaatggttgaagaagcaataatagaattggccattgagtttttgcttcctcttgtgtaccctttcccttcatttgttgattaatgatcaataaaactgaa

SEQ ID NO: 221188 - DNA, 2065 bp, Zea Mays
gacaaatcctgctcttaaacccctagactgctgacatttttatcccttgctatttcgtcatcaagcacgcccgcccgcagctcgcatcgtctaccctgcgcggctgcgcctagggtttaaccactcacagcagccgccgtgactctcgaaccatgtcagcgccgccgtcgctcaagcccccagcaacctccgcagcggcctatccgcgggcgtccgccgccccgagagccaccgggattcgcggcgcctgtgctcttccaactcggcgcctccaatgctcagcctccgccgccgtcgccggagcttccactgagatggctgatgccccgctggactgggctggaaggtcgctggaggagttgcgcagcttgccggaccacgacacgttctgcctgatggcgctctcgccgctggacgggcggtacgaccgcttcgttaaagagctgatgcctttcttcagcgagttcggcctaatcagataccgcgttctcatcgagatcaagtggttattgaaactttctcaaattcctgagatcactgaggtgcctcagttcagcaaggaagcccaagccttcttgattgctattattgagaatttttgcattgatgatgcaaaagaaataaagaaaatcgagaaagtaaccaaccatgatgtgaaagccgtcgagtactttctgaagcaaaggtgcagctccaatccagagattgctaaggtgtcggagttcttccattttggctgtacctctgaagatatcaacaatttgtcacatgcattggctctgaaagagggggtaaatagagttatgttccctgccatgattgacatatgcacagcattatgttccttggcgacacaaaattcaggctaccctatgttggctcgaactcatgggcagcatcaccaacaactgtgggaaaggagatggcaaacttcgcggccagattatctgatataggaaagagtttctcagaggtgaagatactagggaaatttgctggcgctgttggcaattacaatgctgatgtggttgcatatcctgaagttgactggcctaaggtggcagaagagtttgttaggtccttgggtttgcagcttaatccctatgttactcagatcgagcctcatgattacatatcaaagctcttcaatctattcacccagttcaacaatgtgttgactgattttgatagagacatgtggtcctatatatcattaggctacttcaagcagataccaaaggctggtgaagttggttcttccaccatgcctcataaaatcaaccccattgattttgaaaatagtgatggtaatttatgtctggcgaattctgtattatctggtataagcatgaaactgccaatatcccggatgcagcgtgacctgacagactcaactgttttgagaaacttgggtatgggattgggtcattctctattggcttacaaggccaccatacgtggaatcagcaaggttcaggtgaatgaagcgcgtttagctgaagacttggagcaaacttgggaggtccttgctgagccaatacagacagtgatgcgaagatatggaatacctgaaccttatgagaagctgaaggaacttacgagaggccaagctgtcaccaaggacagcatgcagcaattcattgatggtctagacataccgggggaggttcgagcaaaactttcgaagctaacccctcattcttatactgggctagcggaggatttggcaagatacatcgagaagtgggttgatcttgaatctggatttcaaatcaagtgaccttcctttttaaaaggataatcttctccacatttttttctttttgacaacgacggagaaaaaaaataacagacgggtgcgtcgtggcctctaattgtcgaccaagatgatttacgtggttctcattaatgatatttttggcacatgtaaaatgcgcctcaaggaattatgctaactgtatgttggaggtaatttaacgagctaaaaaagttgcttgctgggtttcttatgagtacggagttgttttgcaacgcctagtgcgagaagctaaaaaaatgctttgtg

SEQ ID NO: 221189 - DNA, 2513 bp, Zea Mays
cggggacgctctccattcttcttcccctcctcctccacacgtccaaaagcctcgtccttcccacttcctacccatcatatctccatccgcggttccgcccagctgctccacatctcaattctcaccacacacacgcacacacactatcgtccagcaagctcgctgttgcttgccacccaccgcctcagctcgatcgcaacgcgcttggcatggcgtccgaggtgtggctatcgccggcgtctcgcctcccatccctctccaacgcaccacctcgcttacgctccaagcctgccaccacaaccgcctctttgctctctccctgtccccgccctgcccgcgccctgcctgtgctgcgtgtccgtcgccgccgccgacttcgcgccaccgagcagcaaggccaggttcaggagcaagatgacgaggtggtggacaggaacatcctcccctactgcagcatcgacaggaagcagaagaagacgctgggagagatggagcaggagttcctgcaagccctccaggccttctactatgaccagaaggccatcatgtccaacgaggagttcgacaacctcaaggaggagctcatgtgggaggggagcagcgtcgtcatgctaaacgaagatgagcaaaagcttttggaagcttccttggcctatacctccggcaacccaatcatgtctgatgctgagttcgacgaactgaaacttagattaaagacagacggcagtgtcattgtgaaggagggtcccaggtgcagcctaaggactcataaggtgtacagtgacttgaatgttgactacctaaagatgttcctcctaaatgttccagccaccaccgtagctctgggactgttctttttcattgatgaattgactggttttgagatcaatgtgttccagctgccagagcctttcggattcattttcacatggtttgctgctttgcccctaatattgttcttagcgcagtcattgactaaggctatagtccaggattttttaatccttaaggggccatgtcctaattgtggtactgaaaacctttccttctttgggactatactgtcagtctccagtggcggtacaacaaacaaagtgaaatgtgcaaattgcagtaccgagctggaatatgactcaaaatctcgggtgatcacacttccagaagcatcaaatgcataaacataggtgactctacatttacgccagtaactataaatggatgctctttggtctatattccaaatgtgggagacatcacaccagctttgaagtattgcccgtctccattgtgaacactctgcagcatatgtagcagataaatgagtgaaactatttgtactgcctgctctgcaaattagtatgaacacccctcaaaaagatttggcccacactctggtctctctgtttgcagctgggtatgaaaaaaatgcacaatcttataccattgatgtttagctgttgctttgtagtcaatccagtaaataggctgtgggcatgtacaaatagagttacctgttaatttgttgttcctaaaatgtatgatacatagactgcatttcagttgggacatataacaccaaagcaatcacaatgaagtgtctgttatatactatggtgctaaagagcccacctatgttaaagcgaacttctgatctaataatataaaattaaaatgtggtcaagcgcatgcaagatgtactttgtgcagtctgacgatataaaaatctgtcattttattttgatttcttcttttcaggaacagggagctccagagcttgtgaattctatagaataaaggtggttgtccgcacagtatagcaaactgcgaagcctgcaactactagagtttggtctgtagcaggctcagttgggaatgtgtagcagagcatgatccatggtgtggatgaattgcagagtactgtgctgtgtgtgtaggaaggaaaagctgccgcctgccgattgtgcagtcagtctagtacgttgttatgtttgcaaggcccaagtctactgaacggccacggccaggctgactgatgacctgaagcccggcccacggcccacggcccacagcccaactggttgcacatactgcgagagaatttctctcaaccaagcgtctgcatcttccttctctagcttgtgtcatggagtatatgcatatgcatccctgacctctttcatgcatgcatgtttaaatgactttgttcctcaagcaacctgcaagcagaattaataccattccaaatcgatcgatgagcagaatcagaattagcgagcattttgcattgctccaccaaacaaaaaaattcggccacctcaatgcactagtaggaaacggagttagtcctgattgagaacccgaactacggattcaggactaaagagcactttagaggctttttttattttttgcacaagtttctctccacccttgtgattcctgggactcaaactcatgagcattgtcttgtatatgggattagatgatgctctggaccgatctattagatctac

SEQ ID NO: 221190 - DNA, 1952 bp, Zea Mays
ttgctctctccctgcccccgcccccgccctgcctgtgttgcgcgtccgccgccgccgccgacttcgtgccaccgagcagcaaggccaggttcaggagcaagatgacgaggtggtggacaggaacatcctcccctactgcagcatcgacaggaagcagaagaagacgctgggagagatggagcaggagttcctgcaagccctccaggccttctactatgaccagaaggccatcatgtccaacgaggagttcgacaacctcaaggaggagctcatgtgggaggggagcagcgtcgtcatgctaaacgaagatgagcaaaagcttttggaagcttccttggcctatacctccggcaacccaatcatgtctgatgctgagttcgacgaactgaaacttagattaaagacagacggcagtgtcattgtgaaggagggtcccaggtgcagcctaaggactcataaggtgtacagtgacttgaatgttgactacctaaagatgttcctcctaaatgttccagccaccaccgtagctctgggactgttctttttcattgatgaattgactggttttgagatcaatgtgttccagctgccagagcctttcggattcattttcacatggtttgctgctttgcccctaatattgttcttagcgcagtcattgactaaggctatagtccaggattttttaatccttaaggggccatgtcctaattgtggtactgaaaacctttccttctttgggactatactgtcagtctccagtggcggtacaacaaacaaagtgaaatgtgcaaattgcagtaccgagctggaatatgactcaaaatctcgggtgatcacacttccagaagcatcaaatgcataaacataggtgactctacatttacgccagtaactataaatggatgctctttggtctatattccaaatgtgggagacatcacaccagctttgaagtattgcccgtctccattgtgaacactctgcagcatatgtagcagataaatgagtgaaactatttgtactgcctgctctgcaaattagtatgaacacccctcaaaaagatttggcccacactctggtctctctgtttgcagctgggaacagggagctccagagcttgtgaattctatagaataaaggtggttgtccgcacagtatagcaaactgcgaagcctgcaactactagagtttggtctgtagcaggctcagttgggaatgtgtagcagagcatgatccatggtgtggatgaattgcagagtactgtgctgtgtgtgtaggaaggaaaagctgccgcctgccgattgtgcagtcagtctagtacgttggtatgcgaccatctcaagtctgggctttgattttaagcaatgatttttggcaatgaatgaacaagctatctactgtacactgtttttgtacagttatgtttgcaaggcccaagtctactgaacggccacggccaggctgactgatgacctgaagcccggcccacggcccacggcccacagcccaactggttgcacatactgcgagagaatttctctcaaccaagcgtctgcatcttccttctctagcttgtgtcatggagtatatgcatatgcatccctgacctctttcatgcatgcatgtttaaatgactttgttcctcaagcaacctgcaagcagaattaataccattccaaatcgatcgatgagcagaatcagaattagcgagcattttgcattgctccaccaaacaaaaaaattcggccacctcaatgcactagtaggaaacggagttagtcctgattgagaacccgaactacggattcaggactaaagagcactttagaggctttttttattttttgcacaagtttctctccacccttgtgattcctgggactcaaactcatgagcattgtcttgtatatgggattagatgatgctctggaccgatctattagatctac

SEQ ID NO: 221191 - DNA, 1816 bp, Zea Mays
atggccgcctcttccattcctccttgccaggttcaggagcaagatgacgaggtggtggacaggaacatcctcccctactgcagcatcgacaggaagcagaagaagacgctgggagagatggagcaggagttcctgcaagccctccaggccttctactatgaccagaaggccatcatgtccaacgaggagtttgacaacctcaaggaggagctcatgtgggaggggagcagcgtcgtcattgctaaacagacgaacagtgtcattgtgaaggagggtcccaggtgcagtctaaggagtcataaggtgtacagtgacttgaatgttgactacataaagatgtttctgctaaatgttccagccaccaccgtagctctgggactgttctttttcattgatgaattgactggttttgagatcaatgtgttccaggtcagtgtccacctgattcaactgccagagcctttcggattcattttcacatggtttgctgctttgcccctaatattgttcttagcacagtcattgactaaggctatagtccaggactttttaatcctcaaggggccatgtcctaattgtggtactgaaaacctttccttctttgggactatactgtcagtctccagtggcggtacaacaaacaaagtgaaatgtgcaaattgcagtaccgagctggaatatgactcaaaatctcgggtgatcacacttccagaagcatcaaatgcataaacataggtgactctacatttacgccagtaactataaatggatgctctttggtctatattccaaatgtgggagacatcacaccagctttgaagtattgcccgtctccattgtgaacactctgcagcatatgtagcagataaatgagtgaaactatttgtactgcctgctctgcaaattagtatgaacacccctcaaaaagatttggcccacactctggtctctctgtttgcagctgggaacagggagctccagagcttgtgaattctatagaataaaggtggttgtccgcacagtatagcaaactgcgaagcctgcaactactagagtttggtctgtagcaggctcagttgggaatgtgtagcagagcatgatccatggtgtggatgaattgcagagtactgtgctgtgtgtgtaggaaggaaaagctgccgcctgccgattgtgcagtcagtctagtacgttggtatgcgaccatctcaagtctgggctttgattttaagcaatgatttttggcaatgaatgaacaagctatctactgtacactgtttttgtacagttatgtttgcaaggcccaagtctactgaacggccacggccaggctgactgatgacctgaagcccggcccacggcccacggcccacagcccaactggttgcacatactgcgagagaatttctctcaaccaagcgtctgcatcttccttctctagcttgtgtcatggagtatatgcatatgcatccctgacctctttcatgcatgcatgtttaaatgactttgttcctcaagcaacctgcaagcagaattaataccattccaaatcgatcgatgagcagaatcagaattagcgagcattttgcattgctccaccaaacaaaaaaattcggccacctcaatgcactagtaggaaacggagttagtcctgattgagaacccgaactacggattcaggactaaagagcactttagaggctttttttattttttgcacaagtttctctccacccttgtgattcctgggactcaaactcatgagcattgtcttgtatatgggattagatgatgctctggaccgatctattagatctac

SEQ ID NO: 221192 - DNA, 1921 bp, Zea Mays
atggccgcctcttccattcctccttgccaggttcaggagcaagatgacgaggtggtggacaggaacatcctcccctactgcagcatcgacaggaagcagaagaagacgctgggagagaggaagcagaagaagacgctgggagagatggagcaggagttcctgcaagccctccaggccttctactatgaccagaaggccatcatgtccaacgaggagttcgacaacctcaaggaggagctcatgtgggaggggagcagcgtcgtcatgctaaacgaagatgagcaaaagcttttggaagcttccttggcctatacctccggcaacccaatcatgtctgatgctgagttcgacgaactgaaacttagattaaagacagacggcagtgtcattgtgaaggagggtcccaggtgcagcctaaggactcataaggtgtacagtgacttgaatgttgactacctaaagatgttcctcctaaatgttccagccaccaccgtagctctgggactgttctttttcattgatgaattgactggttttgagatcaatgtgttccagctgccagagcctttcggattcattttcacatggtttgctgctttgcccctaatattgttcttagcgcagtcattgactaaggctatagtccaggattttttaatccttaaggggccatgtcctaattgtggtactgaaaacctttccttctttgggactatactgtcagtctccagtggcggtacaacaaacaaagtgaaatgtgcaaattgcagtaccgagctggaatatgactcaaaatctcgggtgatcacacttccagaagcatcaaatgcataaacataggtgactctacatttacgccagtaactataaatggatgctctttggtctatattccaaatgtgggagacatcacaccagctttgaagtattgcccgtctccattgtgaacactctgcagcatatgtagcagataaatgagtgaaactatttgtactgcctgctctgcaaattagtatgaacacccctcaaaaagatttggcccacactctggtctctctgtttgcagctgggaacagggagctccagagcttgtgaattctatagaataaaggtggttgtccgcacagtatagcaaactgcgaagcctgcaactactagagtttggtctgtagcaggctcagttgggaatgtgtagcagagcatgatccatggtgtggatgaattgcagagtactgtgctgtgtgtgtaggaaggaaaagctgccgcctgccgattgtgcagtcagtctagtacgttggtatgcgaccatctcaagtctgggctttgattttaagcaatgatttttggcaatgaatgaacaagctatctactgtacactgtttttgtacagttatgtttgcaaggcccaagtctactgaacggccacggccaggctgactgatgacctgaagcccggcccacggcccacggcccacagcccaactggttgcacatactgcgagagaatttctctcaaccaagcgtctgcatcttccttctctagcttgtgtcatggagtatatgcatatgcatccctgacctctttcatgcatgcatgtttaaatgactttgttcctcaagcaacctgcaagcagaattaataccattccaaatcgatcgatgagcagaatcagaattagcgagcattttgcattgctccaccaaacaaaaaaattcggccacctcaatgcactagtaggaaacggagttagtcctgattgagaacccgaactacggattcaggactaaagagcactttagaggctttttttattttttgcacaagtttctctccacccttgtgattcctgggactcaaactcatgagcattgtcttgtatatgggattagatgatgctctggaccgatctattagatctac

SEQ ID NO: 221193 - DNA, 1492 bp, Zea Mays
agtactagagggcccacccctacccctgcccccaaatcgccaaatcctccccaccaccgcacgctggtcctgcccgtctcccgcccccgccggccgccggcgactggccgccgccatgggctccgaccgcgccgagctcgcgcgcctctgcagcgcccgcaactggtccaaggccatccgcctcctcgactccatcctggcccgatccccctcctccatccacgacctctgcaaccgggccttctgctactcccagctcgagctccacaagcacgtcgtcaaggattgcgaccgcgcactgctgctcgaccccgccctgctgcaggcctacatcctcaaaggcaaggcactgtcttcattagataaaaaagaggatgctctagctgcttggaagcaaggatatgaaattgctgtccgtgacacaacagacttgaaacaattgcttgatctggaagaattggtttcttctgttaaaatttgcgggacaacccagtctgcggaccatgtcatggatgcatcaacttgtgataccaaagttgttatctcagaagatcgtgttgctgacacgtcgttcgctgcaactacaatggctgatacaaaaactgttgtctgtgaagaggccattggcagttccaaagtttcatcaaatggtgataccaagttgacgaattataataaaaaagcggaccataataaagtctctagcagttcagtgaaagacatcacagggactcaagctcccaagaaggcaccgaagctagataagaaaaacaaagcaaaagctgtgaaagaaataaatggccgagctgaaggtgtaactggcagagctagtactgatgaaagtgaaactatttcactggatcaagcactctttgctacaaaaatttcaaagtcatcaaaatctataagcttggatttccgactttcaagaggcattgcacaggtaaatgaaggaagatatgaccaggcgatatccatttttgatcagatattgcgggaaactcctacgtatcctgaagcactgattggaaggggcacagcttatgcatttcaaagagaattggattctgctatttctgatttcaccaaggctatacaatctagcccatcggctggggaggcatggaagcgacggggacaagctcgtgctgctttaggagagttcaaggaggccattgaagacttgactaaagcattggaatttgaaccaaattctcctgatattttacatgaaagaggaattgtgaacttcaaattcaaggactacaactctgcactcgaagatctttcgacatgtgtgaagcatgacaagaagaacagctccgctcacacttatttaggtcttactctttcagcacttggagagtacaagcgtgctgaagatgagcatgtcattggtttaaagtatgacgagagtttccttgactgttgggctcaccttgcccagggtaacaactcggcacggagatctgcgggatcgagctcagcgtca

SEQ ID NO: 221194 - DNA, 1770 bp, Zea Mays
ataactgcatgaagatcccgctaggaggtttcccttcacaatgctagtactgcagaaggcagtaagaatggtacgggaacttcctgatgttatgagaattgcttatgcatttgtgctagtcatgctttgttggatggcattatggtcctttggaatttctggcattgttgcctttggcataccaaatggtgggcaatggtggcttcttttgattttttcagtcagtttattttggactggagctgttcttagcaatacagtccatgtcattgtctcagggatggttttcctcgttctcattcatggtggtccagctgctgcaacaatgcccccaaaacctcttctgaaatctcttcagtatgctgtgacaacttcatttggaagcatttgctatggatcgctttttaccgctgctattaggactttgcgatgggagattcgtggaattcgttctaaaattggcagcaatgagtgtttgctatgttgtattgattttttgtttcatattgtggagacccttgttcgcttcttcaacaaatatgcatatgtacagatagcagttaatggacagagtttcaatcgctcagctagggatgcttgggagctgtttcaatccacaggcatcgaatcacttgttgcttatgactgttcaggtgctatccttctaatgagcaccattttaggtggattgattactggaacctgcatgggcgtttggacatatttcaaacaaagtgataaagctgttatggttggttcaacatccatgctgatgggtatgatactggttggactaactgttgtggttgtggaaagtgctgttacatcaatatacatatgctatgccgaggatccccttttgattcagagatgggatcccgaattttttgaacaaatgtcagaagcgctacaccagcggctgcagtaccgaagcgcgcgagctcgtcaaatattgaatgggcggcttgatcatttgccacatacgtccagtatttgaatgaattgcgtgccagatattgattatctctgtgaatccattgatacgtgggcagacatttacagaagatttggatctccctgccattgaaatatatagaccaaggaagatattcgaagccattgacgttccgagaactggagtgccccagcaatcttgtacgccttcaagaacaaaatgttttcaaatccaaatgaagccgtaatgtggatgctcatgcttctttggtactgcaccatcgttttttttatttgtgtaaggcttttctggtaaggtagatactattaaatccatttcgagatttgtgatgcagaatgtgtccggtttcaacatcagtgcgggttagtgtggcaatgtgataggtttttgtcttccttttgtagccttagcgctacaatacgataaactatggagaggaacagcatcatggtcgctacttggccggttgtacataacagtgttgcttagtgctcatatactaaggccctgtttcaatctcgcgagataaactttagcagcttttttttagctacttttagccgtttataatctaaacaggagagctaatggtggtaattgaagctaaactttagcacttcaattcatatagctaaagtttagcaggaagctaaagtttatcccgtgagattgaaacggggcctaactaggtggtctgactgattaaatctttcatttactccatgtaccacagaaagaatgtatttgacttttctgagatcaagtttgaccggcttgttttatttaaaaaaatt

SEQ ID NO: 221195 - DNA, 3218 bp, Zea Mays
ccgcgcgcgcatccgcatcccgcaaccgccccagccgtgtatcccgcatacgcccgcagccgccatcaacgcccgcggacccctcagcctcctccttaccgccgcgatccgccagaccaccgccccccccccgcacccgccgcagatctcgccatggcggcgcgcacgccccccaggtcgcagccccgtcaccttcctcccccaccccgaactccgtccccgccgtagatctcgccatcggtaacacacctctcgttcgcatctgacgcgagcggttgggttctcccgcgcgagcggccggcgggtgcgacagaggggtcttgtgaaggccatcggcaacacacctctcattcgcatcaacagcctctccgacgttacaggatgcgaggttcgcgcgtggactcggcgtcatctccgcgtggtcctcgccccccccccccgagacacccgctcgcaatgttcgggagtccgcgcccgccgtcgagaggagtgctgcatctgccttgcgtagtacggggagaaggaggaggttcggcagctgccgtgcacacacgtgtttcatctcaagtgcatatacagttccagctaacaagggaaatcaaggaagaattgatctttatattagcaggcggatgcaatcactaatcaaaaccacgatgcaaggtaacctaaatggattttaaattttattttggattgttaaatctttatttctgactactattgttttatgtcgtggatgccctcgtgaggttctacgccgacgccttcaggagggattcacagaggccatggtgaggatggccagcttgagtcggctcaccgggagcagcgcgagatccgctacaactaaatgataggaggtattttctagaaattacaaccccacctctgtcaggccttctgttgagtgaatttggtttgcacaccctcaccctgcacgctcttaccggactaccgctcctagcacccactcacacgagattgcaccccgctcgccatgccaccatagatccagctagggcgacatcattgtgggcaatcctgtgcgagagaatgtgaaattgttgtaggattgataatgaccaggggtttctccgcccacatgcaccaggtttcgctgccatttgcagcgactgtgttccagttcgaccgtttggggaaaaggtgagtcctcccatttcatgtagatgcatgggttgataaacatttgggagaaatgtcccctctttaattcgaaaaatagttgtgtatttgttcgacttatctgcggcgatgtacctttgtacgcgtacaaacatctatagacaaaaacaaaatgacacttcatggatgtagcaagagcgggctacgagaaactagcagatcatgcctaaaattcaattagcattagggtcagacaaaatactacattttctggattacaataatgtataggtgcatgaaaaaaacttgattccaatgtgtgacaaagtgtgaagatgaaagtgcactttcacgctgtcataacgcggatttgttttccttgctcatggaatgtgcatttgtgtgtttgcgtctactgtgcggctacaggcaaggaaacaggatctgtcacggaaggtatgtacacattacagtaaacgttgttcgtagaacatgcactttgtggagtggtctttgaatgagatgcgtttagaattaccttttcatgcagatctcttgttcagaacctggttgcttagtccattcttgttttgggttgctactacaaaaaagcggcaatgctttatatgaatcgcctcttactaatatccagggtcaaatggtggtccttcagtgaccagactaatatttgagcattaatcttatttgtttcacagtcatttcttgtttatcaatatgaatgctatttttttgcgagtggacttgttaactaataagctcatagatatttgaacaaaaaatagtgttttgttctaaaactgtcataaagagtgcatacatcatagctatggtttcaactgtgatttgatgtcctataatattgagtgtcctatagtgtgttgttctgaaacagtcacaaagagggcctaagaagctgatggaatcctcattcaccgccgctaaggagtttgagcgggatcggagaggagacgtcagttcttcctcctctgctcaatgcggccattcgccctgtcccccaaccctgaactccacactgccactccgtgctcattttttctgaaggggaaatattcatctccttgttgttttgtaccatggatactttagcatcattctcatactactaggagtgtaggtaaggagtccacacacgagtttgcaaacaccattaagcctattttgcttgattagtgccctgcaacacttcatatgttcaagacaaaatccatacccatgtctattgttgtatgatattatttgcattgaccgttgctgctcttcttgattgcagtcactaacattgcattaatctatgtgatacatttattcaggcgattcccatttctcagtgatgtcgatgtcctgtactcctgtatatttggattcaacaatatgccattagtgcattggtgccacaacactggatgagtataggaagcatatagagaaagatcctgccttggaaagaaggtttcaaccagttaaggttccagagcctactatggatgaaacaatacagatcttaagaggacttcgtgagagatatgaacttcatcacaaactgagatacacagatgatgctttaattgctgctgcacagctgtcttatcagtatatcagcgatcgttttctgcctgacaaagccattgacttgattgatgaagctggatctcgtgttaggctgaggcatgcgcagctccctgatgaagccaaagagctggacaaagagctgcggcagataagcaagcagaaaaatgaggctgtacgtggccaagattttgagaaggtatactgttgtttggcacagcggtgacaaagccgatccgctcccacctctctagcaacgtcgatatggttaataccaagcattatgttgtttccttttgagataaatattttgttactgattttaccttttgtctcctcttcttgttttttgttctagaatctgtagcaaatggctaacgatgaggatatccattactttgtttatgacaataaaactgatatgttcaagattccgtagcaacgcacgggcatctaactagtct

SEQ ID NO: 221196 - DNA, 2058 bp, Zea Mays
cgcatacgcccgcagccgccatcaacgcccgcggacccctcagcctcctccttaccgccgcgatccgccagaccaccgccccccccccgcacccgccgcagatctcgccatggcggcgcgcacgccccccaggtcgcagccccgtcaccttcctcccccaccccgaactccgtccccgccgtagatctcgccatcggtaacacacctctcgttcgcatctgacgcgagcggttgggttctcccgcgcgagcggccggcgggtgcgacagaggggtcttgtgaaggccatcggcaacacacctctcattcgcatcaacagcctctccgacgttacaggatgcgaggttcgcgcgtggactcggcgtcatctccgcgtggtcctcgccccccccccccgagacacccgctcgcaatgttcgggagtccgcgcccgccgtcgagaggagtgctgcatctgccttgcgtagtacggggagaaggaggaggttcggcagctgccgtgcacacacgtgtttcatctcaagtgcatatacaggtggctcaggatcatctcctcttgccctctctgcaagcaagagctcaagtgaactttatattcattacacacatgacattctcgcttattctttggatcaaggtgttagtatcctagacacaacagatattttccagctaacaagggaaatcaaggaagaattgatctttatattagcaggcggatgcaatcactaatcaaaaccacgatgcaaggtaacctaaatggattttaaattttattttggattgttaaatctttatttctgactactattgttttatgtcgtggatgccctcgtgaggttctacgccgacgccttcaggagggattcacagaggccatggtgaggatggccagcttgagtcggctcaccgggagcagcgcgagatccgctacaactaaatgataggaggtttcgctgccatttgcagcgactgtgttccagttcgaccgtttggggaaaaggcaaggaaacaggatctgtcacggaaggcgattcccatttctcagtgatgtcgatgtcctgtactcctgtatatttggattcaacaatatgccattagtatgctgtcaagcgtcctatttgcaagagataaatggcttacgcccgaggggcttattcttccttatcatggtcggtcgtgactttggttatccactgaaaagatatgcttggtggtgctttcttgtgttgaagaacaagtatcccacggaaccacaaccgtttgtattatctggtgatttcctacattattagctggcctaactaaaccatgcgctcagaccctaaaccagctgtaagtctgtaacttaaaagcacagtgcactagcggaatggggttccttgctttttggagcgtttccccagtcagatcggcggcagggcaggtcacgtggacggggctccttgttgctggaactaaataccgtggagagtttgaagtgagactaaagaaacttatggaggaaattaagcaaaatgaagacattattctctttattgattaagtgcacacactgattggagcagtgcattggtgccacaacactggatgagtataggaagcatatagagaaagatcctgccttggaaagaaggtttcaaccagttaaggttccagagcctactatggatgaaacaatacagatcttaagaggacttcgtgagagatatgaacttcatcacaaactgagatacacagatgatgctttaattgctgctgcacagctgtcttatcagtatatcagcgatcgttttctgcctgacaaagccattgacttgattgatgaagctggatctcgtgttaggctgaggcatgcgcagctccctgatgaagccaaagagctggacaaagagctgcggcagataagcaagcagaaaaatgaggctgtacgtggccaagattttgagaagaatctgtagcaaatggctaacgatgaggatatccattactttgtttatgacaataaaactgatatgttcaagattccgtagcaacgcacgggcatctaactagtct

SEQ ID NO: 221197 - DNA, 1652 bp, Zea Mays
cgcatacgcccgcagccgccatcaacgcccgcggacccctcagcctcctccttaccgccgcgatccgccagaccaccgccccccccccgcacccgccgcagatctcgccatggcggcgcgcacgccccccaggtcgcagccccgtcaccttcctcccccaccccgaactccgtccccgccgtagatctcgccatcggtaacacacctctcgttcgcatctgacgcgagcggttgggttctcccgcgcgagcggccggcgggtgcgacagaggggtcttgtgaaggccatcggcaacacacctctcattcgcatcaacagcctctccgacgttacaggatgcgaggttcgcgcgtggactcggcgtcatctccgcgtggtcctcgccccccccccccgagacacccgctcgcaatgttcgggagtccgcgcccgccgtcgagaggagtgctgcatctgccttgcgtagtacggggagaaggaggaggttcggcagctgccgtgcacacacgtgtttcatctcaagtgcatatacaggtggctcaggatcatctcctcttgccctctctgcaagcaagagctcaagtgaactttatattcattacacacatgacattctcgcttattctttggatcaaggtgttagtatcctagacacaacagatattttccagctaacaagggaaatcaaggaagaattgatctttatattagcaggcggatgcaatcactaatcaaaaccacgatgcaaggttctacgccgacgccttcaggagggattcacagaggccatggtgaggatggccagcttgagtcggctcaccgggagcagcgcgagatccgctacaactaaatgataggaggcgattcccatttctcagtgatgtcgatgtcctgtactcctgtatatttggattcaacaatatgccattagtatgctgtcaagcgtcctatttgcaagagataaatggcttacgcccgaggggcttattcttccttatcatgtgcattggtgccacaacactggatgagtataggaagcatatagagaaagatcctgccttggaaagaaggtttcaaccagttaaggttccagagcctactatggatgaaacaatacagatcttaagaggacttcgtgagagatatgaacttcatcacaaactgagatacacagatgatgctttaattgctgctgcacagctgtcttatcagtatatcagcgatcgttttctgcctgacaaagccattgacttgattgatgaagctggatctcgtgttaggctgaggcatgcgcagctccctgatgaagccaaagagctggacaaagagctgcggcagataagcaagcagaaaaatgaggctgtacgtggccaagattttgagaaggtatactgttgtttggcacagcggtgacaaagccgatccgctcccacctctctagcaacgtcgatatggttaataccaagcattatgttgtttccttttgagataaatattttgttactgattttaccttttgtctcctcttcttgttttttgttctagaatctgtagcaaatggctaacgatgaggatatccattactttgtttatgacaataaaactgatatgttcaagattccgtagcaacgcacgggcatctaactagtct

SEQ ID NO: 221198 - DNA, 2527 bp, Zea Mays
cgcatacgcccgcagccgccatcaacgcccgcggacccctcagcctcctccttaccgccgcgatccgccagaccaccgccccccccccgcacccgccgcagatctcgccatggcggcgcgcacgccccccaggtcgcagccccgtcaccttcctcccccaccccgaactccgtccccgccgtagatctcgccatcggtaacacacctctcgttcgcatctgacgcgagcggttgggttctcccgcgcgagcggccggcgggtgcgacagaggggtcttgtgaaggccatcggcaacacacctctcattcgcatcaacagcctctccgacgttacaggatgcgaggttcgcgcgtggactcggcgtcatctccgcgtggtcctcgccccccccccccgagacacccgctcgcaatgttcgggagtccgcgcccgccgtcgagaggagtgctgcatctgccttgcgtagtacggggagaaggaggaggttcggcagctgccgtgcacacacgtgtttcatctcaagtgcatatacaggtggctcaggatcatctcctcttgccctctctgcaagcaagagctcaagtgaactttatattcattacacacatgacattctcgcttattctttggatcaaggtgttagtatcctagacacaacagatattttccagctaacaagggaaatcaaggaagaattgatctttatattagcaggcggatgcaatcactaatcaaaaccacgatgcaaggtaacctaaatggattttaaattttattttggattgttaaatctttatttctgactactattgttttatgtcgtggatgccctcgtgaggttctacgccgacgccttcaggagggattcacagaggccatggtgaggatggccagcttgagtcggctcaccgggagcagcgcgagatccgctacaactaaatgataggaggtttcgctgccatttgcagcgactgtgttccagttcgaccgtttggggaaaaggcaaggaaacaggatctgtcacggaagtgtgttgttctgaaacagtcacaaagagggcctaagaagctgatggaatcctcattcaccgccgctaaggagtttgagcgggatcggagaggagacgtcagttcttcctcctctgctcaatgcggccattcgccctgtcccccaaccctgaactccacactgccactccgtgctcattttttctgaaggggaaatattcatctccttgttgttttgtaccatggatactttagcatcattctcatactactaggagtgtaggtaaggagtccacacacgagtttgcaaacaccattaagcctattttgcttgattagtgccctgcaacacttcatatgttcaagacaaaatccatacccatgtctattgttgtatgatattatttgcattgaccgttgctgctcttcttgattgcagtcactaacattgcattaatctatgtgatacatttattcaggcgattcccatttctcagtgatgtcgatgtcctgtactcctgtatatttggattcaacaatatgccattagtatgctgtcaagcgtcctatttgcaagagataaatggcttacgcccgaggggcttattcttccttatcatggtcggtcgtgactttggttatccactgaaaagatatgcttggtggtgctttcttgtgttgaagaacaagtatcccacggaaccacaaccgtttgtattatctggtgatttcctacattattagctggcctaactaaaccatgcgctcagaccctaaaccagctgtaagtctgtaacttaaaagcacagtgcactagcggaatggggttccttgctttttggagcgtttccccagtcagatcggcggcagggcaggtcacgtggacggggctccttgttgctggaactaaataccgtggagagtttgaagtgagactaaagaaacttatggaggaaattaagcaaaatgaagacattattctctttattgattaagtgcacacactgattggagcaggtgcagcagaagtgcattggtgccacaacactggatgagtataggaagcatatagagaaagatcctgccttggaaagaaggtttcaaccagttaaggttccagagcctactatggatgaaacaatacagatcttaagaggacttcgtgagagatatgaacttcatcacaaactgagatacacagatgatgctttaattgctgctgcacagctgtcttatcagtatatcagcgatcgttttctgcctgacaaagccattgacttgattgatgaagctggatctcgtgttaggctgaggcatgcgcagctccctgatgaagccaaagagctggacaaagagctgcggcagataagcaagcagaaaaatgaggctgtacgtggccaagattttgagaagaatctgtagcaaatggctaacgatgaggatatccattactttgtttatgacaataaaactgatatgttcaagattccgtagcaacgcacgggcatctaactagtct

SEQ ID NO: 221199 - DNA, 2278 bp, Zea Mays
cgcatacgcccgcagccgccatcaacgcccgcggacccctcagcctcctccttaccgccgcgatccgccagaccaccgccccccccccgcacccgccgcagatctcgccatggcggcgcgcacgccccccaggtcgcagccccgtcaccttcctcccccaccccgaactccgtccccgccgtagatctcgccatcggtaacacacctctcgttcgcatctgacgcgagcggttgggttctcccgcgcgagcggccggcgggtgcgacagaggggtcttgtgaaggccatcggcaacacacctctcattcgcatcaacagcctctccgacgttacaggatgcgaggttcgcgcgtggactcggcgtcatctccgcgtggtcctcgccccccccccccgagacacccgctcgcaatgttcgggagtccgcgcccgccgtcgagaggagtgctgcatctgccttgcgtagtacggggagaaggaggaggttcggcagctgccgtgcacacacgtgtttcatctcaagtgcatatacaggtggctcaggatcatctcctcttgccctctctgcaagcaagagctcaagtgaactttatattcattacacacatgacattctcgcttattctttggatcaaggtgttagtatcctagacacaacagatattttccagctaacaagggaaatcaaggaagaattgatctttatattagcaggcggatgcaatcactaatcaaaaccacgatgcaaggtaacctaaatggattttaaattttattttggattgttaaatctttatttctgactactattgttttatgtcgtggatgccctcgtgaggttctacgccgacgccttcaggagggattcacagaggccatggtgaggatggccagcttgagtcggctcaccgggagcagcgcgagatccgctacaactaaatgataggaggtttcgctgccatttgcagcgactgtgttccagttcgaccgtttggggaaaaggcaaggaaacaggatctgtcacggaagtgtgttgttctgaaacagtcacaaagagggcctaagaagctgatggaatcctcattcaccgccgctaaggagtttgagcgggatcggagaggagacgtcagttcttcctcctctgctcaatgcggccattcgccctgtcccccaaccctgaactccacactgccactccgtgctcattttttctgaaggggaaatattcatctccttgttgttttgtaccatggatactttagcatcattctcatactactaggagtgtaggtaaggagtccacacacgagtttgcaaacaccattaagcctattttgcttgattagtgccctgcaacacttcatatgttcaagacaaaatccatacccatgtctattgttgtatgatattatttgcattgaccgttgctgctcttcttgattgcagtcactaacattgcattaatctatgtgatacatttattcaggcgattcccatttctcagtgatgtcgatgtcctgtactcctgtatatttggattcaacaatatgccattagtatgctgtcaagcgtcctatttgcaagagataaatggcttacgcccgaggggcttattcttccttatcatgtgcattggtgccacaacactggatgagtataggaagcatatagagaaagatcctgccttggaaagaaggtttcaaccagttaaggttccagagcctactatggatgaaacaatacagatcttaagaggacttcgtgagagatatgaacttcatcacaaactgagatacacagatgatgctttaattgctgctgcacagctgtcttatcagtatatcagcgatcgttttctgcctgacaaagccattgacttgattgatgaagctggatctcgtgttaggctgaggcatgcgcagctccctgatgaagccaaagagctggacaaagagctgcggcagataagcaagcagaaaaatgaggctgtacgtggccaagattttgagaaggtatactgttgtttggcacagcggtgacaaagccgatccgctcccacctctctagcaacgtcgatatggttaataccaagcattatgttgtttccttttgagataaatattttgttactgattttaccttttgtctcctcttcttgttttttgttctagaatctgtagcaaatggctaacgatgaggatatccattactttgtttatgacaataaaactgatatgttcaagattccgtagcaacgcacgggcatctaactagtct

SEQ ID NO: 221200 - DNA, 3683 bp, Zea Mays
cgcatacgcccgcagccgccatcaacgcccgcggacccctcagcctcctccttaccgccgcgatccgccagaccaccgccccccccccgcacccgccgcagatctcgccatggcggcgcgcacgccccccaggtcgcagccccgtcaccttcctcccccaccccgaactccgtccccgccgtagatctcgccatcggtaacacacctctcgttcgcatctgacgcgagcggttgggttctcccgcgcgagcggccggcgggtgcgacagaggggtcttgtgaaggccatcggcaacacacctctcattcgcatcaacagcctctccgacgttacaggatgcgaggttcgcgcgtggactcggcgtcatctccgcgtggtcctcgccccccccccccgagacacccgctcgcaatgttcgggagtccgcgcccgccgtcgagaggagtgctgcatctgccttgcgtagtacggggagaaggaggaggttcggcagctgccgtgcacacacgtgtttcatctcaagtgcatatacaggtggctcaggatcatctcctcttgccctctctgcaagcaagagctcaagtgaactttatattcattacacacatgacattctcgcttattctttggatcaaggtgttagtatcctagacacaacagatattttccagctaacaagggaaatcaaggaagaattgatctttatattagcaggcggatgcaatcactaatcaaaaccacgatgcaaggtaacctaaatggattttaaattttattttggattgttaaatctttatttctgactactattgttttatgtcgtggatgccctcgtgaggttctacgccgacgccttcaggagggattcacagaggccatggtgaggatggccagcttgagtcggctcaccgggagcagcgcgagatccgctacaactaaatgataggaggtattttctagaaattacaaccccacctctgtcaggccttctgttgagtgaatttggtttgcacaccctcaccctgcacgctcttaccggactaccgctcctagcacccactcacacgagattgcaccccgctcgccatgccaccatagatccagctagggcgacatcattgtgggcaatcctgtgcgagagaatgtgaaattgttgtaggattgataatgaccaggggtttctccgcccacatgcaccaggtttcgctgccatttgcagcgactgtgttccagttcgaccgtttggggaaaaggtgagtcctcccatttcatgtagatgcatgggttgataaacatttgggagaaatgtcccctctttaattcgaaaaatagttgtgtatttgttcgacttatctgcggcgatgtacctttgtacgcgtacaaacatctatagacaaaaacaaaatgacacttcatggatgtagcaagagcgggctacgagaaactagcagatcatgcctaaaattcaattagcattagggtcagacaaaatactacattttctggattacaataatgtataggtgcatgaaaaaaacttgattccaatgtgtgacaaagtgtgaagatgaaagtgcactttcacgctgtcataacgcggatttgttttccttgctcatggaatgtgcatttgtgtgtttgcgtctactgtgcggctacaggcaaggaaacaggatctgtcacggaaggtatgtacacattacagtaaacgttgttcgtagaacatgcactttgtggagtggtctttgaatgagatgcgtttagaattaccttttcatgcagatctcttgttcagaacctggttgcttagtccattcttgttttgggttgctactacaaaaaagcggcaatgctttatatgaatcgcctcttactaatatccagggtcaaatggtggtccttcagtgaccagactaatatttgagcattaatcttatttgtttcacagtcatttcttgtttatcaatatgaatgctatttttttgcgagtggacttgttaactaataagctcatagatatttgaacaaaaaatagtgttttgttctaaaactgtcataaagagtgcatacatcatagctatggtttcaactgtgatttgatgtcctataatattgagtgtcctatagtgtgttgttctgaaacagtcacaaagagggcctaagaagctgatggaatcctcattcaccgccgctaaggagtttgagcgggatcggagaggagacgtcagttcttcctcctctgctcaatgcggccattcgccctgtcccccaaccctgaactccacactgccactccgtgctcattttttctgaaggggaaatattcatctccttgttgttttgtaccatggatactttagcatcattctcatactactaggagtgtaggcgattcccatttctcagtgatgtcgatgtcctgtactcctgtatatttggattcaacaatatgccattagtatgctgtcaagcgtcctatttgcaagagataaatggcttacgcccgaggggcttattcttccttatcatgcgttttcaggtcggtcgtgactttggttatccactgaaaagatatgcttggtggtgctttcttgtgttgaagaacaagtatcccacggaaccacaaccgtttgtattatctggtgatttcctacattattagctggcctaactaaaccatgcgctcagaccctaaaccagctgtaagtctgtaacttaaaagcacagtgcactagcggaatggggttccttgctttttggagcgtttccccagtcagatcggcggcagggcaggtcacgtggacggggctccttgttgctggaactaaataccgtggagagtttgaagtgagactaaagaaacttatggaggaaattaagcaaaatgaagacattattctctttattgattaagtgcacacactgattggagcaggtgcagcagaaggtgtaattgatgctgctaatattttgaagccagcattttgtaattttcccaaaataaccacattgctggtgattttatctgtgtagtgcattggtgccacaacactggatgagtataggaagcatatagagaaagatcctgccttggaaagaaggtttcaaccagttaaggttccagagcctactatggatgaaacaatacagatcttaagaggacttcgtgagagatatgaacttcatcacaaactgagatacacagatgatgctttaattgctgctgcacagctgtcttatcagtatatcagcgatcgttttctgcctgacaaagccattgacttgattgatgaagctggatctcgtgttaggctgaggcatgcgcagctccctgatgaagccaaagagctggacaaagagctgcggcagataagcaagcagaaaaatgaggctgtacgtggccaagattttgagaaggtatactgttgtttggcacagcggtgacaaagccgatccgctcccacctctctagcaacgtcgatatggttaataccaagcattatgttgtttccttttgagataaatattttgttactgattttaccttttgtctcctcttcttgttttttgttctagaatctgtagcaaatggctaacgatgaggatatccattactttgtttatgacaataaaactgatatgttcaagattccgtagcaacgcacgggcatctaactagtct

SEQ ID NO: 221201 - DNA, 2480 bp, Zea Mays
cgcatacgcccgcagccgccatcaacgcccgcggacccctcagcctcctccttaccgccgcgatccgccagaccaccgccccccccccgcacccgccgcagatctcgccatggcggcgcgcacgccccccaggtcgcagccccgtcaccttcctcccccaccccgaactccgtccccgccgtagatctcgccatcggtaacacacctctcgttcgcatctgacgcgagcggttgggttctcccgcgcgagcggccggcgggtgcgacagaggggtcttgtgaaggccatcggcaacacacctctcattcgcatcaacagcctctccgacgttacaggatgcgaggttcgcgcgtggactcggcgtcatctccgcgtggtcctcgccccccccccccgagacacccgctcgcaatgttcgggagtccgcgcccgccgtcgagaggagtgctgcatctgccttgcgtagtacggggagaaggaggaggttcggcagctgccgtgcacacacgtgtttcatctcaagtgcatatacaggtggctcaggatcatctcctcttgccctctctgcaagcaagagctcaagtgaactttatattcattacacacatgacattctcgcttattctttggatcaaggtgttagtatcctagacacaacagatattttccagctaacaagggaaatcaaggaagaattgatctttatattagcaggcggatgcaatcactaatcaaaaccacgatgcaaggtaacctaaatggattttaaattttattttggattgttaaatctttatttctgactactattgttttatgtcgtggatgccctcgtgaggttctacgccgacgccttcaggagggattcacagaggccatggtgaggatggccagcttgagtcggctcaccgggagcagcgcgagatccgctacaactaaatgataggaggtattttctagaaattacaaccccacctctgtcaggccttctgttgagtgaatttggtttgcacaccctcaccctgcacgctcttaccggactaccgctcctagcacccactcacacgagattgcaccccgctcgccatgccaccatagatccagctagggcgacatcattgtgggcaatcctgtgcgagagaatgtgaaattgttgtaggattgataatgaccaggggtttctccgcccacatgcaccaggtttcgctgccatttgcagcgactgtgttccagttcgaccgtttggggaaaaggtgagtcctcccatttcatgtagatgcatgggttgataaacatttgggagaaatgtcccctctttaattcgaaaaatagttgtgtatttgttcgacttatctgcggcgatgtacctttgtacgcgtacaaacatctatagacaaaaacaaaatgacacttcatggatgtagcaagagcgggctacgagaaactagcagatcatgcctaaaattcaattagcattagggtcagacaaaatactacattttctggattacaataatgtataggtgcatgaaaaaaacttgattccaatgtgtgacaaagtgtgaagatgaaagtgcactttcacgctgtcataacgcggatttgttttccttgctcatggaatgtgcatttgtgtgtttgcgtctactgtgcggctacaggcaaggaaacaggatctgtcacggaaggcgattcccatttctcagtgatgtcgatgtcctgtactcctgtatatttggattcaacaatatgccattagtatgctgtcaagcgtcctatttgcaagagataaatggcttacgcccgaggggcttattcttccttatcatgtgcattggtgccacaacactggatgagtataggaagcatatagagaaagatcctgccttggaaagaaggtttcaaccagttaaggttccagagcctactatggatgaaacaatacagatcttaagaggacttcgtgagagatatgaacttcatcacaaactgagatacacagatgatgctttaattgctgctgcacagctgtcttatcagtatatcagcgatcgttttctgcctgacaaagccattgacttgattgatgaagctggatctcgtgttaggctgaggcatgcgcagctccctgatgaagccaaagagctggacaaagagctgcggcagataagcaagcagaaaaatgaggctgtacgtggccaagattttgagaaggtatactgttgtttggcacagcggtgacaaagccgatccgctcccacctctctagcaacgtcgatatggttaataccaagcattatgttgtttccttttgagataaatattttgttactgattttaccttttgtctcctcttcttgttttttgttctagaatctgtagcaaatggctaacgatgaggatatccattactttgtttatgacaataaaactgatatgttcaagattccgtagcaacgcacgggcatctaactagtct

SEQ ID NO: 221202 - DNA, 1821 bp, Zea Mays
cgcatacgcccgcagccgccatcaacgcccgcggacccctcagcctcctccttaccgccgcgatccgccagaccaccgccccccccccgcacccgccgcagatctcgccatggcggcgcgcacgccccccaggtcgcagccccgtcaccttcctcccccaccccgaactccgtccccgccgtagatctcgccatcggtaacacacctctcgttcgcatctgacgcgagcggttgggttctcccgcgcgagcggccggcgggtgcgacagaggggtcttgtgaaggccatcggcaacacacctctcattcgcatcaacagcctctccgacgttacaggatgcgaggttcgcgcgtggactcggcgtcatctccgcgtggtcctcgccccccccccccgagacacccgctcgcaatgttcgggagtccgcgcccgccgtcgagaggagtgctgcatctgccttgcgtagtacggggagaaggaggaggttcggcagctgccgtgcacacacgtgtttcatctcaagtgcatatacaggtggctcaggatcatctcctcttgccctctctgcaagcaagagctcaagtgaactttatattcattacacacatgacattctcgcttattctttggatcaaggtgttagtatcctagacacaacagatattttccagctaacaagggaaatcaaggaagaattgatctttatattagcaggcggatgcaatcactaatcaaaaccacgatgcaaggtaacctaaatggattttaaattttattttggattgttaaatctttatttctgactactattgttttatgtcgtggatgccctcgtgaggttctacgccgacgccttcaggagggattcacagaggccatggtgaggatggccagcttgagtcggctcaccgggagcagcgcgagatccgctacaactaaatgataggaggtttcgctgccatttgcagcgactgtgttccagttcgaccgtttggggaaaaggcaaggaaacaggatctgtcacggaaggcgattcccatttctcagtgatgtcgatgtcctgtactcctgtatatttggattcaacaatatgccattagtatgctgtcaagcgtcctatttgcaagagataaatggcttacgcccgaggggcttattcttccttatcatgtgcattggtgccacaacactggatgagtataggaagcatatagagaaagatcctgccttggaaagaaggtttcaaccagttaaggttccagagcctactatggatgaaacaatacagatcttaagaggacttcgtgagagatatgaacttcatcacaaactgagatacacagatgatgctttaattgctgctgcacagctgtcttatcagtatatcagcgatcgttttctgcctgacaaagccattgacttgattgatgaagctggatctcgtgttaggctgaggcatgcgcagctccctgatgaagccaaagagctggacaaagagctgcggcagataagcaagcagaaaaatgaggctgtacgtggccaagattttgagaaggtatactgttgtttggcacagcggtgacaaagccgatccgctcccacctctctagcaacgtcgatatggttaataccaagcattatgttgtttccttttgagataaatattttgttactgattttaccttttgtctcctcttcttgttttttgttctagaatctgtagcaaatggctaacgatgaggatatccattactttgtttatgacaataaaactgatatgttcaagattccgtagcaacgcacgggcatctaactagtct

SEQ ID NO: 221203 - DNA, 4064 bp, Zea Mays
cgcatacgcccgcagccgccatcaacgcccgcggacccctcagcctcctccttaccgccgcgatccgccagaccaccgccccccccccgcacccgccgcagatctcgccatggcggcgcgcacgccccccaggtcgcagccccgtcaccttcctcccccaccccgaactccgtccccgccgtagatctcgccatcggtaacacacctctcgttcgcatctgacgcgagcggttgggttctcccgcgcgagcggccggcgggtgcgacagaggggtcttgtgaaggccatcggcaacacacctctcattcgcatcaacagcctctccgacgttacaggatgcgaggttcgcgcgtggactcggcgtcatctccgcgtggtcctcgccccccccccccgagacacccgctcgcaatgttcgggagtccgcgcccgccgtcgagaggagtgctgcatctgccttgcgtagtacggggagaaggaggaggttcggcagctgccgtgcacacacgtgtttcatctcaagtgcatatacaggtggctcaggatcatctcctcttgccctctctgcaagcaagagctcaagtgaactttatattcattacacacatgacattctcgcttattctttggatcaaggtgttagtatcctagacacaacagatattttccagctaacaagggaaatcaaggaagaattgatctttatattagcaggcggatgcaatcactaatcaaaaccacgatgcaaggtaacctaaatggattttaaattttattttggattgttaaatctttatttctgactactattgttttatgtcgtggatgccctcgtgaggttctacgccgacgccttcaggagggattcacagaggccatggtgaggatggccagcttgagtcggctcaccgggagcagcgcgagatccgctacaactaaatgataggaggtattttctagaaattacaaccccacctctgtcaggccttctgttgagtgaatttggtttgcacaccctcaccctgcacgctcttaccggactaccgctcctagcacccactcacacgagattgcaccccgctcgccatgccaccatagatccagctagggcgacatcattgtgggcaatcctgtgcgagagaatgtgaaattgttgtaggattgataatgaccaggggtttctccgcccacatgcaccaggtttcgctgccatttgcagcgactgtgttccagttcgaccgtttggggaaaaggtgagtcctcccatttcatgtagatgcatgggttgataaacatttgggagaaatgtcccctctttaattcgaaaaatagttgtgtatttgttcgacttatctgcggcgatgtacctttgtacgcgtacaaacatctatagacaaaaacaaaatgacacttcatggatgtagcaagagcgggctacgagaaactagcagatcatgcctaaaattcaattagcattagggtcagacaaaatactacattttctggattacaataatgtataggtgcatgaaaaaaacttgattccaatgtgtgacaaagtgtgaagatgaaagtgcactttcacgctgtcataacgcggatttgttttccttgctcatggaatgtgcatttgtgtgtttgcgtctactgtgcggctacaggcaaggaaacaggatctgtcacggaaggtatgtacacattacagtaaacgttgttcgtagaacatgcactttgtggagtggtctttgaatgagatgcgtttagaattaccttttcatgcagatctcttgttcagaacctggttgcttagtccattcttgttttgggttgctactacaaaaaagcggcaatgctttatatgaatcgcctcttactaatatccagggtcaaatggtggtccttcagtgaccagactaatatttgagcattaatcttatttgtttcacagtcatttcttgtttatcaatatgaatgctatttttttgcgagtggacttgttaactaataagctcatagatatttgaacaaaaaatagtgttttgttctaaaactgtcataaagagtgcatacatcatagctatggtttcaactgtgatttgatgtcctataatattgagtgtcctatagtgtgttgttctgaaacagtcacaaagagggcctaagaagctgatggaatcctcattcaccgccgctaaggagtttgagcgggatcggagaggagacgtcagttcttcctcctctgctcaatgcggccattcgccctgtcccccaaccctgaactccacactgccactccgtgctcattttttctgaaggggaaatattcatctccttgttgttttgtaccatggatactttagcatcattctcatactactaggagtgtaggtaaggagtccacacacgagtttgcaaacaccattaagcctattttgcttgattagtgccctgcaacacttcatatgttcaagacaaaatccatacccatgtctattgttgtatgatattatttgcattgaccgttgctgctcttcttgattgcagtcactaacattgcattaatctatgtgatacatttattcaggcgattcccatttctcagtgatgtcgatgtcctgtactcctgtatatttggattcaacaatatgccattagtatgctgtcaagcgtcctatttgcaagagataaatggcttacgcccgaggggcttattcttccttatcatggtatgatataattatcatacaaaaatgttacactgcttttacagggtgtacctcatctatttgcttgtacaattcatcttactactgctttgacaaacattggtctgctctgctttggtctgtgctttaggattctgtttcattgggagaaacaaatgcccttgcttactttcattataactgtgctatttttttgatccaatgttgttctaagatcaagaagtggaatacttgttctaagggtcccaagttgggtggtggtggtgggaagcgttttcaggtcggtcgtgactttggttatccactgaaaagatatgcttggtggtgctttcttgtgttgaagaacaagtatcccacggaaccacaaccgtttgtattatctggtgatttcctacattattagctggcctaactaaaccatgcgctcagaccctaaaccagctgtaagtctgtaacttaaaagcacagtgcactagcggaatggggttccttgctttttggagcgtttccccagtcagatcggcggcagggcaggtcacgtggacggggctccttgttgctggaactaaataccgtggagagtttgaagtgagactaaagaaacttatggaggaaattaagcaaaatgaagacattattctctttattgattaagtgcacacactgattggagcaggtgcagcagaagtgcattggtgccacaacactggatgagtataggaagcatatagagaaagatcctgccttggaaagaaggtttcaaccagttaaggttccagagcctactatggatgaaacaatacagatcttaagaggacttcgtgagagatatgaacttcatcacaaactgagatacacagatgatgctttaattgctgctgcacagctgtcttatcagtatatcagcgatcgttttctgcctgacaaagccattgacttgattgatgaagctggatctcgtgttaggctgaggcatgcgcagctccctgatgaagccaaagagctggacaaagagctgcggcagataagcaagcagaaaaatgaggctgtacgtggccaagattttgagaaggtatactgttgtttggcacagcggtgacaaagccgatccgctcccacctctctagcaacgtcgatatggttaataccaagcattatgttgtttccttttgagataaatattttgttactgattttaccttttgtctcctcttcttgttttttgttctagaatctgtagcaaatggctaacgatgaggatatccattactttgtttatgacaataaaactgatatgttcaagattccgtagcaacgcacgggcatctaactagtct

SEQ ID NO: 221204 - DNA, 2487 bp, Zea Mays
cgcatacgcccgcagccgccatcaacgcccgcggacccctcagcctcctccttaccgccgcgatccgccagaccaccgccccccccccgcacccgccgcagatctcgccatggcggcgcgcacgccccccaggtcgcagccccgtcaccttcctcccccaccccgaactccgtccccgccgtagatctcgccatcggtaacacacctctcgttcgcatctgacgcgagcggttgggttctcccgcgcgagcggccggcgggtgcgacagaggggtcttgtgaaggccatcggcaacacacctctcattcgcatcaacagcctctccgacgttacaggatgcgaggttcgcgcgtggactcggcgtcatctccgcgtggtcctcgccccccccccccgagacacccgctcgcaatgttcgggagtccgcgcccgccgtcgagaggagtgctgcatctgccttgcgtagtacggggagaaggaggaggttcggcagctgccgtgcacacacgtgtttcatctcaagtgcatatacaggtggctcaggatcatctcctcttgccctctctgcaagcaagagctcaagtgaactttatattcattacacacatgacattctcgcttattctttggatcaaggtgttagtatcctagacacaacagatattttccagctaacaagggaaatcaaggaagaattgatctttatattagcaggcggatgcaatcactaatcaaaaccacgatgcaaggttctacgccgacgccttcaggagggattcacagaggccatggtgaggatggccagcttgagtcggctcaccgggagcagcgcgagatccgctacaactaaatgataggaggtattttctagaaattacaaccccacctctgtcaggccttctgttgagtgaatttggtttgcacaccctcaccctgcacgctcttaccggactaccgctcctagcacccactcacacgagattgcaccccgctcgccatgccaccatagatccagctagggcgacatcattgtgggcaatcctgtgcgagagaatgtgaaattgttgtaggattgataatgaccaggggtttctccgcccacatgcaccaggtttcgctgccatttgcagcgactgtgttccagttcgaccgtttggggaaaaggtgagtcctcccatttcatgtagatgcatgggttgataaacatttgggagaaatgtcccctctttaattcgaaaaatagttgtgtatttgttcgacttatctgcggcgatgtacctttgtacgcgtacaaacatctatagacaaaaacaaaatgacacttcatggatgtagcaagagcgggctacgagaaactagcagatcatgcctaaaattcaattagcattagggtcagacaaaatactacattttctggattacaataatgtataggtgcatgaaaaaaacttgattccaatgtgtgacaaagtgtgaagatgaaagtgcactttcacgctgtcataacgcggatttgttttccttgctcatggaatgtgcatttgtgtgtttgcgtctactgtgcggctacaggcaaggaaacaggatctgtcacggaagtgtgttgttctgaaacagtcacaaagagggcctaagaagctgatggaatcctcattcaccgccgctaaggagtttgagcgggatcggagaggagacgcgattcccatttctcagtgatgtcgatgtcctgtactcctgtatatttggattcaacaatatgccattagtatgctgtcaagcgtcctatttgcaagagataaatggcttacgcccgaggggcttattcttccttatcatgtgcattggtgccacaacactggatgagtataggaagcatatagagaaagatcctgccttggaaagaaggtttcaaccagttaaggttccagagcctactatggatgaaacaatacagatcttaagaggacttcgtgagagatatgaacttcatcacaaactgagatacacagatgatgctttaattgctgctgcacagctgtcttatcagtatatcagcgatcgttttctgcctgacaaagccattgacttgattgatgaagctggatctcgtgttaggctgaggcatgcgcagctccctgatgaagccaaagagctggacaaagagctgcggcagataagcaagcagaaaaatgaggctgtacgtggccaagattttgagaaggtatactgttgtttggcacagcggtgacaaagccgatccgctcccacctctctagcaacgtcgatatggttaataccaagcattatgttgtttccttttgagataaatattttgttactgattttaccttttgtctcctcttcttgttttttgttctagaatctgtagcaaatggctaacgatgaggatatccattactttgtttatgacaataaaactgatatgttcaagattccgtagcaacgcacgggcatctaactagtct

SEQ ID NO: 221205 - DNA, 3432 bp, Zea Mays
cgcatacgcccgcagccgccatcaacgcccgcggacccctcagcctcctccttaccgccgcgatccgccagaccaccgccccccccccgcacccgccgcagatctcgccatggcggcgcgcacgccccccaggtcgcagccccgtcaccttcctcccccaccccgaactccgtccccgccgtagatctcgccatcggtaacacacctctcgttcgcatctgacgcgagcggttgggttctcccgcgcgagcggccggcgggtgcgacagaggggtcttgtgaaggccatcggcaacacacctctcattcgcatcaacagcctctccgacgttacaggatgcgaggttcgcgcgtggactcggcgtcatctccgcgtggtcctcgccccccccccccgagacacccgctcgcaatgttcgggagtccgcgcccgccgtcgagaggagtgctgcatctgccttgcgtagtacggggagaaggaggaggttcggcagctgccgtgcacacacgtgtttcatctcaagtgcatatacaggtggctcaggatcatctcctcttgccctctctgcaagcaagagctcaagtgaactttatattcattacacacatgacattctcgcttattctttggatcaaggtgttagtatcctagacacaacagatattttccagctaacaagggaaatcaaggaagaattgatctttatattagcaggcggatgcaatcactaatcaaaaccacgatgcaaggttctacgccgacgccttcaggagggattcacagaggccatggtgaggatggccagcttgagtcggctcaccgggagcagcgcgagatccgctacaactaaatgataggaggtttcgctgccatttgcagcgactgtgttccagttcgaccgtttggggaaaaggtgagtcctcccatttcatgtagatgcatgggttgataaacatttgggagaaatgtcccctctttaattcgaaaaatagttgtgtatttgttcgacttatctgcggcgatgtacctttgtacgcgtacaaacatctatagacaaaaacaaaatgacacttcatggatgtagcaagagcgggctacgagaaactagcagatcatgcctaaaattcaattagcattagggtcagacaaaatactacattttctggattacaataatgtataggtgcatgaaaaaaacttgattccaatgtgtgacaaagtgtgaagatgaaagtgcactttcacgctgtcataacgcggatttgttttccttgctcatggaatgtgcatttgtgtgtttgcgtctactgtgcggctacaggcaaggaaacaggatctgtcacggaaggtatgtacacattacagtaaacgttgttcgtagaacatgcactttgtggagtggtctttgaatgagatgcgtttagaattaccttttcatgcagatctcttgttcagaacctggttgcttagtccattcttgttttgggttgctactacaaaaaagcggcaatgctttatatgaatcgcctcttactaatatccagggtcaaatggtggtccttcagtgaccagactaatatttgagcattaatcttatttgtttcacagtcatttcttgtttatcaatatgaatgctatttttttgcgagtggacttgttaactaataagctcatagatatttgaacaaaaaatagtgttttgttctaaaactgtcataaagagtgcatacatcatagctatggtttcaactgtgatttgatgtcctataatattgagtgtcctatagtgtgttgttctgaaacagtcacaaagagggcctaagaagctgatggaatcctcattcaccgccgctaaggagtttgagcgggatcggagaggagacgtcagttcttcctcctctgctcaatgcggccattcgccctgtcccccaaccctgaactccacactgccactccgtgctcattttttctgaaggggaaatattcatctccttgttgttttgtaccatggatactttagcatcattctcatactactaggagtgtaggtaaggagtccacacacgagtttgcaaacaccattaagcctattttgcttgattagtgccctgcaacacttcatatgttcaagacaaaatccatacccatgtctattgttgtatgatattatttgcattgaccgttgctgctcttcttgattgcagtcactaacattgcattaatctatgtgatacatttattcaggcgattcccatttctcagtgatgtcgatgtcctgtactcctgtatatttggattcaacaatatgccattagtatgctgtcaagcgtcctatttgcaagagataaatggcttacgcccgaggggcttattcttccttatcatggtcggtcgtgactttggttatccactgaaaagatatgcttggtggtgctttcttgtgttgaagaacaagtatcccacggaaccacaaccgtttgtattatctggtgatttcctacattattagctggcctaactaaaccatgcgctcagaccctaaaccagctgtaagtctgtaacttaaaagcacagtgcactagcggaatggggttccttgctttttggagcgtttccccagtcagatcggcggcagggcaggtcacgtggacggggctccttgttgctggaactaaataccgtggagagtttgaagtgagactaaagaaacttatggaggaaattaagcaaaatgaagacattattctctttattgattaagtgcacacactgattggagcagtgcattggtgccacaacactggatgagtataggaagcatatagagaaagatcctgccttggaaagaaggtttcaaccagttaaggttccagagcctactatggatgaaacaatacagatcttaagaggacttcgtgagagatatgaacttcatcacaaactgagatacacagatgatgctttaattgctgctgcacagctgtcttatcagtatatcagcgatcgttttctgcctgacaaagccattgacttgattgatgaagctggatctcgtgttaggctgaggcatgcgcagctccctgatgaagccaaagagctggacaaagagctgcggcagataagcaagcagaaaaatgaggctgtacgtggccaagattttgagaaggtatactgttgtttggcacagcggtgacaaagccgatccgctcccacctctctagcaacgtcgatatggttaataccaagcattatgttgtttccttttgagataaatattttgttactgattttaccttttgtctcctcttcttgttttttgttctagaatctgtagcaaatggctaacgatgaggatatccattactttgtttatgacaataaaactgatatgttcaagattccgtagcaacgcacgggcatctaactagtct

SEQ ID NO: 221206 - DNA, 3130 bp, Zea Mays
gtcgtatctgatgaacaaggcgcgagcgttcctggagctcttcttcgcgatgtggttcgtgatgggcaacgtgtgggtgttcgacgcccggctggggtcgttccagcgtgcgccgaggctgtacgcgctctgcgtcagcctgctggcctggaacaccgtcgtctactcgctcacgttcctgagtgctgcatctgccttgcgtagtacggggagaaggaggaggttcggcagctgccgtgcacacacgtgtttcatctcaagtgcatatacaggtggctcaggatcatctcctcttgccctctctgcaagcaagagctcaagtgaactttatattcattacacacatgacattctcgcttattctttggatcaaggtgttagtatcctagacacaacagatattttccagctaacaagggaaatcaaggaagaattgatctttatattagcaggcggatgcaatcactaatcaaaaccacgatgcaaggtaacctaaatggattttaaattttattttggattgttaaatctttatttctgactactattgttttatgtcgtggatgccctcgtgaggttctacgccgacgccttcaggagggattcacagaggccatggtgaggatggccagcttgagtcggctcaccgggagcagcgcgagatccgctacaactaaatgataggaggtttcgctgccatttgcagcgactgtgttccagttcgaccgtttggggaaaaggcaaggaaacaggatctgtcacggaaggtatgtacacattacagtaaacgttgttcgtagaacatgcactttgtggagtggtctttgaatgagatgcgtttagaattaccttttcatgcagatctcttgttcagaacctggttgcttagtccattcttgttttgggttgctactacaaaaaagcggcaatgctttatatgaatcgcctcttactaatatccagggtcaaatggtggtccttcagtgaccagactaatatttgagcattaatcttatttgtttcacagtcatttcttgtttatcaatatgaatgctatttttttgcgagtggacttgttaactaataagctcatagatatttgaacaaaaaatagtgttttgttctaaaactgtcataaagagtgcatacatcatagctatggtttcaactgtgatttgatgtcctataatattgagtgtcctatagtgtgttgttctgaaacagtcacaaagagggcctaagaagctgatggaatcctcattcaccgccgctaaggagtttgagcgggatcggagaggagacgtcagttcttcctcctctgctcaatgcggccattcgccctgtcccccaaccctgaactccacactgccactccgtgctcattttttctgaaggggaaatattcatctccttgttgttttgtaccatggatactttagcatcattctcatactactaggagtgtaggtaaggagtccacacacgagtttgcaaacaccattaagcctattttgcttgattagtgccctgcaacacttcatatgttcaagacaaaatccatacccatgtctattgttgtatgatattatttgcattgaccgttgctgctcttcttgattgcagtcactaacattgcattaatctatgtgatacatttattcaggcgattcccatttctcagtgatgtcgatgtcctgtactcctgtatatttggattcaacaatatgccattagtatgctgtcaagcgtcctatttgcaagagataaatggcttacgcccgaggggcttattcttccttatcatggtatgatataattatcatacaaaaatgttacactgcttttacagggtgtacctcatctatttgcttgtacaattcatcttactactgctttgacaaacattggtctgctctgctttggtctgtgctttaggattctgtttcattgggagaaacaaatgcccttgcttactttcattataactgtgctatttttttgatccaatgttgttctaagatcaagaagtggaatacttgttctaagggtcccaagttgggtggtggtggtgggaagcgttttcaggtcggtcgtgactttggttatccactgaaaagatatgcttggtggtgctttcttgtgttgaagaacaagtatcccacggaaccacaaccgtttgtattatctggtgatttcctacattattagctggcctaactaaaccatgcgctcagaccctaaaccagctgtaagtctgtaacttaaaagcacagtgcactagcggaatggggttccttgctttttggagcgtttccccagtcagatcggcggcagggcaggtcacgtggacggggctccttgttgctggaactaaataccgtggagagtttgaagtgagactaaagaaacttatggaggaaattaagcaaaatgaagacattattctctttattgattaagtgcacacactgattggagcagtgcattggtgccacaacactggatgagtataggaagcatatagagaaagatcctgccttggaaagaaggtttcaaccagttaaggttccagagcctactatggatgaaacaatacagatcttaagaggacttcgtgagagatatgaacttcatcacaaactgagatacacagatgatgctttaattgctgctgcacagctgtcttatcagtatatcagcgatcgttttctgcctgacaaagccattgacttgattgatgaagctggatctcgtgttaggctgaggcatgcgcagctccctgatgaagccaaagagctggacaaagagctgcggcagataagcaagcagaaaaatgaggctgtacgtggccaagattttgagaaggtatactgttgtttggcacagcggtgacaaagccgatccgctcccacctctctagcaacgtcgatatggttaataccaagcattatgttgtttccttttgagataaatattttgttactgattttaccttttgtctcctcttcttgttttttgttctagaatctgtagcaaatggctaacgatgaggatatccattactttgtttatgacaataaaactgatatgttcaagattccgtagcaacgcacgggcatctaactagtct

SEQ ID NO: 221207 - DNA, 1414 bp, Zea Mays
ggcaacgtgtgggtgttcgacgcccggctggggtcgttccagcgtgcgccgaggctgtacgcgctctgcgtcagcctgctggcctggaacaccgtcgtctactcgctcacgttcctgagtgctgcatctgccttgcgtagtacggggagaaggaggaggttcggcagctgccgtgcacacacgtgtttcatctcaagtgcatatacaggtggctcaggatcatctcctcttgccctctctgcaagcaagagctcaagtgaactttatattcattacacacatgacattctcgcttattctttggatcaaggtgttagtatcctagacacaacagatattttccagctaacaagggaaatcaaggaagaattgatctttatattagcaggcggatgcaatcactaatcaaaaccacgatgcaaggtaacctaaatggattttaaattttattttggattgttaaatctttatttctgactactattgttttatgtcgtggatgccctcgtgaggttctacgccgacgccttcaggagggattcacagaggccatggtgaggatggccagcttgagtcggctcaccgggagcagcgcgagatccgctacaactaaatgataggaggcgattcccatttctcagtgatgtcgatgtcctgtactcctgtatatttggattcaacaatatgccattagtatgctgtcaagcgtcctatttgcaagagataaatggcttacgcccgaggggcttattcttccttatcatgtgcattggtgccacaacactggatgagtataggaagcatatagagaaagatcctgccttggaaagaaggtttcaaccagttaaggttccagagcctactatggatgaaacaatacagatcttaagaggacttcgtgagagatatgaacttcatcacaaactgagatacacagatgatgctttaattgctgctgcacagctgtcttatcagtatatcagcgatcgttttctgcctgacaaagccattgacttgattgatgaagctggatctcgtgttaggctgaggcatgcgcagctccctgatgaagccaaagagctggacaaagagctgcggcagataagcaagcagaaaaatgaggctgtacgtggccaagattttgagaaggtatactgttgtttggcacagcggtgacaaagccgatccgctcccacctctctagcaacgtcgatatggttaataccaagcattatgttgtttccttttgagataaatattttgttactgattttaccttttgtctcctcttcttgttttttgttctagaatctgtagcaaatggctaacgatgaggatatccattactttgtttatgacaataaaactgatatgttcaagattccgtagcaacgcacgggcatctaactagtct

SEQ ID NO: 221208 - DNA, 1749 bp, Zea Mays
caacgtgtgggtgttcgacgcccggctggggtcgttccagcgtgcgccgaggctgtacgcgctctgcgtcagcctgctggcctggaacaccgtcgtctactcgctcacgttcctgagtgctgcatctgccttgcgtagtacggggagaaggaggaggttcggcagctgccgtgcacacacgtgtttcatctcaagtgcatatacaggtggctcaggatcatctcctcttgccctctctgcaagcaagagctcaagtgaactttatattcattacacacatgacattctcgcttattctttggatcaaggtgttagtatcctagacacaacagatattttccagctaacaagggaaatcaaggaagaattgatctttatattagcaggcggatgcaatcactaatcaaaaccacgatgcaaggtaacctaaatggattttaaattttattttggattgttaaatctttatttctgactactattgttttatgtcgtggatgccctcgtgaggttctacgccgacgccttcaggagggattcacagaggccatggtgaggatggccagcttgagtcggctcaccgggagcagcgcgagatccgctacaactaaatgataggaggcgattcccatttctcagtgatgtcgatgtcctgtactcctgtatatttggattcaacaatatgccattaggtcggtcgtgactttggttatccactgaaaagatatgcttggtggtgctttcttgtgttgaagaacaagtatcccacggaaccacaaccgtttgtattatctggtgatttcctacattattagctggcctaactaaaccatgcgctcagaccctaaaccagctgtaagtctgtaacttaaaagcacagtgcactagcggaatggggttccttgctttttggagcgtttccccagtcagatcggcggcagggcaggtcacgtggacggggctccttgttgctggaactaaataccgtggagagtttgaagtgagactaaagaaacttatggaggaaattaagcaaaatgaagacattattctctttattgattaagtgcacacactgattggagcaggtgcagcagaagtgcattggtgccacaacactggatgagtataggaagcatatagagaaagatcctgccttggaaagaaggtttcaaccagttaaggttccagagcctactatggatgaaacaatacagatcttaagaggacttcgtgagagatatgaacttcatcacaaactgagatacacagatgatgctttaattgctgctgcacagctgtcttatcagtatatcagcgatcgttttctgcctgacaaagccattgacttgattgatgaagctggatctcgtgttaggctgaggcatgcgcagctccctgatgaagccaaagagctggacaaagagctgcggcagataagcaagcagaaaaatgaggctgtacgtggccaagattttgagaaggtatactgttgtttggcacagcggtgacaaagccgatccgctcccacctctctagcaacgtcgatatggttaataccaagcattatgttgtttccttttgagataaatattttgttactgattttaccttttgtctcctcttcttgttttttgttctagaatctgtagcaaatggctaacgatgaggatatccattactttgtttatgacaataaaactgatatgttcaagattccgtagcaacgcacgggcatctaactagtct

SEQ ID NO: 221209 - DNA, 1995 bp, Zea Mays
aacgtgtgggtgttcgacgcccggctggggtcgttccagcgtgcgccgaggctgtacgcgctctgcgtcagcctgctggcctggaacaccgtcgtctactcgctcacgttcctgagtgctgcatctgccttgcgtagtacggggagaaggaggaggttcggcagctgccgtgcacacacgtgtttcatctcaagtgcatatacagttccagctaacaagggaaatcaaggaagaattgatctttatattagcaggcggatgcaatcactaatcaaaaccacgatgcaaggtaacctaaatggattttaaattttattttggattgttaaatctttatttctgactactattgttttatgtcgtggatgccctcgtgaggttctacgccgacgccttcaggagggattcacagaggccatggtgaggatggccagcttgagtcggctcaccgggagcagcgcgagatccgctacaactaaatgataggaggcaaggaaacaggatctgtcacggaaggcgattcccatttctcagtgatgtcgatgtcctgtactcctgtatatttggattcaacaatatgccattagtatgctgtcaagcgtcctatttgcaagagataaatggcttacgcccgaggggcttattcttccttatcatggtatgatataattatcatacaaaaatgttacactgcttttacagggtgtacctcatctatttgcttgtacaattcatcttactactgctttgacaaacattggtctgctctgctttggtctgtgctttaggattctgtttcattgggagaaacaaatgcccttgcttactttcattataactgtgctatttttttgatccaatgttgttctaagatcaagaagtggaatacttgttctaagggtcccaagttgggtggtggtggtgggaagcgttttcaggtcggtcgtgactttggttatccactgaaaagatatgcttggtggtgctttcttgtgttgaagaacaagtatcccacggaaccacaaccgtttgtattatctggtgatttcctacattattagctggcctaactaaaccatgcgctcagaccctaaaccagctgtaagtctgtaacttaaaagcacagtgcactagcggaatggggttccttgctttttggagcgtttccccagtcagatcggcggcagggcaggtcacgtggacggggctccttgttgctggaactaaataccgtggagagtttgaagtgagactaaagaaacttatggaggaaattaagcaaaatgaagacattattctctttattgattaagtgcacacactgattggagcaggtgcagcagaagtgcattggtgccacaacactggatgagtataggaagcatatagagaaagatcctgccttggaaagaaggtttcaaccagttaaggttccagagcctactatggatgaaacaatacagatcttaagaggacttcgtgagagatatgaacttcatcacaaactgagatacacagatgatgctttaattgctgctgcacagctgtcttatcagtatatcagcgatcgttttctgcctgacaaagccattgacttgattgatgaagctggatctcgtgttaggctgaggcatgcgcagctccctgatgaagccaaagagctggacaaagagctgcggcagataagcaagcagaaaaatgaggctgtacgtggccaagattttgagaaggtatactgttgtttggcacagcggtgacaaagccgatccgctcccacctctctagcaacgtcgatatggttaataccaagcattatgttgtttccttttgagataaatattttgttactgattttaccttttgtctcctcttcttgttttttgttctagaatctgtagcaaatggctaacgatgaggatatccattactttgtttatgacaataaaactgatatgttcaagattccgtagcaacgcacgggcatctaactagtct

SEQ ID NO: 221210 - DNA, 1817 bp, Zea Mays
cgtgtgggtgttcgacgcccggctggggtcgttccagcgtgcgccgaggctgtacgcgctctgcgtcagcctgctggcctggaacaccgtcgtctactcgctcacgttcctgagtgctgcatctgccttgcgtagtacggggagaaggaggaggttcggcagctgccgtgcacacacgtgtttcatctcaagtgcatatacaggtggctcaggatcatctcctcttgccctctctgcaagcaagagctcaagtgaactttatattcattacacacatgacattctcgcttattctttggatcaaggtgttagtatcctagacacaacagatattttccagctaacaagggaaatcaaggaagaattgatctttatattagcaggcggatgcaatcactaatcaaaaccacgatgcaaggtaacctaaatggattttaaattttattttggattgttaaatctttatttctgactactattgttttatgtcgtggatgccctcgtgaggttctacgccgacgccttcaggagggattcacagaggccatggtgaggatggccagcttgagtcggctcaccgggagcagcgcgagatccgctacaactaaatgataggaggcgattcccatttctcagtgatgtcgatgtcctgtactcctgtatatttggattcaacaatatgccattagtatgctgtcaagcgtcctatttgcaagagataaatggcttacgcccgaggggcttattcttccttatcatggtcggtcgtgactttggttatccactgaaaagatatgcttggtggtgctttcttgtgttgaagaacaagtatcccacggaaccacaaccgtttgtattatctggtgatttcctacattattagctggcctaactaaaccatgcgctcagaccctaaaccagctgtaagtctgtaacttaaaagcacagtgcactagcggaatggggttccttgctttttggagcgtttccccagtcagatcggcggcagggcaggtcacgtggacggggctccttgttgctggaactaaataccgtggagagtttgaagtgagactaaagaaacttatggaggaaattaagcaaaatgaagacattattctctttattgattaagtgcacacactgattggagcaggtgcagcagaagtgcattggtgccacaacactggatgagtataggaagcatatagagaaagatcctgccttggaaagaaggtttcaaccagttaaggttccagagcctactatggatgaaacaatacagatcttaagaggacttcgtgagagatatgaacttcatcacaaactgagatacacagatgatgctttaattgctgctgcacagctgtcttatcagtatatcagcgatcgttttctgcctgacaaagccattgacttgattgatgaagctggatctcgtgttaggctgaggcatgcgcagctccctgatgaagccaaagagctggacaaagagctgcggcagataagcaagcagaaaaatgaggctgtacgtggccaagattttgagaaggtatactgttgtttggcacagcggtgacaaagccgatccgctcccacctctctagcaacgtcgatatggttaataccaagcattatgttgtttccttttgagataaatattttgttactgattttaccttttgtctcctcttcttgttttttgttctagaatctgtagcaaatggctaacgatgaggatatccattactttgtttatgacaataaaactgatatgttcaagattccgtagcaacgcacgggcatctaactagtct

SEQ ID NO: 221211 - DNA, 2257 bp, Zea Mays
gggtgttcgacgcccggctggggtcgttccagcgtgcgccgaggctgtacgcgctctgcgtcagcctgctggcctggaacaccgtcgtctactcgctcacgttcctgagtgctgcatctgccttgcgtagtacggggagaaggaggaggttcggcagctgccgtgcacacacgtgtttcatctcaagtgcatatacaggtggctcaggatcatctcctcttgccctctctgcaagcaagagctcaagtgaactttatattcattacacacatgacattctcgcttattctttggatcaaggtgttagtatcctagacacaacagatattttccagctaacaagggaaatcaaggaagaattgatctttatattagcaggcggatgcaatcactaatcaaaaccacgatgcaaggtaacctaaatggattttaaattttattttggattgttaaatctttatttctgactactattgttttatgtcgtggatgccctcgtgaggttctacgccgacgccttcaggagggattcacagaggccatggtgaggatggccagcttgagtcggctcaccgggagcagcgcgagatccgctacaactaaatgataggagtgtgttgttctgaaacagtcacaaagagggcctaagaagctgatggaatcctcattcaccgccgctaaggagtttgagcgggatcggagaggagacgtcagttcttcctcctctgctcaatgcggccattcgccctgtcccccaaccctgaactccacactgccactccgtgctcattttttctgaaggggaaatattcatctccttgttgttttgtaccatggatactttagcatcattctcatactactaggagtgtaggtaaggagtccacacacgagtttgcaaacaccattaagcctattttgcttgattagtgccctgcaacacttcatatgttcaagacaaaatccatacccatgtctattgttgtatgatattatttgcattgaccgttgctgctcttcttgattgcagtcactaacattgcattaatctatgtgatacatttattcaggcgattcccatttctcagtgatgtcgatgtcctgtactcctgtatatttggattcaacaatatgccattagtatgctgtcaagcgtcctatttgcaagagataaatggcttacgcccgaggggcttattcttccttatcatggtcggtcgtgactttggttatccactgaaaagatatgcttggtggtgctttcttgtgttgaagaacaagtatcccacggaaccacaaccgtttgtattatctggtgatttcctacattattagctggcctaactaaaccatgcgctcagaccctaaaccagctgtaagtctgtaacttaaaagcacagtgcactagcggaatggggttccttgctttttggagcgtttccccagtcagatcggcggcagggcaggtcacgtggacggggctccttgttgctggaactaaataccgtggagagtttgaagtgagactaaagaaacttatggaggaaattaagcaaaatgaagacattattctctttattgattaagtgcacacactgattggagcagtgcattggtgccacaacactggatgagtataggaagcatatagagaaagatcctgccttggaaagaaggtttcaaccagttaaggttccagagcctactatggatgaaacaatacagatcttaagaggacttcgtgagagatatgaacttcatcacaaactgagatacacagatgatgctttaattgctgctgcacagctgtcttatcagtatatcagcgatcgttttctgcctgacaaagccattgacttgattgatgaagctggatctcgtgttaggctgaggcatgcgcagctccctgatgaagccaaagagctggacaaagagctgcggcagataagcaagcagaaaaatgaggctgtacgtggccaagattttgagaaggtatactgttgtttggcacagcggtgacaaagccgatccgctcccacctctctagcaacgtcgatatggttaataccaagcattatgttgtttccttttgagataaatattttgttactgattttaccttttgtctcctcttcttgttttttgttctagaatctgtagcaaatggctaacgatgaggatatccattactttgtttatgacaataaaactgatatgttcaagattccgtagcaacgcacgggcatctaactagtct

SEQ ID NO: 221212 - DNA, 3192 bp, Zea Mays
gttcgacgcccggctggggtcgttccagcgtgcgccgaggctgtacgcgctctgcgtcagcctgctggcctggaacaccgtcgtctactcgctcacgttcctgagtgctgcatctgccttgcgtagtacggggagaaggaggaggttcggcagctgccgtgcacacacgtgtttcatctcaagtgcatatacaggtggctcaggatcatctcctcttgccctctctgcaagcaagagctcaagtgaactttatattcattacacacatgacattctcgcttattctttggatcaaggtgttagtatcctagacacaacagatattttccagctaacaagggaaatcaaggaagaattgatctttatattagcaggcggatgcaatcactaatcaaaaccacgatgcaaggtaacctaaatggattttaaattttattttggattgttaaatctttatttctgactactattgttttatgtcgtggatgccctcgtgaggttctacgccgacgccttcaggagggattcacagaggccatggtgaggatggccagcttgagtcggctcaccgggagcagcgcgagatccgctacaactaaatgataggaggtttcgctgccatttgcagcgactgtgttccagttcgaccgtttggggaaaaggtgagtcctcccatttcatgtagatgcatgggttgataaacatttgggagaaatgtcccctctttaattcgaaaaatagttgtgtatttgttcgacttatctgcggcgatgtacctttgtacgcgtacaaacatctatagacaaaaacaaaatgacacttcatggatgtagcaagagcgggctacgagaaactagcagatcatgcctaaaattcaattagcattagggtcagacaaaatactacattttctggattacaataatgtataggtgcatgaaaaaaacttgattccaatgtgtgacaaagtgtgaagatgaaagtgcactttcacgctgtcataacgcggatttgttttccttgctcatggaatgtgcatttgtgtgtttgcgtctactgtgcggctacaggcaaggaaacaggatctgtcacggaaggtatgtacacattacagtaaacgttgttcgtagaacatgcactttgtggagtggtctttgaatgagatgcgtttagaattaccttttcatgcagatctcttgttcagaacctggttgcttagtccattcttgttttgggttgctactacaaaaaagcggcaatgctttatatgaatcgcctcttactaatatccagggtcaaatggtggtccttcagtgaccagactaatatttgagcattaatcttatttgtttcacagtcatttcttgtttatcaatatgaatgctatttttttgcgagtggacttgttaactaataagctcatagatatttgaacaaaaaatagtgttttgttctaaaactgtcataaagagtgcatacatcatagctatggtttcaactgtgatttgatgtcctataatattgagtgtcctatagtgtgttgttctgaaacagtcacaaagagggcctaagaagctgatggaatcctcattcaccgccgctaaggagtttgagcgggatcggagaggagacgtcagttcttcctcctctgctcaatgcggccattcgccctgtcccccaaccctgaactccacactgccactccgtgctcattttttctgaaggggaaatattcatctccttgttgttttgtaccatggatactttagcatcattctcatactactaggagtgtaggtaaggagtccacacacgagtttgcaaacaccattaagcctattttgcttgattagtgccctgcaacacttcatatgttcaagacaaaatccatacccatgtctattgttgtatgatattatttgcattgaccgttgctgctcttcttgattgcagtcactaacattgcattaatctatgtgatacatttattcaggcgattcccatttctcagtgatgtcgatgtcctgtactcctgtatatttggattcaacaatatgccattagtatgctgtcaagcgtcctatttgcaagagataaatggcttacgcccgaggggcttattcttccttatcatggtcggtcgtgactttggttatccactgaaaagatatgcttggtggtgctttcttgtgttgaagaacaagtatcccacggaaccacaaccgtttgtattatctggtgatttcctacattattagctggcctaactaaaccatgcgctcagaccctaaaccagctgtaagtctgtaacttaaaagcacagtgcactagcggaatggggttccttgctttttggagcgtttccccagtcagatcggcggcagggcaggtcacgtggacggggctccttgttgctggaactaaataccgtggagagtttgaagtgagactaaagaaacttatggaggaaattaagcaaaatgaagacattattctctttattgattaagtgcacacactgattggagcaggtgcagcagaagtgcattggtgccacaacactggatgagtataggaagcatatagagaaagatcctgccttggaaagaaggtttcaaccagttaaggttccagagcctactatggatgaaacaatacagatcttaagaggacttcgtgagagatatgaacttcatcacaaactgagatacacagatgatgctttaattgctgctgcacagctgtcttatcagtatatcagcgatcgttttctgcctgacaaagccattgacttgattgatgaagctggatctcgtgttaggctgaggcatgcgcagctccctgatgaagccaaagagctggacaaagagctgcggcagataagcaagcagaaaaatgaggctgtacgtggccaagattttgagaaggtatactgttgtttggcacagcggtgacaaagccgatccgctcccacctctctagcaacgtcgatatggttaataccaagcattatgttgtttccttttgagataaatattttgttactgattttaccttttgtctcctcttcttgttttttgttctagaatctgtagcaaatggctaacgatgaggatatccattactttgtttatgacaataaaactgatatgttcaagattccgtagcaacgcacgggcatctaactagtct

SEQ ID NO: 221213 - DNA, 2139 bp, Zea Mays
gttcgacgcccggctggggtcgttccagcgtgcgccgaggctgtacgcgctctgcgtcagcctgctggcctggaacaccgtcgtctactcgctcacgttcctgagtgctgcatctgccttgcgtagtacggggagaaggaggaggttcggcagctgccgtgcacacacgtgtttcatctcaagtgcatatacaggtggctcaggatcatctcctcttgccctctctgcaagcaagagctcaagtgaactttatattcattacacacatgacattctcgcttattctttggatcaaggtgttagtatcctagacacaacagatattttccagctaacaagggaaatcaaggaagaattgatctttatattagcaggcggatgcaatcactaatcaaaaccacgatgcaaggtaacctaaatggattttaaattttattttggattgttaaatctttatttctgactactattgttttatgtcgtggatgccctcgtgaggttctacgccgacgccttcaggagggattcacagaggccatggtgaggatggccagcttgagtcggctcaccgggagcagcgcgagatccgctacaactaaatgataggaggtattttctagaaattacaaccccacctctgtcaggccttctgttgagtgaatttggtttgcacaccctcaccctgcacgctcttaccggactaccgctcctagcacccactcacacgagattgcaccccgctcgccatgccaccatagatccagctagggcgacatcattgtgggcaatcctgtgcgagagaatgtgaaattgttgtaggattgataatgaccaggggtttctccgcccacatgcaccaggtttcgctgccatttgcagcgactgtgttccagttcgaccgtttggggaaaaggcaaggaaacaggatctgtcacggaaggcgattcccatttctcagtgatgtcgatgtcctgtactcctgtatatttggattcaacaatatgccattagtatgctgtcaagcgtcctatttgcaagagataaatggcttacgcccgaggggcttattcttccttatcatggtcggtcgtgactttggttatccactgaaaagatatgcttggtggtgctttcttgtgttgaagaacaagtatcccacggaaccacaaccgtttgtattatctggtgatttcctacattattagctggcctaactaaaccatgcgctcagaccctaaaccagctgtaagtctgtaacttaaaagcacagtgcactagcggaatggggttccttgctttttggagcgtttccccagtcagatcggcggcagggcaggtcacgtggacggggctccttgttgctggaactaaataccgtggagagtttgaagtgagactaaagaaacttatggaggaaattaagcaaaatgaagacattattctctttattgattaagtgcacacactgattggagcaggtgcagcagaagtgcattggtgccacaacactggatgagtataggaagcatatagagaaagatcctgccttggaaagaaggtttcaaccagttaaggttccagagcctactatggatgaaacaatacagatcttaagaggacttcgtgagagatatgaacttcatcacaaactgagatacacagatgatgctttaattgctgctgcacagctgtcttatcagtatatcagcgatcgttttctgcctgacaaagccattgacttgattgatgaagctggatctcgtgttaggctgaggcatgcgcagctccctgatgaagccaaagagctggacaaagagctgcggcagataagcaagcagaaaaatgaggctgtacgtggccaagattttgagaaggtatactgttgtttggcacagcggtgacaaagccgatccgctcccacctctctagcaacgtcgatatggttaataccaagcattatgttgtttccttttgagataaatattttgttactgattttaccttttgtctcctcttcttgttttttgttctagaatctgtagcaaatggctaacgatgaggatatccattactttgtttatgacaataaaactgatatgttcaagattccgtagcaacgcacgggcatctaactagtct

SEQ ID NO: 221214 - DNA, 3324 bp, Zea Mays
ccgaggctgtacgcgctctgcgtcagcctgctggcctggaacaccgtcgtctactcgctcacgttcctgagtgctgcatctgccttgcgtagtacggggagaaggaggaggttcggcagctgccgtgcacacacgtgtttcatctcaagtgcatatacaggtgttagtatcctagacacaacagatattttccagctaacaagggaaatcaaggaagaattgatctttatattagcaggcggatgcaatcactaatcaaaaccacgatgcaaggtaacctaaatggattttaaattttattttggattgttaaatctttatttctgactactattgttttatgtcgtggatgccctcgtgaggttctacgccgacgccttcaggagggattcacagaggccatggtgaggatggccagcttgagtcggctcaccgggagcagcgcgagatccgctacaactaaatgataggaggtttcgctgccatttgcagcgactgtgttccagttcgaccgtttggggaaaaggtgagtcctcccatttcatgtagatgcatgggttgataaacatttgggagaaatgtcccctctttaattcgaaaaatagttgtgtatttgttcgacttatctgcggcgatgtacctttgtacgcgtacaaacatctatagacaaaaacaaaatgacacttcatggatgtagcaagagcgggctacgagaaactagcagatcatgcctaaaattcaattagcattagggtcagacaaaatactacattttctggattacaataatgtataggtgcatgaaaaaaacttgattccaatgtgtgacaaagtgtgaagatgaaagtgcactttcacgctgtcataacgcggatttgttttccttgctcatggaatgtgcatttgtgtgtttgcgtctactgtgcggctacaggcaaggaaacaggatctgtcacggaaggtatgtacacattacagtaaacgttgttcgtagaacatgcactttgtggagtggtctttgaatgagatgcgtttagaattaccttttcatgcagatctcttgttcagaacctggttgcttagtccattcttgttttgggttgctactacaaaaaagcggcaatgctttatatgaatcgcctcttactaatatccagggtcaaatggtggtccttcagtgaccagactaatatttgagcattaatcttatttgtttcacagtcatttcttgtttatcaatatgaatgctatttttttgcgagtggacttgttaactaataagctcatagatatttgaacaaaaaatagtgttttgttctaaaactgtcataaagagtgcatacatcatagctatggtttcaactgtgatttgatgtcctataatattgagtgtcctatagtgtgttgttctgaaacagtcacaaagagggcctaagaagctgatggaatcctcattcaccgccgctaaggagtttgagcgggatcggagaggagacgtcagttcttcctcctctgctcaatgcggccattcgccctgtcccccaaccctgaactccacactgccactccgtgctcattttttctgaaggggaaatattcatctccttgttgttttgtaccatggatactttagcatcattctcatactactaggagtgtaggtaaggagtccacacacgagtttgcaaacaccattaagcctattttgcttgattagtgccctgcaacacttcatatgttcaagacaaaatccatacccatgtctattgttgtatgatattatttgcattgaccgttgctgctcttcttgattgcagtcactaacattgcattaatctatgtgatacatttattcaggcgattcccatttctcagtgatgtcgatgtcctgtactcctgtatatttggattcaacaatatgccattagtatgctgtcaagcgtcctatttgcaagagataaatggcttacgcccgaggggcttattcttccttatcatggtatgatataattatcatacaaaaatgttacactgcttttacagggtgtacctcatctatttgcttgtacaattcatcttactactgctttgacaaacattggtctgctctgctttggtctgtgctttaggattctgtttcattgggagaaacaaatgcccttgcttactttcattataactgtgctatttttttgatccaatgttgttctaagatcaagaagtggaatacttgttctaagggtcccaagttgggtggtggtggtgggaagcgttttcaggtcggtcgtgactttggttatccactgaaaagatatgcttggtggtgctttcttgtgttgaagaacaagtatcccacggaaccacaaccgtttgtattatctggtgatttcctacattattagctggcctaactaaaccatgcgctcagaccctaaaccagctgtaagtctgtaacttaaaagcacagtgcactagcggaatggggttccttgctttttggagcgtttccccagtcagatcggcggcagggcaggtcacgtggacggggctccttgttgctggaactaaataccgtggagagtttgaagtgagactaaagaaacttatggaggaaattaagcaaaatgaagacattattctctttattgattaagtgcacacactgattggagcagtgcattggtgccacaacactggatgagtataggaagcatatagagaaagatcctgccttggaaagaaggtttcaaccagttaaggttccagagcctactatggatgaaacaatacagatcttaagaggacttcgtgagagatatgaacttcatcacaaactgagatacacagatgatgctttaattgctgctgcacagctgtcttatcagtatatcagcgatcgttttctgcctgacaaagccattgacttgattgatgaagctggatctcgtgttaggctgaggcatgcgcagctccctgatgaagccaaagagctggacaaagagctgcggcagataagcaagcagaaaaatgaggctgtacgtggccaagattttgagaaggtatactgttgtttggcacagcggtgacaaagccgatccgctcccacctctctagcaacgtcgatatggttaataccaagcattatgttgtttccttttgagataaatattttgttactgattttaccttttgtctcctcttcttgttttttgttctagaatctgtagcaaatggctaacgatgaggatatccattactttgtttatgacaataaaactgatatgttcaagattccgtagcaacgcacgggcatctaactagtct

SEQ ID NO: 221215 - DNA, 2639 bp, Zea Mays
cgaggctgtacgcgctctgcgtcagcctgctggcctggaacaccgtcgtctactcgctcacgttcctgagtgctgcatctgccttgcgtagtacggggagaaggaggaggttcggcagctgccgtgcacacacgtgtttcatctcaagtgcatatacaggtggctcaggatcatctcctcttgccctctctgcaagcaagagctcaagtgaactttatattcattacacacatgacattctcgcttattctttggatcaaggtgttagtatcctagacacaacagatattttccagctaacaagggaaatcaaggaagaattgatctttatattagcaggcggatgcaatcactaatcaaaaccacgatgcaaggtaacctaaatggattttaaattttattttggattgttaaatctttatttctgactactattgttttatgtcgtggatgccctcgtgaggttctacgccgacgccttcaggagggattcacagaggccatggtgaggatggccagcttgagtcggctcaccgggagcagcgcgagatccgctacaactaaatgataggaggtattttctagaaattacaaccccacctctgtcaggccttctgttgagtgaatttggtttgcacaccctcaccctgcacgctcttaccggactaccgctcctagcacccactcacacgagattgcaccccgctcgccatgccaccatagatccagctagggcgacatcattgtgggcaatcctgtgcgagagaatgtgaaattgttgtaggattgataatgaccaggggtttctccgcccacatgcaccaggtttcgctgccatttgcagcgactgtgttccagttcgaccgtttggggaaaaggtgagtcctcccatttcatgtagatgcatgggttgataaacatttgggagaaatgtcccctctttaattcgaaaaatagttgtgtatttgttcgacttatctgcggcgatgtacctttgtacgcgtacaaacatctatagacaaaaacaaaatgacacttcatggatgtagcaagagcgggctacgagaaactagcagatcatgcctaaaattcaattagcattagggtcagacaaaatactacattttctggattacaataatgtataggtgcatgaaaaaaacttgattccaatgtgtgacaaagtgtgaagatgaaagtgcactttcacgctgtcataacgcggatttgttttccttgctcatggaatgtgcatttgtgtgtttgcgtctactgtgcggctacaggcaaggaaacaggatctgtcacggaaggtatgtacacattacagtaaacgttgttcgtagaacatgcactttgtggagtggtctttgaatgagatgcgtttagaattaccttttcatgcagatctcttgttcagaacctggttgcttagtccattcttgttttgggttgctactacaaaaaagcggcaatgctttatatgaatcgcctcttactaatatccagggtcaaatggtggtccttcagtgaccagactaatatttgagcattaatcttatttgtttcacagtcatttcttgtttatcaatatgaatgctatttttttgcgagtggacttgttaactaataagctcatagatatttgaacaaaaaatagtgttttgttctaaaactgtcataaagagtgcatacatcatagctatggtttcaactgtgatttgatgtcctataatattgagtgtcctatagtgtgttgttctgaaacagtcacaaagagggcctaagaagctgatggaatcctcattcaccgccgctaaggagtttgagcgggatcggagaggagacgcgattcccatttctcagtgatgtcgatgtcctgtactcctgtatatttggattcaacaatatgccattagtatgctgtcaagcgtcctatttgcaagagataaatggcttacgcccgaggggcttattcttccttatcatgtgcattggtgccacaacactggatgagtataggaagcatatagagaaagatcctgccttggaaagaaggtttcaaccagttaaggttccagagcctactatggatgaaacaatacagatcttaagaggacttcgtgagagatatgaacttcatcacaaactgagatacacagatgatgctttaattgctgctgcacagctgtcttatcagtatatcagcgatcgttttctgcctgacaaagccattgacttgattgatgaagctggatctcgtgttaggctgaggcatgcgcagctccctgatgaagccaaagagctggacaaagagctgcggcagataagcaagcagaaaaatgaggctgtacgtggccaagattttgagaaggtatactgttgtttggcacagcggtgacaaagccgatccgctcccacctctctagcaacgtcgatatggttaataccaagcattatgttgtttccttttgagataaatattttgttactgattttaccttttgtctcctcttcttgttttttgttctagaatctgtagcaaatggctaacgatgaggatatccattactttgtttatgacaataaaactgatatgttcaagattccgtagcaacgcacgggcatctaactagtct

SEQ ID NO: 221216 - DNA, 1719 bp, Zea Mays
acgcgctctgcgtcagcctgctggcctggaacaccgtcgtctactcgctcacgttcctgagtgctgcatctgccttgcgtagtacggggagaaggaggaggttcggcagctgccgtgcacacacgtgtttcatctcaagtgcatatacagttccagctaacaagggaaatcaaggaagaattgatctttatattagcaggcggatgcaatcactaatcaaaaccacgatgcaaggtaacctaaatggattttaaattttattttggattgttaaatctttatttctgactactattgttttatgtcgtggatgccctcgtgaggttctacgccgacgccttcaggagggattcacagaggccatggtgaggatggccagcttgagtcggctcaccgggagcagcgcgagatccgctacaactaaatgataggaggcgattcccatttctcagtgatgtcgatgtcctgtactcctgtatatttggattcaacaatatgccattagtatgctgtcaagcgtcctatttgcaagagataaatggcttacgcccgaggggcttattcttccttatcatggtcggtcgtgactttggttatccactgaaaagatatgcttggtggtgctttcttgtgttgaagaacaagtatcccacggaaccacaaccgtttgtattatctggtgatttcctacattattagctggcctaactaaaccatgcgctcagaccctaaaccagctgtaagtctgtaacttaaaagcacagtgcactagcggaatggggttccttgctttttggagcgtttccccagtcagatcggcggcagggcaggtcacgtggacggggctccttgttgctggaactaaataccgtggagagtttgaagtgagactaaagaaacttatggaggaaattaagcaaaatgaagacattattctctttattgattaagtgcacacactgattggagcaggtgcagcagaaggtgtaattgatgctgctaatattttgaagccagcattttgtaattttcccaaaataaccacattgctggtgattttatctgtgtagtgcattggtgccacaacactggatgagtataggaagcatatagagaaagatcctgccttggaaagaaggtttcaaccagttaaggttccagagcctactatggatgaaacaatacagatcttaagaggacttcgtgagagatatgaacttcatcacaaactgagatacacagatgatgctttaattgctgctgcacagctgtcttatcagtatatcagcgatcgttttctgcctgacaaagccattgacttgattgatgaagctggatctcgtgttaggctgaggcatgcgcagctccctgatgaagccaaagagctggacaaagagctgcggcagataagcaagcagaaaaatgaggctgtacgtggccaagattttgagaaggtatactgttgtttggcacagcggtgacaaagccgatccgctcccacctctctagcaacgtcgatatggttaataccaagcattatgttgtttccttttgagataaatattttgttactgattttaccttttgtctcctcttcttgttttttgttctagaatctgtagcaaatggctaacgatgaggatatccattactttgtttatgacaataaaactgatatgttcaagattccgtagcaacgcacgggcatctaactagtct

SEQ ID NO: 221217 - DNA, 1220 bp, Zea Mays
ctctgcgtcagcctgctggcctggaacaccgtcgtctactcgctcacgttcctgagtgctgcatctgccttgcgtagtacggggagaaggaggaggttcggcagctgccgtgcacacacgtgtttcatctcaagtgcatatacagttccagctaacaagggaaatcaaggaagaattgatctttatattagcaggcggatgcaatcactaatcaaaaccacgatgcaaggtaacctaaatggattttaaattttattttggattgttaaatctttatttctgactactattgttttatgtcgtggatgccctcgtgaggttctacgccgacgccttcaggagggattcacagaggccatggtgaggatggccagcttgagtcggctcaccgggagcagcgcgagatccgctacaactaaatgataggaggcgattcccatttctcagtgatgtcgatgtcctgtactcctgtatatttggattcaacaatatgccattagtatgctgtcaagcgtcctatttgcaagagataaatggcttacgcccgaggggcttattcttccttatcatgtgcattggtgccacaacactggatgagtataggaagcatatagagaaagatcctgccttggaaagaaggtttcaaccagttaaggttccagagcctactatggatgaaacaatacagatcttaagaggacttcgtgagagatatgaacttcatcacaaactgagatacacagatgatgctttaattgctgctgcacagctgtcttatcagtatatcagcgatcgttttctgcctgacaaagccattgacttgattgatgaagctggatctcgtgttaggctgaggcatgcgcagctccctgatgaagccaaagagctggacaaagagctgcggcagataagcaagcagaaaaatgaggctgtacgtggccaagattttgagaaggtatactgttgtttggcacagcggtgacaaagccgatccgctcccacctctctagcaacgtcgatatggttaataccaagcattatgttgtttccttttgagataaatattttgttactgattttaccttttgtctcctcttcttgttttttgttctagaatctgtagcaaatggctaacgatgaggatatccattactttgtttatgacaataaaactgatatgttcaagattccgtagcaacgcacgggcatctaactagtct

SEQ ID NO: 221218 - DNA, 2481 bp, Zea Mays
ctggcctggaacaccgtcgtctactcgctcacgttcctgagtgctgcatctgccttgcgtagtacggggagaaggaggaggttcggcagctgccgtgcacacacgtgtttcatctcaagtgcatatacaggtggctcaggatcatctcctcttgccctctctgcaagcaagagctcaagtgaactttatattcattacacacatgacattctcgcttattctttggatcaaggtttccagctaacaagggaaatcaaggaagaattgatctttatattagcaggcggatgcaatcactaatcaaaaccacgatgcaaggtaacctaaatggattttaaattttattttggattgttaaatctttatttctgactactattgttttatgtcgtggatgccctcgtgaggttctacgccgacgccttcaggagggattcacagaggccatggtgaggatggccagcttgagtcggctcaccgggagcagcgcgagatccgctacaactaaatgataggaggcaaggaaacaggatctgtcacggaagtgtgttgttctgaaacagtcacaaagagggcctaagaagctgatggaatcctcattcaccgccgctaaggagtttgagcgggatcggagaggagacgtcagttcttcctcctctgctcaatgcggccattcgccctgtcccccaaccctgaactccacactgccactccgtgctcattttttctgaaggggaaatattcatctccttgttgttttgtaccatggatactttagcatcattctcatactactaggagtgtaggtaaggagtccacacacgagtttgcaaacaccattaagcctattttgcttgattagtgccctgcaacacttcatatgttcaagacaaaatccatacccatgtctattgttgtatgatattatttgcattgaccgttgctgctcttcttgattgcagtcactaacattgcattaatctatgtgatacatttattcaggcgattcccatttctcagtgatgtcgatgtcctgtactcctgtatatttggattcaacaatatgccattagtatgctgtcaagcgtcctatttgcaagagataaatggcttacgcccgaggggcttattcttccttatcatggtatgatataattatcatacaaaaatgttacactgcttttacagggtgtacctcatctatttgcttgtacaattcatcttactactgctttgacaaacattggtctgctctgctttggtctgtgctttaggattctgtttcattgggagaaacaaatgcccttgcttactttcattataactgtgctatttttttgatccaatgttgttctaagatcaagaagtggaatacttgttctaagggtcccaagttgggtggtggtggtgggaagcgttttcaggtcggtcgtgactttggttatccactgaaaagatatgcttggtggtgctttcttgtgttgaagaacaagtatcccacggaaccacaaccgtttgtattatctggtgatttcctacattattagctggcctaactaaaccatgcgctcagaccctaaaccagctgtaagtctgtaacttaaaagcacagtgcactagcggaatggggttccttgctttttggagcgtttccccagtcagatcggcggcagggcaggtcacgtggacggggctccttgttgctggaactaaataccgtggagagtttgaagtgagactaaagaaacttatggaggaaattaagcaaaatgaagacattattctctttattgattaagtgcacacactgattggagcaggtgcagcagaagtgcattggtgccacaacactggatgagtataggaagcatatagagaaagatcctgccttggaaagaaggtttcaaccagttaaggttccagagcctactatggatgaaacaatacagatcttaagaggacttcgtgagagatatgaacttcatcacaaactgagatacacagatgatgctttaattgctgctgcacagctgtcttatcagtatatcagcgatcgttttctgcctgacaaagccattgacttgattgatgaagctggatctcgtgttaggctgaggcatgcgcagctccctgatgaagccaaagagctggacaaagagctgcggcagataagcaagcagaaaaatgaggctgtacgtggccaagattttgagaaggtatactgttgtttggcacagcggtgacaaagccgatccgctcccacctctctagcaacgtcgatatggttaataccaagcattatgttgtttccttttgagataaatattttgttactgattttaccttttgtctcctcttcttgttttttgttctagaatctgtagcaaatggctaacgatgaggatatccattactttgtttatgacaataaaactgatatgttcaagattccgtagcaacgcacgggcatctaactagtct

SEQ ID NO: 221219 - DNA, 1651 bp, Zea Mays
ctggcctggaacaccgtcgtctactcgctcacgttcctgagtgctgcatctgccttgcgtagtacggggagaaggaggaggttcggcagctgccgtgcacacacgtgtttcatctcaagtgcatatacaggtgttagtatcctagacacaacagatattttccagctaacaagggaaatcaaggaagaattgatctttatattagcaggcggatgcaatcactaatcaaaaccacgatgcaaggtaacctaaatggattttaaattttattttggattgttaaatctttatttctgactactattgttttatgtcgtggatgccctcgtgaggttctacgccgacgccttcaggagggattcacagaggccatggtgaggatggccagcttgagtcggctcaccgggagcagcgcgagatccgctacaactaaatgataggaggcgattcccatttctcagtgatgtcgatgtcctgtactcctgtatatttggattcaacaatatgccattagtatgctgtcaagcgtcctatttgcaagagataaatggcttacgcccgaggggcttattcttccttatcatgcgttttcaggtcggtcgtgactttggttatccactgaaaagatatgcttggtggtgctttcttgtgttgaagaacaagtatcccacggaaccacaaccgtttgtattatctggtgatttcctacattattagctggcctaactaaaccatgcgctcagaccctaaaccagctgtaagtctgtaacttaaaagcacagtgcactagcggaatggggttccttgctttttggagcgtttccccagtcagatcggcggcagggcaggtcacgtggacggggctccttgttgctggaactaaataccgtggagagtttgaagtgagactaaagaaacttatggaggaaattaagcaaaatgaagacattattctctttattgattaagtgcacacactgattggagcaggtgcagcagaagtgcattggtgccacaacactggatgagtataggaagcatatagagaaagatcctgccttggaaagaaggtttcaaccagttaaggttccagagcctactatggatgaaacaatacagatcttaagaggacttcgtgagagatatgaacttcatcacaaactgagatacacagatgatgctttaattgctgctgcacagctgtcttatcagtatatcagcgatcgttttctgcctgacaaagccattgacttgattgatgaagctggatctcgtgttaggctgaggcatgcgcagctccctgatgaagccaaagagctggacaaagagctgcggcagataagcaagcagaaaaatgaggctgtacgtggccaagattttgagaaggtatactgttgtttggcacagcggtgacaaagccgatccgctcccacctctctagcaacgtcgatatggttaataccaagcattatgttgtttccttttgagataaatattttgttactgattttaccttttgtctcctcttcttgttttttgttctagaatctgtagcaaatggctaacgatgaggatatccattactttgtttatgacaataaaactgatatgttcaagattccgtagcaacgcacgggcatctaactagtct

SEQ ID NO: 221220 - DNA, 1748 bp, Zea Mays
caccgtcgtctactcgctcacgttcctgagtgctgcatctgccttgcgtagtacggggagaaggaggaggttcggcagctgccgtgcacacacgtgtttcatctcaagtgcatatacaggtggctcaggatcatctcctcttgccctctctgcaagcaagagctcaagtgaactttatattcattacacacatgacattctcgcttattctttggatcaaggtgttagtatcctagacacaacagatattttccagctaacaagggaaatcaaggaagaattgatctttatattagcaggcggatgcaatcactaatcaaaaccacgatgcaaggtaacctaaatggattttaaattttattttggattgttaaatctttatttctgactactattgttttatgtcgtggatgccctcgtgaggttctacgccgacgccttcaggagggattcacagaggccatggtgaggatggccagcttgagtcggctcaccgggagcagcgcgagatccgctacaactaaatgataggaggcaaggaaacaggatctgtcacggaaggcgattcccatttctcagtgatgtcgatgtcctgtactcctgtatatttggattcaacaatatgccattagtatgctgtcaagcgtcctatttgcaagagataaatggcttacgcccgaggggcttattcttccttatcatggtcggtcgtgactttggttatccactgaaaagatatgcttggtggtgctttcttgtgttgaagaacaagtatcccacggaaccacaaccgtttgtattatctggtgatttcctacattattagctggcctaactaaaccatgcgctcagaccctaaaccagctgtaagtctgtaacttaaaagcacagtgcactagcggaatggggttccttgctttttggagcgtttccccagtcagatcggcggcagggcaggtcacgtggacggggctccttgttgctggaactaaataccgtggagagtttgaagtgagactaaagaaacttatggaggaaattaagcaaaatgaagacattattctctttattgattaagtgcacacactgattggagcagtgcattggtgccacaacactggatgagtataggaagcatatagagaaagatcctgccttggaaagaaggtttcaaccagttaaggttccagagcctactatggatgaaacaatacagatcttaagaggacttcgtgagagatatgaacttcatcacaaactgagatacacagatgatgctttaattgctgctgcacagctgtcttatcagtatatcagcgatcgttttctgcctgacaaagccattgacttgattgatgaagctggatctcgtgttaggctgaggcatgcgcagctccctgatgaagccaaagagctggacaaagagctgcggcagataagcaagcagaaaaatgaggctgtacgtggccaagattttgagaaggtatactgttgtttggcacagcggtgacaaagccgatccgctcccacctctctagcaacgtcgatatggttaataccaagcattatgttgtttccttttgagataaatattttgttactgattttaccttttgtctcctcttcttgttttttgttctagaatctgtagcaaatggctaacgatgaggatatccattactttgtttatgacaataaaactgatatgttcaagattccgtagcaacgcacgggcatctaactagtct

SEQ ID NO: 221221 - DNA, 1787 bp, Zea Mays
gtcgtctactcgctcacgttcctgagtgctgcatctgccttgcgtagtacggggagaaggaggaggttcggcagctgccgtgcacacacgtgtttcatctcaagtgcatatacaggtggctcaggatcatctcctcttgccctctctgcaagcaagagctcaagtgaactttatattcattacacacatgacattctcgcttattctttggatcaaggtgttagtatcctagacacaacagatattttccagctaacaagggaaatcaaggaagaattgatctttatattagcaggcggatgcaatcactaatcaaaaccacgatgcaaggtaacctaaatggattttaaattttattttggattgttaaatctttatttctgactactattgttttatgtcgtggatgccctcgtgaggttctacgccgacgccttcaggagggattcacagaggccatggtgaggatggccagcttgagtcggctcaccgggagcagcgcgagatccgctacaactaaatgataggaggtttcgctgccatttgcagcgactgtgttccagttcgaccgtttggggaaaaggcaaggaaacaggatctgtcacggaagtgtgttgttctgaaacagtcacaaagagggcctaagaagctgatggaatcctcattcaccgccgctaaggagtttgagcgggatcggagaggagacgtcagttcttcctcctctgctcaatgcggccattcgccctgtcccccaaccctgaactccacactgccactccgtgctcattttttctgaaggggaaatattcatctccttgttgttttgtaccatggatactttagcatcattctcatactactaggagtgtaggtaaggagtccacacacgagtttgcaaacaccattaagcctattttgcttgattagtgccctgcaacacttcatatgttcaagacaaaatccatacccatgtctattgttgtatgatattatttgcattgaccgttgctgctcttcttgattgcagtcactaacattgcattaatctatgtgatacatttattcaggcgattcccatttctcagtgatgtcgatgtcctgtactcctgtatatttggattcaacaatatgccattagtgcattggtgccacaacactggatgagtataggaagcatatagagaaagatcctgccttggaaagaaggtttcaaccagttaaggttccagagcctactatggatgaaacaatacagatcttaagaggacttcgtgagagatatgaacttcatcacaaactgagatacacagatgatgctttaattgctgctgcacagctgtcttatcagtatatcagcgatcgttttctgcctgacaaagccattgacttgattgatgaagctggatctcgtgttaggctgaggcatgcgcagctccctgatgaagccaaagagctggacaaagagctgcggcagataagcaagcagaaaaatgaggctgtacgtggccaagattttgagaaggtatactgttgtttggcacagcggtgacaaagccgatccgctcccacctctctagcaacgtcgatatggttaataccaagcattatgttgtttccttttgagataaatattttgttactgattttaccttttgtctcctcttcttgttttttgttctagaatctgtagcaaatggctaacgatgaggatatccattactttgtttatgacaataaaactgatatgttcaagattccgtagcaacgcacgggcatctaactagtct

SEQ ID NO: 221222 - DNA, 2562 bp, Zea Mays
ctcacgttcctgagtgctgcatctgccttgcgtagtacggggagaaggaggaggttcggcagctgccgtgcacacacgtgtttcatctcaagtgcatatacagttccagctaacaagggaaatcaaggaagaattgatctttatattagcaggcggatgcaatcactaatcaaaaccacgatgcaaggtaacctaaatggattttaaattttattttggattgttaaatctttatttctgactactattgttttatgtcgtggatgccctcgtgaggttctacgccgacgccttcaggagggattcacagaggccatggtgaggatggccagcttgagtcggctcaccgggagcagcgcgagatccgctacaactaaatgataggaggtttcgctgccatttgcagcgactgtgttccagttcgaccgtttggggaaaaggtgagtcctcccatttcatgtagatgcatgggttgataaacatttgggagaaatgtcccctctttaattcgaaaaatagttgtgtatttgttcgacttatctgcggcgatgtacctttgtacgcgtacaaacatctatagacaaaaacaaaatgacacttcatggatgtagcaagagcgggctacgagaaactagcagatcatgcctaaaattcaattagcattagggtcagacaaaatactacattttctggattacaataatgtataggtgcatgaaaaaaacttgattccaatgtgtgacaaagtgtgaagatgaaagtgcactttcacgctgtcataacgcggatttgttttccttgctcatggaatgtgcatttgtgtgtttgcgtctactgtgcggctacaggcaaggaaacaggatctgtcacggaaggtatgtacacattacagtaaacgttgttcgtagaacatgcactttgtggagtggtctttgaatgagatgcgtttagaattaccttttcatgcagatctcttgttcagaacctggttgcttagtccattcttgttttgggttgctactacaaaaaagcggcaatgctttatatgaatcgcctcttactaatatccagggtcaaatggtggtccttcagtgaccagactaatatttgagcattaatcttatttgtttcacagtcatttcttgtttatcaatatgaatgctatttttttgcgagtggacttgttaactaataagctcatagatatttgaacaaaaaatagtgttttgttctaaaactgtcataaagagtgcatacatcatagctatggtttcaactgtgatttgatgtcctataatattgagtgtcctatagtgtgttgttctgaaacagtcacaaagagggcctaagaagctgatggaatcctcattcaccgccgctaaggagtttgagcgggatcggagaggagacgtcagttcttcctcctctgctcaatgcggccattcgccctgtcccccaaccctgaactccacactgccactccgtgctcattttttctgaaggggaaatattcatctccttgttgttttgtaccatggatactttagcatcattctcatactactaggagtgtaggtaaggagtccacacacgagtttgcaaacaccattaagcctattttgcttgattagtgccctgcaacacttcatatgttcaagacaaaatccatacccatgtctattgttgtatgatattatttgcattgaccgttgctgctcttcttgattgcagtcactaacattgcattaatctatgtgatacatttattcaggcgattcccatttctcagtgatgtcgatgtcctgtactcctgtatatttggattcaacaatatgccattagtatgctgtcaagcgtcctatttgcaagagataaatggcttacgcccgaggggcttattcttccttatcatgtgcattggtgccacaacactggatgagtataggaagcatatagagaaagatcctgccttggaaagaaggtttcaaccagttaaggttccagagcctactatggatgaaacaatacagatcttaagaggacttcgtgagagatatgaacttcatcacaaactgagatacacagatgatgctttaattgctgctgcacagctgtcttatcagtatatcagcgatcgttttctgcctgacaaagccattgacttgattgatgaagctggatctcgtgttaggctgaggcatgcgcagctccctgatgaagccaaagagctggacaaagagctgcggcagataagcaagcagaaaaatgaggctgtacgtggccaagattttgagaaggtatactgttgtttggcacagcggtgacaaagccgatccgctcccacctctctagcaacgtcgatatggttaataccaagcattatgttgtttccttttgagataaatattttgttactgattttaccttttgtctcctcttcttgttttttgttctagaatctgtagcaaatggctaacgatgaggatatccattactttgtttatgacaataaaactgatatgttcaagattccgtagcaacgcacgggcatctaactagtct

SEQ ID NO: 221223 - DNA, 1881 bp, Zea Mays
ctcacgttcctgagtgctgcatctgccttgcgtagtacggggagaaggaggaggttcggcagctgccgtgcacacacgtgtttcatctcaagtgcatatacagttccagctaacaagggaaatcaaggaagaattgatctttatattagcaggcggatgcaatcactaatcaaaaccacgatgcaaggtaacctaaatggattttaaattttattttggattgttaaatctttatttctgactactattgttttatgtcgtggatgccctcgtgaggttctacgccgacgccttcaggagggattcacagaggccatggtgaggatggccagcttgagtcggctcaccgggagcagcgcgagatccgctacaactaaatgataggaggcaaggaaacaggatctgtcacggaaggcgattcccatttctcagtgatgtcgatgtcctgtactcctgtatatttggattcaacaatatgccattagtatgctgtcaagcgtcctatttgcaagagataaatggcttacgcccgaggggcttattcttccttatcatggtatgatataattatcatacaaaaatgttacactgcttttacagggtgtacctcatctatttgcttgtacaattcatcttactactgctttgacaaacattggtctgctctgctttggtctgtgctttaggattctgtttcattgggagaaacaaatgcccttgcttactttcattataactgtgctatttttttgatccaatgttgttctaagatcaagaagtggaatacttgttctaagggtcccaagttgggtggtggtggtgggaagcgttttcaggtcggtcgtgactttggttatccactgaaaagatatgcttggtggtgctttcttgtgttgaagaacaagtatcccacggaaccacaaccgtttgtattatctggtgatttcctacattattagctggcctaactaaaccatgcgctcagaccctaaaccagctgtaagtctgtaacttaaaagcacagtgcactagcggaatggggttccttgctttttggagcgtttccccagtcagatcggcggcagggcaggtcacgtggacggggctccttgttgctggaactaaataccgtggagagtttgaagtgagactaaagaaacttatggaggaaattaagcaaaatgaagacattattctctttattgattaagtgcacacactgattggagcagtgcattggtgccacaacactggatgagtataggaagcatatagagaaagatcctgccttggaaagaaggtttcaaccagttaaggttccagagcctactatggatgaaacaatacagatcttaagaggacttcgtgagagatatgaacttcatcacaaactgagatacacagatgatgctttaattgctgctgcacagctgtcttatcagtatatcagcgatcgttttctgcctgacaaagccattgacttgattgatgaagctggatctcgtgttaggctgaggcatgcgcagctccctgatgaagccaaagagctggacaaagagctgcggcagataagcaagcagaaaaatgaggctgtacgtggccaagattttgagaaggtatactgttgtttggcacagcggtgacaaagccgatccgctcccacctctctagcaacgtcgatatggttaataccaagcattatgttgtttccttttgagataaatattttgttactgattttaccttttgtctcctcttcttgttttttgttctagaatctgtagcaaatggctaacgatgaggatatccattactttgtttatgacaataaaactgatatgttcaagattccgtagcaacgcacgggcatctaactagtct

SEQ ID NO: 221224 - DNA, 1716 bp, Zea Mays
gtaaaaacctgagtgctgcatctgccttgcgtagtacggggagaaggaggaggttcggcagctgccgtgcacacacgtgtttcatctcaagtgcatatacaggtggctcaggatcatctcctcttgccctctctgcaagcaagagctcaagtgaactttatattcattacacacatgacattctcgcttattctttggatcaaggtgttagtatcctagacacaacagatattttccagctaacaagggaaatcaaggaagaattgatctttatattagcaggcggatgcaatcactaatcaaaaccacgatgcaaggtaacctaaatggattttaaattttattttggattgttaaatctttatttctgactactattgttttatgtcgtggatgccctcgtgaggttctacgccgacgccttcaggagggattcacagaggccatggtgaggatggccagcttgagtcggctcaccgggagcagcgcgagatccgctacaactaaatgataggaggcgattcccatttctcagtgatgtcgatgtcctgtactcctgtatatttggattcaacaatatgccattagtatgctgtcaagcgtcctatttgcaagagataaatggcttacgcccgaggggcttattcttccttatcatggtcggtcgtgactttggttatccactgaaaagatatgcttggtggtgctttcttgtgttgaagaacaagtatcccacggaaccacaaccgtttgtattatctggtgatttcctacattattagctggcctaactaaaccatgcgctcagaccctaaaccagctgtaagtctgtaacttaaaagcacagtgcactagcggaatggggttccttgctttttggagcgtttccccagtcagatcggcggcagggcaggtcacgtggacggggctccttgttgctggaactaaataccgtggagagtttgaagtgagactaaagaaacttatggaggaaattaagcaaaatgaagacattattctctttattgattaagtgcacacactgattggagcaggtgcagcagaagtgcattggtgccacaacactggatgagtataggaagcatatagagaaagatcctgccttggaaagaaggtttcaaccagttaaggttccagagcctactatggatgaaacaatacagatcttaagaggacttcgtgagagatatgaacttcatcacaaactgagatacacagatgatgctttaattgctgctgcacagctgtcttatcagtatatcagcgatcgttttctgcctgacaaagccattgacttgattgatgaagctggatctcgtgttaggctgaggcatgcgcagctccctgatgaagccaaagagctggacaaagagctgcggcagataagcaagcagaaaaatgaggctgtacgtggccaagattttgagaaggtatactgttgtttggcacagcggtgacaaagccgatccgctcccacctctctagcaacgtcgatatggttaataccaagcattatgttgtttccttttgagataaatattttgttactgattttaccttttgtctcctcttcttgttttttgttctagaatctgtagcaaatggctaacgatgaggatatccattactttgtttatgacaataaaactgatatgttcaagattccgtagcaacgcacgggcatctaactagtct

SEQ ID NO: 221225 - DNA, 1700 bp, Zea Mays
aaaaacctgagtgctgcatctgccttgcgtagtacggggagaaggaggaggttcggcagctgccgtgcacacacgtgtttcatctcaagtgcatatacaggtggctcaggatcatctcctcttgccctctctgcaagcaagagctcaagtgaactttatattcattacacacatgacattctcgcttattctttggatcaagttccagctaacaagggaaatcaaggaagaattgatctttatattagcaggcggatgcaatcactaatcaaaaccacgatgcaaggtaacctaaatggattttaaattttattttggattgttaaatctttatttctgactactattgttttatgtcgtggatgccctcgtgaggttctacgccgacgccttcaggagggattcacagaggccatggtgaggatggccagcttgagtcggctcaccgggagcagcgcgagatccgctacaactaaatgataggaggcaaggaaacaggatctgtcacggaaggcgattcccatttctcagtgatgtcgatgtcctgtactcctgtatatttggattcaacaatatgccattagtatgctgtcaagcgtcctatttgcaagagataaatggcttacgcccgaggggcttattcttccttatcatggtcggtcgtgactttggttatccactgaaaagatatgcttggtggtgctttcttgtgttgaagaacaagtatcccacggaaccacaaccgtttgtattatctggtgatttcctacattattagctggcctaactaaaccatgcgctcagaccctaaaccagctgtaagtctgtaacttaaaagcacagtgcactagcggaatggggttccttgctttttggagcgtttccccagtcagatcggcggcagggcaggtcacgtggacggggctccttgttgctggaactaaataccgtggagagtttgaagtgagactaaagaaacttatggaggaaattaagcaaaatgaagacattattctctttattgattaagtgcacacactgattggagcagtgcattggtgccacaacactggatgagtataggaagcatatagagaaagatcctgccttggaaagaaggtttcaaccagttaaggttccagagcctactatggatgaaacaatacagatcttaagaggacttcgtgagagatatgaacttcatcacaaactgagatacacagatgatgctttaattgctgctgcacagctgtcttatcagtatatcagcgatcgttttctgcctgacaaagccattgacttgattgatgaagctggatctcgtgttaggctgaggcatgcgcagctccctgatgaagccaaagagctggacaaagagctgcggcagataagcaagcagaaaaatgaggctgtacgtggccaagattttgagaaggtatactgttgtttggcacagcggtgacaaagccgatccgctcccacctctctagcaacgtcgatatggttaataccaagcattatgttgtttccttttgagataaatattttgttactgattttaccttttgtctcctcttcttgttttttgttctagaatctgtagcaaatggctaacgatgaggatatccattactttgtttatgacaataaaactgatatgttcaagattccgtagcaacgcacgggcatctaactagtct

SEQ ID NO: 221226 - DNA, 2625 bp, Zea Mays
tctgtgctctgggagtgctgcatctgccttgcgtagtacggggagaaggaggaggttcggcagctgccgtgcacacacgtgtttcatctcaagtgcatatacagttccagctaacaagggaaatcaaggaagaattgatctttatattagcaggcggatgcaatcactaatcaaaaccacgatgcaaggtaacctaaatggattttaaattttattttggattgttaaatctttatttctgactactattgttttatgtcgtggatgccctcgtgaggttctacgccgacgccttcaggagggattcacagaggccatggtgaggatggccagcttgagtcggctcaccgggagcagcgcgagatccgctacaactaaatgataggaggtattttctagaaattacaaccccacctctgtcaggccttctgttgagtgaatttggtttgcacaccctcaccctgcacgctcttaccggactaccgctcctagcacccactcacacgagattgcaccccgctcgccatgccaccatagatccagctagggcgacatcattgtgggcaatcctgtgcgagagaatgtgaaattgttgtaggattgataatgaccaggggtttctccgcccacatgcaccaggtttcgctgccatttgcagcgactgtgttccagttcgaccgtttggggaaaaggcaaggaaacaggatctgtcacggaagtcacaaagagggcctaagaagctgatggaatcctcattcaccgccgctaaggagtttgagcgggatcggagaggagacgtcagttcttcctcctctgctcaatgcggccattcgccctgtcccccaaccctgaactccacactgccactccgtgctcattttttctgaaggggaaatattcatctccttgttgttttgtaccatggatactttagcatcattctcatactactaggagtgtaggtaaggagtccacacacgagtttgcaaacaccattaagcctattttgcttgattagtgccctgcaacacttcatatgttcaagacaaaatccatacccatgtctattgttgtatgatattatttgcattgaccgttgctgctcttcttgattgcagtcactaacattgcattaatctatgtgatacatttattcaggcgattcccatttctcagtgatgtcgatgtcctgtactcctgtatatttggattcaacaatatgccattagtatgctgtcaagcgtcctatttgcaagagataaatggcttacgcccgaggggcttattcttccttatcatggtatgatataattatcatacaaaaatgttacactgcttttacagggtgtacctcatctatttgcttgtacaattcatcttactactgctttgacaaacattggtctgctctgctttggtctgtgctttaggattctgtttcattgggagaaacaaatgcccttgcttactttcattataactgtgctatttttttgatccaatgttgttctaagatcaagaagtggaatacttgttctaagggtcccaagttgggtggtggtggtgggaagcgttttcaggtcggtcgtgactttggttatccactgaaaagatatgcttggtggtgctttcttgtgttgaagaacaagtatcccacggaaccacaaccgtttgtattatctggtgatttcctacattattagctggcctaactaaaccatgcgctcagaccctaaaccagctgtaagtctgtaacttaaaagcacagtgcactagcggaatggggttccttgctttttggagcgtttccccagtcagatcggcggcagggcaggtcacgtggacggggctccttgttgctggaactaaataccgtggagagtttgaagtgagactaaagaaacttatggaggaaattaagcaaaatgaagacattattctctttattgattaagtgcacacactgattggagcagtgcattggtgccacaacactggatgagtataggaagcatatagagaaagatcctgccttggaaagaaggtttcaaccagttaaggttccagagcctactatggatgaaacaatacagatcttaagaggacttcgtgagagatatgaacttcatcacaaactgagatacacagatgatgctttaattgctgctgcacagctgtcttatcagtatatcagcgatcgttttctgcctgacaaagccattgacttgattgatgaagctggatctcgtgttaggctgaggcatgcgcagctccctgatgaagccaaagagctggacaaagagctgcggcagataagcaagcagaaaaatgaggctgtacgtggccaagattttgagaaggtatactgttgtttggcacagcggtgacaaagccgatccgctcccacctctctagcaacgtcgatatggttaataccaagcattatgttgtttccttttgagataaatattttgttactgattttaccttttgtctcctcttcttgttttttgttctagaatctgtagcaaatggctaacgatgaggatatccattactttgtttatgacaataaaactgatatgttcaagattccgtagcaacgcacgggcatctaactagtct

SEQ ID NO: 221227 - DNA, 2693 bp, Zea Mays
ctgtgctctgggagtgctgcatctgccttgcgtagtacggggagaaggaggaggttcggcagctgccgtgcacacacgtgtttcatctcaagtgcatatacaggtggctcaggatcatctcctcttgccctctctgcaagcaagagctcaagtgaactttatattcattacacacatgacattctcgcttattctttggatcaaggtgttagtatcctagacacaacagatattttccagctaacaagggaaatcaaggaagaattgatctttatattagcaggcggatgcaatcactaatcaaaaccacgatgcaaggtaacctaaatggattttaaattttattttggattgttaaatctttatttctgactactattgttttatgtcgtggatgccctcgtgaggttctacgccgacgccttcaggagggattcacagaggccatggtgaggatggccagcttgagtcggctcaccgggagcagcgcgagatccgctacaactaaatgataggaggtttcgctgccatttgcagcgactgtgttccagttcgaccgtttggggaaaaggtgagtcctcccatttcatgtagatgcatgggttgataaacatttgggagaaatgtcccctctttaattcgaaaaatagttgtgtatttgttcgacttatctgcggcgatgtacctttgtacgcgtacaaacatctatagacaaaaacaaaatgacacttcatggatgtagcaagagcgggctacgagaaactagcagatcatgcctaaaattcaattagcattagggtcagacaaaatactacattttctggattacaataatgtataggtgcatgaaaaaaacttgattccaatgtgtgacaaagtgtgaagatgaaagtgcactttcacgctgtcataacgcggatttgttttccttgctcatggaatgtgcatttgtgtgtttgcgtctactgtgcggctacaggcaaggaaacaggatctgtcacggaaggtatgtacacattacagtaaacgttgttcgtagaacatgcactttgtggagtggtctttgaatgagatgcgtttagaattaccttttcatgcagatctcttgttcagaacctggttgcttagtccattcttgttttgggttgctactacaaaaaagcggcaatgctttatatgaatcgcctcttactaatatccagggtcaaatggtggtccttcagtgaccagactaatatttgagcattaatcttatttgtttcacagtcatttcttgtttatcaatatgaatgctatttttttgcgagtggacttgttaactaataagctcatagatatttgaacaaaaaatagtgttttgttctaaaactgtcataaagagtgcatacatcatagctatggtttcaactgtgatttgatgtcctataatattgagtgtcctatagtgtgttgttctgaaacagtcacaaagagggcctaagaagctgatggaatcctcattcaccgccgctaaggagtttgagcgggatcggagaggagacgtcagttcttcctcctctgctcaatgcggccattcgccctgtcccccaaccctgaactccacactgccactccgtgctcattttttctgaaggggaaatattcatctccttgttgttttgtaccatggatactttagcatcattctcatactactaggagtgtaggtaaggagtccacacacgagtttgcaaacaccattaagcctattttgcttgattagtgccctgcaacacttcatatgttcaagacaaaatccatacccatgtctattgttgtatgatattatttgcattgaccgttgctgctcttcttgattgcagtcactaacattgcattaatctatgtgatacatttattcaggcgattcccatttctcagtgatgtcgatgtcctgtactcctgtatatttggattcaacaatatgccattagtatgctgtcaagcgtcctatttgcaagagataaatggcttacgcccgaggggcttattcttccttatcatgtgcattggtgccacaacactggatgagtataggaagcatatagagaaagatcctgccttggaaagaaggtttcaaccagttaaggttccagagcctactatggatgaaacaatacagatcttaagaggacttcgtgagagatatgaacttcatcacaaactgagatacacagatgatgctttaattgctgctgcacagctgtcttatcagtatatcagcgatcgttttctgcctgacaaagccattgacttgattgatgaagctggatctcgtgttaggctgaggcatgcgcagctccctgatgaagccaaagagctggacaaagagctgcggcagataagcaagcagaaaaatgaggctgtacgtggccaagattttgagaaggtatactgttgtttggcacagcggtgacaaagccgatccgctcccacctctctagcaacgtcgatatggttaataccaagcattatgttgtttccttttgagataaatattttgttactgattttaccttttgtctcctcttcttgttttttgttctagaatctgtagcaaatggctaacgatgaggatatccattactttgtttatgacaataaaactgatatgttcaagattccgtagcaacgcacgggcatctaactagtct

SEQ ID NO: 221228 - DNA, 1717 bp, Zea Mays
ctgtgctctgggagtgctgcatctgccttgcgtagtacggggagaaggaggaggttcggcagctgccgtgcacacacgtgtttcatctcaagtgcatatacaggtggctcaggatcatctcctcttgccctctctgcaagcaagagctcaagtgaactttatattcattacacacatgacattctcgcttattctttggatcaaggtgttagtatcctagacacaacagatattttccagctaacaagggaaatcaaggaagaattgatctttatattagcaggcggatgcaatcactaatcaaaaccacgatgcaaggtaacctaaatggattttaaattttattttggattgttaaatctttatttctgactactattgttttatgtcgtggatgccctcgtgaggttctacgccgacgccttcaggagggattcacagaggccatggtgaggatggccagcttgagtcggctcaccgggagcagcgcgagatccgctacaactaaatgataggaggcgattcccatttctcagtgatgtcgatgtcctgtactcctgtatatttggattcaacaatatgccattagtatgctgtcaagcgtcctatttgcaagagataaatggcttacgcccgaggggcttattcttccttatcatggtcggtcgtgactttggttatccactgaaaagatatgcttggtggtgctttcttgtgttgaagaacaagtatcccacggaaccacaaccgtttgtattatctggtgatttcctacattattagctggcctaactaaaccatgcgctcagaccctaaaccagctgtaagtctgtaacttaaaagcacagtgcactagcggaatggggttccttgctttttggagcgtttccccagtcagatcggcggcagggcaggtcacgtggacggggctccttgttgctggaactaaataccgtggagagtttgaagtgagactaaagaaacttatggaggaaattaagcaaaatgaagacattattctctttattgattaagtgcacacactgattggagcaggtgcagcagaagtgcattggtgccacaacactggatgagtataggaagcatatagagaaagatcctgccttggaaagaaggtttcaaccagttaaggttccagagcctactatggatgaaacaatacagatcttaagaggacttcgtgagagatatgaacttcatcacaaactgagatacacagatgatgctttaattgctgctgcacagctgtcttatcagtatatcagcgatcgttttctgcctgacaaagccattgacttgattgatgaagctggatctcgtgttaggctgaggcatgcgcagctccctgatgaagccaaagagctggacaaagagctgcggcagataagcaagcagaaaaatgaggctgtacgtggccaagattttgagaaggtatactgttgtttggcacagcggtgacaaagccgatccgctcccacctctctagcaacgtcgatatggttaataccaagcattatgttgtttccttttgagataaatattttgttactgattttaccttttgtctcctcttcttgttttttgttctagaatctgtagcaaatggctaacgatgaggatatccattactttgtttatgacaataaaactgatatgttcaagattccgtagcaacgcacgggcatctaactagtct

SEQ ID NO: 221229 - DNA, 2464 bp, Zea Mays
tgtgctctgggagtgctgcatctgccttgcgtagtacggggagaaggaggaggttcggcagctgccgtgcacacacgtgtttcatctcaagtgcatatacaggtggctcaggatcatctcctcttgccctctctgcaagcaagagctcaagtgaactttatattcattacacacatgacattctcgcttattctttggatcaaggtgttagtatcctagacacaacagatattttccagctaacaagggaaatcaaggaagaattgatctttatattagcaggcggatgcaatcactaatcaaaaccacgatgcaaggtaacctaaatggattttaaattttattttggattgttaaatctttatttctgactactattgttttatgtcgtggatgccctcgtgaggttctacgccgacgccttcaggagggattcacagaggccatggtgaggatggccagcttgagtcggctcaccgggagcagcgcgagatccgctacaactaaatgataggaggtattttctagaaattacaaccccacctctgtcaggccttctgttgagtgaatttggtttgcacaccctcaccctgcacgctcttaccggactaccgctcctagcacccactcacacgagattgcaccccgctcgccatgccaccatagatccagctagggcgacatcattgtgggcaatcctgtgcgagagaatgtgaaattgttgtaggattgataatgaccaggggtttctccgcccacatgcaccaggtttcgctgccatttgcagcgactgtgttccagttcgaccgtttggggaaaaggcaaggaaacaggatctgtcacggaaggtatgtacacattacagtaaacgttgttcgtagaacatgcactttgtggagtggtctttgaatgagatgcgtttagaattaccttttcatgcagatctcttgttcagaacctggttgcttagtccattcttgttttgggttgctactacaaaaaagcggcaatgctttatatgaatcgcctcttactaatatccagggtcaaatggtggtccttcagtgaccagactaatatttgagcattaatcttatttgtttcacagtcatttcttgtttatcaatatgaatgctatttttttgcgagtggacttgttaactaataagctcatagatatttgaacaaaaaatagtgttttgttctaaaactgtcataaagagtgcatacatcatagctatggtttcaactgtgatttgatgtcctataatattgagtgtcctatagtgtgttgttctgaaacagtcacaaagagggcctaagaagctgatggaatcctcattcaccgccgctaaggagtttgagcgggatcggagaggagacgtcagttcttcctcctctgctcaatgcggccattcgccctgtcccccaaccctgaactccacactgccactccgtgctcattttttctgaaggggaaatattcatctccttgttgttttgtaccatggatactttagcatcattctcatactactaggagtgtaggtaaggagtccacacacgagtttgcaaacaccattaagcctattttgcttgattagtgccctgcaacacttcatatgttcaagacaaaatccatacccatgtctattgttgtatgatattatttgcattgaccgttgctgctcttcttgattgcagtcactaacattgcattaatctatgtgatacatttattcaggcgattcccatttctcagtgatgtcgatgtcctgtactcctgtatatttggattcaacaatatgccattagtgcattggtgccacaacactggatgagtataggaagcatatagagaaagatcctgccttggaaagaaggtttcaaccagttaaggttccagagcctactatggatgaaacaatacagatcttaagaggacttcgtgagagatatgaacttcatcacaaactgagatacacagatgatgctttaattgctgctgcacagctgtcttatcagtatatcagcgatcgttttctgcctgacaaagccattgacttgattgatgaagctggatctcgtgttaggctgaggcatgcgcagctccctgatgaagccaaagagctggacaaagagctgcggcagataagcaagcagaaaaatgaggctgtacgtggccaagattttgagaaggtatactgttgtttggcacagcggtgacaaagccgatccgctcccacctctctagcaacgtcgatatggttaataccaagcattatgttgtttccttttgagataaatattttgttactgattttaccttttgtctcctcttcttgttttttgttctagaatctgtagcaaatggctaacgatgaggatatccattactttgtttatgacaataaaactgatatgttcaagattccgtagcaacgcacgggcatctaactagtct

SEQ ID NO: 221230 - DNA, 2454 bp, Zea Mays
tgctctgggagtgctgcatctgccttgcgtagtacggggagaaggaggaggttcggcagctgccgtgcacacacgtgtttcatctcaagtgcatatacagttccagctaacaagggaaatcaaggaagaattgatctttatattagcaggcggatgcaatcactaatcaaaaccacgatgcaaggtaacctaaatggattttaaattttattttggattgttaaatctttatttctgactactattgttttatgtcgtggatgccctcgtgaggttctacgccgacgccttcaggagggattcacagaggccatggtgaggatggccagcttgagtcggctcaccgggagcagcgcgagatccgctacaactaaatgataggaggggtttctccgcccacatgcaccaggtttcgctgccatttgcagcgactgtgttccagttcgaccgtttggggaaaaggcaaggaaacaggatctgtcacggaaggtatgtacacattacagtaaacgttgttcgtagaacatgcactttgtggagtggtctttgaatgagatgcgtttagaattaccttttcatgcagatctcttgttcagaacctggttgcttagtccattcttgttttgggttgctactacaaaaaagcggcaatgctttatatgaatcgcctcttactaatatccagggtcaaatggtggtccttcagtgaccagactaatatttgagcattaatcttatttgtttcacagtcatttcttgtttatcaatatgaatgctatttttttgcgagtggacttgttaactaataagctcatagatatttgaacaaaaaatagtgttttgttctaaaactgtcataaagagtgcatacatcatagctatggtttcaactgtgatttgatgtcctataatattgagtgtcctatagtgtgttgttctgaaacagtcacaaagagggcctaagaagctgatggaatcctcattcaccgccgctaaggagtttgagcgggatcggagaggagacgtcagttcttcctcctctgctcaatgcggccattcgccctgtcccccaaccctgaactccacactgccactccgtgctcattttttctgaaggggaaatattcatctccttgttgttttgtaccatggatactttagcatcattctcatactactaggagtgtaggcgattcccatttctcagtgatgtcgatgtcctgtactcctgtatatttggattcaacaatatgccattagtatgctgtcaagcgtcctatttgcaagagataaatggcttacgcccgaggggcttattcttccttatcatgatcaagaagtggaatacttgttctaagggtcccaagttgggtggtggtggtgggaagcgttttcaggtcggtcgtgactttggttatccactgaaaagatatgcttggtggtgctttcttgtgttgaagaacaagtatcccacggaaccacaaccgtttgtattatctggtgatttcctacattattagctggcctaactaaaccatgcgctcagaccctaaaccagctgtaagtctgtaacttaaaagcacagtgcactagcggaatggggttccttgctttttggagcgtttccccagtcagatcggcggcagggcaggtcacgtggacggggctccttgttgctggaactaaataccgtggagagtttgaagtgagactaaagaaacttatggaggaaattaagcaaaatgaagacattattctctttattgattaagtgcacacactgattggagcaggtgcagcagaagtgcattggtgccacaacactggatgagtataggaagcatatagagaaagatcctgccttggaaagaaggtttcaaccagttaaggttccagagcctactatggatgaaacaatacagatcttaagaggacttcgtgagagatatgaacttcatcacaaactgagatacacagatgatgctttaattgctgctgcacagctgtcttatcagtatatcagcgatcgttttctgcctgacaaagccattgacttgattgatgaagctggatctcgtgttaggctgaggcatgcgcagctccctgatgaagccaaagagctggacaaagagctgcggcagataagcaagcagaaaaatgaggctgtacgtggccaagattttgagaaggtatactgttgtttggcacagcggtgacaaagccgatccgctcccacctctctagcaacgtcgatatggttaataccaagcattatgttgtttccttttgagataaatattttgttactgattttaccttttgtctcctcttcttgttttttgttctagaatctgtagcaaatggctaacgatgaggatatccattactttgtttatgacaataaaactgatatgttcaagattccgtagcaacgcacgggcatctaactagtct

SEQ ID NO: 221231 - DNA, 1782 bp, Zea Mays
gctctgggagtgctgcatctgccttgcgtagtacggggagaaggaggaggttcggcagctgccgtgcacacacgtgtttcatctcaagtgcatatacaggtgttagtatcctagacacaacagatattttccagctaacaagggaaatcaaggaagaattgatctttatattagcaggcggatgcaatcactaatcaaaaccacgatgcaaggttctacgccgacgccttcaggagggattcacagaggccatggtgaggatggccagcttgagtcggctcaccgggagcagcgcgagatccgctacaactaaatgataggaggtattttctagaaattacaaccccacctctgtcaggccttctgttgagtgaatttggtttgcacaccctcaccctgcacgctcttaccggactaccgctcctagcacccactcacacgagattgcaccccgctcgccatgccaccatagatccagctagggcgacatcattgtgggcaatcctgtgcgagagaatgtgaaattgttgtaggattgataatgaccaggggtttctccgcccacatgcaccaggtttcgctgccatttgcagcgactgtgttccagttcgaccgtttggggaaaaggtgagtcctcccatttcatgtagatgcatgggttgataaacatttgggagaaatgtcccctctttaattcgaaaaatagttgtgtatttgttcgacttatctgcggcgatgtacctttgtacgcgtacaaacatctatagacaaaaacaaaatgacacttcatggatgtagcaagagcgggctacgagaaactagcagatcatgcctaaaattcaattagcattagggtcagacaaaatactacattttctggattacaataatgtataggtgcatgaaaaaaacttgattccaatgtgtgacaaagtgtgaagatgaaagtgcactttcacgctgtcataacgcggatttgttttccttgctcatggaatgtgcatttgtgtgtttgcgtctactgtgcggctacaggcaaggaaacaggatctgtcacggaaggcgattcccatttctcagtgatgtcgatgtcctgtactcctgtatatttggattcaacaatatgccattagtgcattggtgccacaacactggatgagtataggaagcatatagagaaagatcctgccttggaaagaaggtttcaaccagttaaggttccagagcctactatggatgaaacaatacagatcttaagaggacttcgtgagagatatgaacttcatcacaaactgagatacacagatgatgctttaattgctgctgcacagctgtcttatcagtatatcagcgatcgttttctgcctgacaaagccattgacttgattgatgaagctggatctcgtgttaggctgaggcatgcgcagctccctgatgaagccaaagagctggacaaagagctgcggcagataagcaagcagaaaaatgaggctgtacgtggccaagattttgagaaggtatactgttgtttggcacagcggtgacaaagccgatccgctcccacctctctagcaacgtcgatatggttaataccaagcattatgttgtttccttttgagataaatattttgttactgattttaccttttgtctcctcttcttgttttttgttctagaatctgtagcaaatggctaacgatgaggatatccattactttgtttatgacaataaaactgatatgttcaagattccgtagcaacgcacgggcatctaactagtct

SEQ ID NO: 221232 - DNA, 1481 bp, Zea Mays
gtattttctagaaattacaaccccacctctgtcaggccttctgttgagtgaatttggtttgcacaccctcaccctgcacgctcttaccggactaccgctcctagcacccactcacacgagattgcaccccgctcgccatgccaccatagatccagctagggcgacatcattgtgggcaatcctgtgcgagagaatgtgaaattgttgtaggattgataatgaccaggggtttctccgcccacatgcaccaggtttcgctgccatttgcagcgactgtgttccagttcgaccgtttggggaaaagtgtgttgttctgaaacagtcacaaagagggcctaagaagctgatggaatcctcattcaccgccgctaaggagtttgagcgggatcggagaggagacgtcagttcttcctcctctgctcaatgcggccattcgccctgtcccccaaccctgaactccacactgccactccgtgctcattttttctgaaggggaaatattcatctccttgttgttttgtaccatggatactttagcatcattctcatactactaggagtgtaggtaaggagtccacacacgagtttgcaaacaccattaagcctattttgcttgattagtgccctgcaacacttcatatgttcaagacaaaatccatacccatgtctattgttgtatgatattatttgcattgaccgttgctgctcttcttgattgcagtcactaacattgcattaatctatgtgatacatttattcaggcgattcccatttctcagtgatgtcgatgtcctgtactcctgtatatttggattcaacaatatgccattagtgcattggtgccacaacactggatgagtataggaagcatatagagaaagatcctgccttggaaagaaggtttcaaccagttaaggttccagagcctactatggatgaaacaatacagatcttaagaggacttcgtgagagatatgaacttcatcacaaactgagatacacagatgatgctttaattgctgctgcacagctgtcttatcagtatatcagcgatcgttttctgcctgacaaagccattgacttgattgatgaagctggatctcgtgttaggctgaggcatgcgcagctccctgatgaagccaaagagctggacaaagagctgcggcagataagcaagcagaaaaatgaggctgtacgtggccaagattttgagaaggtatactgttgtttggcacagcggtgacaaagccgatccgctcccacctctctagcaacgtcgatatggttaataccaagcattatgttgtttccttttgagataaatattttgttactgattttaccttttgtctcctcttcttgttttttgttctagaatctgtagcaaatggctaacgatgaggatatccattactttgtttatgacaataaaactgatatgttcaagattccgtagcaacgcacgggcatctaactagtct

SEQ ID NO: 221233 - DNA, 1347 bp, Zea Mays
aggccttctgttgagtgaatttggtttgcacaccctcaccctgcacgctcttaccggactaccgctcctagcacccactcacacgagattgcaccccgctcgccatgccaccatagatccagctagggcgacatcattgtgggcaatcctgtgcgagagaatgtgaaattgttgtaggattgataatgaccaggggtttctccgcccacatgcaccaggtttcgctgccatttgcagcgactgtgttccagttcgaccgtttggggaaaaggcaaggaaacaggatctgtcacggaaggcgattcccatttctcagtgatgtcgatgtcctgtactcctgtatatttggattcaacaatatgccattagtatgctgtcaagcgtcctatttgcaagagataaatggcttacgcccgaggggcttattcttccttatcatgcgttttcaggtcggtcgtgactttggttatccactgaaaagatatgcttggtggtgctttcttgtgttgaagaacaagtatcccacggaaccacaaccgtttgtattatctggtgatttcctacattattagctggcctaactaaaccatgcgctcagaccctaaaccagctgtaagtctgtaacttaaaagcacagtgcactagcggaatggggttccttgctttttggagcgtttccccagtcagatcggcggcagggcaggtcacgtggacggggctccttgttgctggaactaaataccgtggagagtttgaagtgagactaaagaaacttatggaggaaattaagcaaaatgaagacattattctctttattgattaagtgcacacactgattggagcaggtgcagcagaagtgcattggtgccacaacactggatgagtataggaagcatatagagaaagatcctgccttggaaagaaggtttcaaccagttaaggttccagagcctactatggatgaaacaatacagatcttaagaggacttcgtgagagatatgaacttcatcacaaactgagatacacagatgatgctttaattgctgctgcacagctgtcttatcagtatatcagcgatcgttttctgcctgacaaagccattgacttgattgatgaagctggatctcgtgttaggctgaggcatgcgcagctccctgatgaagccaaagagctggacaaagagctgcggcagataagcaagcagaaaaatgaggctgtacgtggccaagattttgagaagaatctgtagcaaatggctaacgatgaggatatccattactttgtttatgacaataaaactgatatgttcaagattccgtagcaacgcacgggcatctaactagtct

SEQ ID NO: 221234 - DNA, 1421 bp, Zea Mays
atacgatgtgggcatgatttaggagtatgctgtcaagcgtcctatttgcaagagataaatggcttacgcccgaggggcttattcttccttatcatggtatgatataattatcatacaaaaatgttacactgcttttacagggtgtacctcatctatttgcttgtacaattcatcttactactgctttgacaaacattggtctgctctgctttggtctgtgctttaggattctgtttcattgggagaaacaaatgcccttgcttactttcattataactgtgctatttttttgatccaatgttgttctaagatcaagaagtggaatacttgttctaagggtcccaagttgggtggtggtggtgggaagcgttttcaggtcggtcgtgactttggttatccactgaaaagatatgcttggtggtgctttcttgtgttgaagaacaagtatcccacggaaccacaaccgtttgtattatctggtgatttcctacattattagctggcctaactaaaccatgcgctcagaccctaaaccagctgtaagtctgtaacttaaaagcacagtgcactagcggaatggggttccttgctttttggagcgtttccccagtcagatcggcggcagggcaggtcacgtggacggggctccttgttgctggaactaaataccgtggagagtttgaagtgagactaaagaaacttatggaggaaattaagcaaaatgaagacattattctctttattgattaagtgcacacactgattggagcagtgcattggtgccacaacactggatgagtataggaagcatatagagaaagatcctgccttggaaagaaggtttcaaccagttaaggttccagagcctactatggatgaaacaatacagatcttaagaggacttcgtgagagatatgaacttcatcacaaactgagatacacagatgatgctttaattgctgctgcacagctgtcttatcagtatatcagcgatcgttttctgcctgacaaagccattgacttgattgatgaagctggatctcgtgttaggctgaggcatgcgcagctccctgatgaagccaaagagctggacaaagagctgcggcagataagcaagcagaaaaatgaggctgtacgtggccaagattttgagaaggtatactgttgtttggcacagcggtgacaaagccgatccgctcccacctctctagcaacgtcgatatggttaataccaagcattatgttgtttccttttgagataaatattttgttactgattttaccttttgtctcctcttcttgttttttgttctagaatctgtagcaaatggctaacgatgaggatatccattactttgtttatgacaataaaactgatatgttcaagattccgtagcaacgcacgggcatctaactagtct

SEQ ID NO: 221235 - DNA, 1161 bp, Zea Mays
tacgatgtgggcatgatttaggagtatgctgtcaagcgtcctatttgcaagagataaatggcttacgcccgaggggcttattcttccttatcatgcgttttcaggtcggtcgtgactttggttatccactgaaaagatatgcttggtggtgctttcttgtgttgaagaacaagtatcccacggaaccacaaccgtttgtattatctggtgatttcctacattattagctggcctaactaaaccatgcgctcagaccctaaaccagctgtaagtctgtaacttaaaagcacagtgcactagcggaatggggttccttgctttttggagcgtttccccagtcagatcggcggcagggcaggtcacgtggacggggctccttgttgctggaactaaataccgtggagagtttgaagtgagactaaagaaacttatggaggaaattaagcaaaatgaagacattattctctttattgattaagtgcacacactgattggagcaggtgcagcagaagtgcattggtgccacaacactggatgagtataggaagcatatagagaaagatcctgccttggaaagaaggtttcaaccagttaaggttccagagcctactatggatgaaacaatacagatcttaagaggacttcgtgagagatatgaacttcatcacaaactgagatacacagatgatgctttaattgctgctgcacagctgtcttatcagtatatcagcgatcgttttctgcctgacaaagccattgacttgattgatgaagctggatctcgtgttaggctgaggcatgcgcagctccctgatgaagccaaagagctggacaaagagctgcggcagataagcaagcagaaaaatgaggctgtacgtggccaagattttgagaaggtatactgttgtttggcacagcggtgacaaagccgatccgctcccacctctctagcaacgtcgatatggttaataccaagcattatgttgtttccttttgagataaatattttgttactgattttaccttttgtctcctcttcttgttttttgttctagaatctgtagcaaatggctaacgatgaggatatccattactttgtttatgacaataaaactgatatgttcaagattccgtagcaacgcacgggcatctaactagtct

SEQ ID NO: 221236 - DNA, 1151 bp, Zea Mays
gttaaatcatgctacgtcttgtccggacttaaaagtatgctgtcaagcgtcctatttgcaagagataaatggcttacgcccgaggggcttattcttccttatcatggtcggtcgtgactttggttatccactgaaaagatatgcttggtggtgctttcttgtgttgaagaacaagtatcccacggaaccacaaccgtttgtattatctggtgatttcctacattattagctggcctaactaaaccatgcgctcagaccctaaaccagctgtaagtctgtaacttaaaagcacagtgcactagcggaatggggttccttgctttttggagcgtttccccagtcagatcggcggcagggcaggtcacgtggacggggctccttgttgctggaactaaataccgtggagagtttgaagtgagactaaagaaacttatggaggaaattaagcaaaatgaagacattattctctttattgattaagtgcacacactgattggagcagtgcattggtgccacaacactggatgagtataggaagcatatagagaaagatcctgccttggaaagaaggtttcaaccagttaaggttccagagcctactatggatgaaacaatacagatcttaagaggacttcgtgagagatatgaacttcatcacaaactgagatacacagatgatgctttaattgctgctgcacagctgtcttatcagtatatcagcgatcgttttctgcctgacaaagccattgacttgattgatgaagctggatctcgtgttaggctgaggcatgcgcagctccctgatgaagccaaagagctggacaaagagctgcggcagataagcaagcagaaaaatgaggctgtacgtggccaagattttgagaaggtatactgttgtttggcacagcggtgacaaagccgatccgctcccacctctctagcaacgtcgatatggttaataccaagcattatgttgtttccttttgagataaatattttgttactgattttaccttttgtctcctcttcttgttttttgttctagaatctgtagcaaatggctaacgatgaggatatccattactttgtttatgacaataaaactgatatgttcaagattccgtagcaacgcacgggcatctaactagtct

SEQ ID NO: 221237 - DNA, 495 bp, Zea Mays
tccgttggttgattctgattcgtctcctgttggctgttgccttcgaccgcctccacctcgtctccgacgatgtcctccgtcgccggtgagggggaaggagagggaggaggacggcgccgacgggaggagccaaggagccaacaacatgaggacggggtcgaggtggccgacggaaaactggatttgggtgacctttacggcgcggcggcggggtgggtagaggcgcggaccagctgcccgcacctcggcaccatgccgcccgctggtgctgaattgctgatgaccttgctcgcgtgcctccgcccgactctccgtgctccagatgtcatgaccctgctgaaaactgattatgcttgatatgcaaagatgtgatgtgcagtcgttttatcaacaaacatatgttgtgccatcatgaagaagaaactggtcactgtcttgctttgagcttcaggtgggctgctgatcagaccagtgaccactggaccactaacctca

SEQ ID NO: 221238 - DNA, 1217 bp, Zea Mays
gtttcctttcgattgatagtggaatgagttcttcctccaccctggctctctccgatggatgctccaacatgctatggtcacctcaagctgaccctaaactagatccatatcagggggaatttcctgagacaatcgaagagtacttgcatcacggtactatgaaatgtatcgcgtttaaccgcaaaggaacacttcttgctgctggatgctcaaatggtagctgtattatatgggactttgaaacaagggggcttgcaaaagaatttcgtgataaagatagcaccgcacctataacaagtgtgtcctggtccaggtacatgcaatagttcccatccctggtggaagtgttgttaaggatattgttttaagccgggatggtcaatatctgctgacaaattctaatgatcgggtcattagagtctaccgaaacattctacctgttaaaggttctagagaggagatcagaaacataagcagcaacagtaatgaatatggaagtcactacgataaattaaaagcaaatggtacaagctgccttattctttcctgtgaacttttggatgccatcacaaagatacagtggaaggcaccatgtttcagtggtaatggtgagtggatagttggtgcttctgcaaacaaaggagagcacaggttgcagatatggaaccaagcagggcgccttgtaaagatgcttgaaggtccaaaagaagctctcattgatcttgcctggcatcctgttgagcctacaattgctacagtatctgtgacaggcttcgtatacatttgggccaaggagcatgtagagaattggagcgcttttgctcctgatttcgtagagttagaagaaaatgaagagtacgccgaacgagaggatgagtttgacttgaatccacgtgaagaacaggctgagaaagtagtgatagatgaggatgctgatgttgatatcgagacatctgagaagaatacagtgttcagtgatgtggaggattctgtggatgagatctcctacttaccagcaattccttacccagattctcctgatgagcagccagagaaatgccttggaagttcaaagttggaggatagcaaccattctggttccccatcctcaatggatgctgtacagaatggacaagccattcctccagcatcaagcccaatggaaggtaaagctttcttgtgccagtgtttgttttccatctctgtgcaactgttaa

SEQ ID NO: 221239 - DNA, 528 bp, Zea Mays
ctcacacaatttaagaagagccatatttgaaacagttaagaattcatatataagagtgcatatatatatataatcctgccaagacaaaggtaatggagtcgtcacgcatgttccagccggccatcatcctgcttctcctgctcattgtgaccaccgatgtggcgcaggcggcgagggaatgcgagaaggacagcgagcgattccttggggcatgcatggcgtcggacaactgcgccaacgtgtgccgcggtgagggcttctccggcggcagttcgatggtggacgtttattctatttattggcttacttgattttttcccccctaacaataagaaaacgcacgtgctggcatgtacgttgtgttgtatatgcttttcttgctggcttcatttgctgattactgatgagttgtaaggtccctgcacgatccatttcacatggatatgatgcttaattgtattcctgcttatatggtatgtatatttaattaattaatgatggaccatcgagtttattttgtacttttga

SEQ ID NO: 221240 - DNA, 446 bp, Zea Mays
cctgctcattgtgaccaccggcggcgagggaatgcgagaaggacagcgagcgattccttggggcatgcatggcgtcggacaactgcgccaacgtgtgccgcggtgagggcttctccggcggcaggtgcagcaccttccgccgccgctgcatctgcactaagccgtgctaaattaacctactcccggcagttcgatggtggacgtttattctatttattggcttacttgattttttcccccctaacaataagaaaacgcacgtgctggcatgtacgttgtgttgtatatgcttttcttgctggcttcatttgctgattactgatgagttgtaaggtccctgcacgatccatttcacatggatatgatgcttaattgtattcctgcttatatggtatgtatatttaattaattaatgatggaccatcgagtttattttgtacttttga

SEQ ID NO: 221241 - DNA, 1590 bp, Zea Mays
agttcacctttctcttctaatggcttcaagccggcgacagcagcaacaatgcgacgttcatttcaccgtttgcttcccgagatacggtcatacggagccacagtttgtcgttactgctcccagccagcgtgaaccgatcccacggagctcatcccacaggccacagcactcctccggtactcccctcgcacgacttcacgagcgcggtcgactgccgccgccaccaccgccgatctgcaaggtcccgtcgaccaccgccactctgcaagtgaggggaaagaggcaagattgaggagggaagcatcgctggtgtatccgccgccacattcgtcgccgggagccagcccatattcgagacgaggtcgagctttgctgccttggcgagcttcagtcgaatcaaggttgagcctggcggcaggccagtaaacagagcaacgcaaaacccttcgaatcaatggagacctccgcagcaaccccgacccggccgccccacccggcggccgcttccccatcgccgtcgccctcgtcgtcgctgaggctgtggaggtcagcggcgcagcgcaacgtgcgcaatcagtggtcccgtctgagcgccgccaaggagcagtggctggccgccgttgctgatggccgcgcccacgcctccgcgctcgtcaacgcccacctctgccgcaggaacatgccagcgacggatttgggggtgctcaaggatatgccggggatccgcgataaggctaactccaagttggtgcttagagaggagcaatacagtgggatgcttctgtcggcctacaaggagatggtccgtcagctgtcctacttggttgaagcttcccattctatgcgctgtttttctaaagcagctccaaattgctccatcacacagttttctgaccgccaagataatttgaatgattcaggggatggtggaggagccccagtattcaaatggttctccatattagaatttgagactcttgcccaggagcttgttcagatgtttgtttcagagcaaaagttgaagaggctgctactcttggaatttctctcgattgctttaaaggaaggtgtagaactccagacatcattaaattggggtgatgaactatatgatgaacgtttagggagtcagcgacctggcaatctccctctgcatgaagttttacaggtttatttaaccacttggcatgctaatatgaacatcaaccggagtagaattggtgaaatatttgagcttgttgaggaggagatgaagattaaactgtcttgaagattccgattcattttgtttggctattcatcaaggaagaagaaatggaaaagaaagatcaatcagtttactattcaccaggtttctctatccagtgtctttatctgccttagtagaagtcttcagagcttacctatcatcttagaatatagtactggtctccttgtaacccataatatatttttttaatccaatgttcggttaccctggaatcatattgggaggagagcgttggaccaacatatgttattgaaatgagatttccaagttatcaggatcattcgcctagcttcaggtgagctggtcagtccagcactgac

SEQ ID NO: 221242 - DNA, 870 bp, Zea Mays
accaattcagtgagcaatacagtgggatgcttctgtcggcctacaaggagatggggatggtggaggagccccagtattcaaatggttctccatattagaatttgagactcttgcccaggagcttgttcagatgtttgtttcagagcaaaagttgaagaggctgctactcttggaatttctctcgattgctttaaaggaaggtgtagaactccagacatcattaaattggggtgatgaactatatgatggtgaatcaaatgaacttcagagtattggccttcagtcaggagatgcctactcaccgcctgaaaattggtgtgcagaacgtttagggagtcagcgacctggcaatctccctctgcatgaagttttacaggtttatttaaccacttggcatgctaatatgaacatcaaccggaaattggtgaaatatttgagcttgttgaggaggagatgaagattaaactgtcttgaagattccgattcattttgtttggctattcatcaaggaagaagaaatggaaaagaaagatcaatcagtttactattcaccaggtttctctatccagtgtctttatctgccttagtagaagtcttcagagcttacctatcatcttagaatatagtactggtctccttgtaacccataatatatttttttaatccaatgttcggttaccctggaatcatattgggaggagagcgttggaccaacatatgttattgaaatgagatttccaagttatcaggatcattcgcctagcttcaggtttgttctgtgctgttgtagatgtgtaatatttacttcattcgcctgctgtacagatcttggtgacatgctcgtggaaaatgcatattgcttttagtggt

SEQ ID NO: 221243 - DNA, 1727 bp, Zea Mays
agttcacctttctcttctaatggcttcaagccggcgacagcagcaacaatgcgacgttcatttcaccgtttgcttcccgagatacggtcatacggagccacagtttgtcgttactgctcccagccagcgtgaaccgatcccacggagctcatcccacaggccacagcactcctccggtactcccctcgcacgacttcacgagcgcggtcgactgccgccgccaccaccgccgatctgcaaggtcccgtcgaccaccgccactctgcaagtgaggggaaagaggcaagattgaggagggaagcatcgctggtgtatccgccgccacattcgtcgccgggagccagcccatattcgagacgaggtcgagctttgctgccttggcgagcttcagtcgaatcaaggttgagcctggcggcaggccagtaaacagagcaacgcaaaacccttcgaatcaatggagacctccgcagcaaccccgacccggccgccccacccggcggccgcttccccatcgccgtcgccctcgtcgtcgctgaggctgtggaggtcagcggcgcagcgcaacgtgcgcaatcagtggtcccgtctgagcgccgccaaggagcagtggctggccgccgttgctgatggccgcgcccacgcctccgcgctcgtcaacgcccacctctgccgcaggaacatgccagcgacggatttgggggtgctcaaggatatgccggggatccgcgataaggctaactccaagttggtgcttagagaggagcaatacagtgggatgcttctgtcggcctacaaggagatggtccgtcagctgtcctacttggttgaagcttcccattctatgcgctgtttttctaaagcagctccaaattgctccatcacacagttttctgaccgccaagataatttgaatgattcaggggatggtggaggagccccagtattcaaatggttctccatattagaatttggagcttgttcagatgtttgtttcagagcaaaagttgaagaggctgctactcttggaatttctctcgattgctttaaaggaaggtgtagaactccagacatcattaaattggggtgatgaactatatgatggtgaatcaaatgaacttcagagtattggccttcagtcaggagatgcctactcaccgcctgaaaattggtgtgcagaacgtttagggagtcagcgacctggcaatctccctctgcatgaagttttacaggtttatttaaccacttggcatgctaatatgaacatcaaccggagtagaattggtgaaatatttgagcttgttgaggaggagatgaagattaaactgtcttgaagattccgattcattttgtttggctattcatcaaggaagaagaaatggaaaagaaagatcaatcagtttactattcaccaggtttctctatccagtgtctttatctgccttagtagaagtcttcagagcttacctatcatcttagaatatagtactggtctccttgtaacccataatatatttttttaatccaatgttcggttaccctggaatcatattgggaggagagcgttggaccaacatatgttattgaaatgagatttccaagttatcaggatcattcgcctagcttcaggtttgttctgtgctgttgtagatgtgtaatatttacttcattcgcctgctgtacagatcttggtgacatgctcgtggaaaatgcatattgcttttagtggt

SEQ ID NO: 221244 - DNA, 1885 bp, Zea Mays
agttcacctttctcttctaatggcttcaagccggcgacagcagcaacaatgcgacgttcatttcaccgtttgcttcccgagatacggtcatacggagccacagtttgtcgttactgctcccagccagcgtgaaccgatcccacggagctcatcccacaggccacagcactcctccggtactcccctcgcacgacttcacgagcgcggtcgactgccgccgccaccaccgccgatctgcaaggtcccgtcgaccaccgccactctgcaagtgaggggaaagaggcaagattgaggagggaagcatcgctggtgtatccgccgccacattcgtcgccgggagccagcccatattcgagacgaggtcgagctttgctgccttggcgagcttcagtcgaatcaaggttgagcctggcggcaggccagtaaacagagcaacgcaaaacccttcgaatcaatggagacctccgcagcaaccccgacccggccgccccacccggcggccgcttccccatcgccgtcgccctcgtcgtcgctgaggctgtggaggtcagcggcgcagcgcaacgtgcgcaatcagtggtcccgtctgagcgccgccaaggagcagtggctggccgccgttgctgatggccgcgcccacgcctccgcgctcgtcaacgcccacctctgccgcaggaacatgccagcgacggatttgggggtgctcaaggatatgccggggatccgcgataaggctaactccaagttggtgcttagagaggagcaatacagtgggatgcttctgtcggcctacaaggagatggggatggtggaggagccccagtattcaaatggttctccatattagaatttggtgggtaaatcatctcttctatggattaagtcactactatgatctttcgtctgttgggtgtgacaatgatctccaaacccatctgattgccttttaaaagttcaaaaggtcaaatgagtttgatttaggaagactactcagagcactatatattctcatatttgaggatgccggtcaatatctgagacactgcacatattaatgtttacatgttttaaatccacatgataaaaagatattatgtttcctttaatcacctcagagactcttgcccaggagcttgttcagatgtttgtttcagagcaaaagttgaagaggctgctactcttggaatttctctcgattgctttaaaggaaggtgtagaactccagacatcattaaattggggtgatgaactatatgatggtgaatcaaatgaacttcagagtattggccttcagtcaggagatgcctactcaccgcctgaaaattggtgtgcagaacgtttagggagtcagcgacctggcaatctccctctgcatgaagttttacaggtttatttaaccacttggcatgctaatatgaacatcaaccggagtagaattggtgaaatatttgagcttgttgaggaggagatgaagattaaactgtcttgaagattccgattcattttgtttggctattcatcaaggaagaagaaatggaaaagaaagatcaatcagtttactattcaccaggtttctctatccagtgtctttatctgccttagtagaagtcttcagagcttacctatcatcttagaatatagtactggtctccttgtaacccataatatatttttttaatccaatgttcggttaccctggaatcatattgggaggagagcgttggaccaacatatgttattgaaatgagatttccaagttatcaggatcattcgcctagcttcaggtttgttctgtgctgttgtagatgtgtaatatttacttcattcgcctgctgtacagatcttggtgacatgctcgtggaaaatgcatattgcttttagtggt

SEQ ID NO: 221245 - DNA, 2875 bp, Zea Mays
agaggtaggagagtaaggagaggaggaagagcactgccagtgctaggggcagtcggcaggcgcggcgcgttcccctcagtccccttccccggctggtcttgccgggagtaaggggaacgaagccaccggcgcggcatggagcccaagccgtcttcggcggcgcatgctgacgcgccagcggtcgaggccccccgccgccgtggcggcggcggcaagcgcaagtcggccgggtcctcgttcacgccgtcgaagcgtcaggccaaggagcggaacgcttccttccacgtgcccccgcatcttctgcacagcgggccgctcacccgcgccgcgcgccagtcgccgcacaagctctcgggcacgccgtcggagtcggtgccagcgtcgtcggcggccgcaactggggacggggtgagcggcgggcaggcggtggttgatgcgatccggcccgagacagaggaaacgccggccccggagctgccgctggtagacgagatgttcgaggccgtccgatcccgtggcgctggcgtccatgtggtccctacctttgctggatggttttcgtggaaagaaatccacccagttgagaagcagaccttgccttctttttttaatggaaaatctgagaagcggacacctgagatggacatgaggagagtaagccagaggagacccaagacaattctaatgacgagaaagcttctttgatcgagcaactgtttaagtttgaatcagttcaatcatatatgacgcctttaccaatgaaagaagatgtgagagctccgcctcctctgcctagcttgattcctgaatctgtactcattcaagatgtggttgcagcagctgagccttctgttgagtaccactgcaattcctgttcagttgattgctcacggaagcgctatcattgtcggacccaggcagattttgacctctgttgtgattgctataatgaagggaaatttgatccaggcatggccaaaaccgatttcatcctcatggattctgcaggagtttcaggtgctagtggtactagttggacagatgaggaaacattacttctattagaaggtttggaaatttttggtggaaaatgggctgagattgctgaacatgttgctactaagacaaaagcacaatgcatgttgcactttcttcaaatgcaaattgaagaccgcttccatgatggcaaagatattaatcaaaacatcccagtaagtacagatcaagccacaactgagaaagccattgctgaaacatctgagaaaatggaagttgaagataaagtggaaggaagaggtactgtggatgaaaaggcctcagagaaaacagagggaaactgtgaagaaacaaaaactgaaaatgccagtgttgttgtaaataaagatactcagaattcagatggcagagattcaggtgcatctccaagcactgaagagccaaagcaatcttctgatgagcaacctgtagtaaaggaaaattctgcagatgtagatacttctggtgaaaaactatcaaatgttgctattgatatcttaaaatctgcatttgaggctactggtcacagcccagaatatgaaggttcatttgcggatgcaggaaatccagttatggcactagcagcgtatttagctggtcttgtggaagatgataacaccaccacttcattccgtagttcactaaaatctgtatctgatgtgtctcctgcactccaattatcaagtaggcactgttttattcttgaggatccgccagatgaactcaaagacatttgtgctagtgtaagtaagaaaaatagagatggtgatcaaaaacaagatgaggatatgattcaaaattcaattgataccgagaaaaaagagatcaatgagaaagaaggtaagtctttatctgtggaaaagaaaaacaattcatccatgtcacaaaatgaccaccaagaatcaggcattaagagcgtctcaagtgatgattgctccttagtggagccaaaaaccaataatgctaaggagtcaggtgattcaactgctattggggacaagagtgcaaccgaaactacaaaaggtaatactgaacaagtgaatgacttgccaagtgttgaggtggaggctcctgatgattcatcttcaaaaggtaaggatgagctcaataagactaaagatgcagtggcgacaccagctaccgtacaggaacagaaacacagccaaacattgggaaatggggatagggaagaacctaacaacattgaaagtgtagttgtcggtgaagagaagggctctgtagtgactgccaaccgacctgattccatagctaggctcaaaagagcagcagctactgctgtttcagcagctgctgtgaaagctaggtttctcggtgatcaggaggaatatcaaattcgaaggctgacagcacttgtaatcgaaaagctgttccaaaaaatagaagtgaagatgtcattgttttcagagattgagcaggtggtctttcgaacgagagagtacaccgagaagaccagaaagaagctcctgaaggaacgaaatgcgattattgcagctcggatgggcgcattgccgtctaggccaaaccagacaggtgtagccggaaacaggttaccacctggactgtcggactcatgagcattagtccgacgaacctattcacaggttatgatgatcatgctttccctggcattctacatggagctggcagatcatttgcatgggtctgctgaccctttctaaggagctcaggacatcaattactatccaacaacctaaagtgatgttgggtgcatcccaaaagaacaagacgctgtcgagagagaagcaaaaggagaaggtcgagggatccgttagctcggattccaagtcctacaaggaga

SEQ ID NO: 221246 - DNA, 3089 bp, Zea Mays
gaaaaagttagccgccggcagcaaatgccccaccaatcagtgagacatacgagcggctatgggtacccgacgccacgtccccgcaacttcacaacgaacagcagaggtaggagagtaaggagaggaggaagagcactgccagtgctaggggcagtcggcaggcgcggcgcgttcccctcagtccccttccccggctggtcttgccgggagtaaggggaacgaagccaccggcgcggcatggagcccaagccgtcttcggcggcgcatgctgacgcgccagcggtcgaggccccccgccgccgtggcggcggcggcaagcgcaagtcggccgggtcctcgttcacgccgtcgaagcgtcaggccaaggagcggaacgcttccttccacgtgcccccgcatcttctgcacagcgggccgctcacccgcgccgcgcgccagtcgccgcacaagctctcgggcacgccgtcggagtcggtgccagcgtcgtcggcggccgcaactggggacggggtgagcggcgggcaggcggtggttgatgcgatccggcccgagacagaggaaacgccggccccggagctgccgctggtagacgagatgttcgaggccgtccgatcccgtggcgctggcgtccatgtggtccctacctttgctggatggttttcgtggaaagaaatccacccagttgagaagcagaccttgccttctttttttaatggaaaatctgagaagcggacacctgagctggagtccaaagacctggctgagttgtcaatcggggagaccgatgctcggcaggaaatcttggaattcttggatcactggggcttgataaatttccaccctttcccaccagatggacatgaggagagtaagccagaggagacccaagacaattctaatgacgagaaagcttctttgatcgagcaactgtttaagtttgaatcagttcaatcatatatgacgcctttaccaatgaaagaagatgtgagagctccgcctcctctgcctagcttgattcctgaatctgtactcattcaagatgtggttgcagcagctgagccttctgttgagtaccactgcaattcctgttcagttgattgctcacggaagcgctatcattgtcggacccaggcagattttgacctctgttgtgattgctataatgaagggaaatttgatccaggcatggccaaaaccgatttcatcctcatggattctgcaggagtttcaggtgctagtggtactagttggacagatgaggaaacattacttctattagaaggtttggaaatttttggtggaaaatgggctgagattgctgaacatgttgctactaagacaaaagcacaatgcatgttgcactttcttcaaatgcaaattgaagaccgcttccatgatggcaaagatattaatcaaaacatcccagtaagtacagatcaagccacaactgagaaagccattgctgaaacatctgagaaaatggaagttgaagataaagtggaaggaagaggtactgtggatgaaaaggcctcagagaaaacagagggaaactgtgaagaaacaaaaactgaaaatgccagtgttgttgtaaataaagatactcagaattcagatggcagagattcaggtgcatctccaagcactgaagagccaaagcaatcttctgatgagcaacctgtagtaaaggaaaattctgcagatgtagatacttctggtgaaaaactatcaaatgttgctattgatatcttaaaatctgcatttgaggctactggtcacagcccagaatatgaaggttcatttgcggatgcaggaaatccagttatggcactagcagcgtatttagctggtcttgtggaagatgataacaccaccacttcattccgtagttcactaaaatctgtatctgatgtgtctcctgcactccaattatcaagtaggcactgttttattcttgaggatccgccagatgaactcaaagacatttgtgctagtgtaagtaagaaaaatagagatggtgatcaaaaacaagatgaggatatgattcaaaattcaattgataccgagaaaaaagagatcaatgagaaagaaggtaagtctttatctgtggaaaagaaaaacaattcatccatgtcacaaaatgaccaccaagaatcaggcattaagagcgtctcaagtgatgattgctccttagtggagccaaaaaccaataatgctaaggagtcaggtgattcaactgctattggggacaagagtgcaaccgaaactacaaaaggtaatactgaacaagtgaatgacttgccaagtgttgaggtggaggctcctgatgattcatcttcaaaaggtaaggatgagctcaataagactaaagatgcagtggcgacaccagctaccgtacaggaacagaaacacagccaaacattgggaaatggggatagggaagaacctaacaacattgaaagtgtagttgtcggtgaagagaagggctctgtagtgactgccaaccgacctgattccatagctaggctcaaaagagcagcagctactgctgtttcagcagctgctgtgaaagctaggtttctcggtgatcaggaggaatatcaaattcgaaggctgacagcacttgtaatcgaaaagctgttccaaaaaatagaagtgaagatgtcattgttttcagagattgagcaggtggtctttcgaacgagagagtacaccgagaagaccagaaagaagctcctgaaggaacgaaatgcgattattgcagctcggatgggcgcattgccgtctaggccaaaccagacaggtgtagccggaaacaggttaccacctggactgtcggactcatgagcattagtccgacgaacctattcacaggttatgatgatcatgctttccctggcattctacatggagctggcagatcatttgcatgggtctgctgaccctttctaaggagctcaggacatcaattactatccaacaacctaaagtgatgttgggtgcatcccaaaagaacaagacgctgtcgagagagaagcaaaaggagaaggtcgagggatccgttagctcggattccaagtcctacaaggaga

SEQ ID NO: 221247 - DNA, 4186 bp, Zea Mays
gaaaaagttagccgccggcagcaaatgccccaccaatcagtgagacatacgagcggctatgggtacccgacgccacgtccccgcaacttcacaacgaacagcagaggtaggagagtaaggagaggaggaagagcactgccagtgctaggggcagtcggcaggcgcggcgcgttcccctcagtccccttccccggctggtcttgccgggagtaaggggaacgaagccaccggcgcggcatggagcccaagccgtcttcggcggcgcatgctgacgcgccagcggtcgaggccccccgccgccgtggcggcggcggcaagcgcaagtcggccgggtcctcgttcacgccgtcgaagcgtcaggccaaggagcggaacgcttccttccacgtgcccccgcatcttctgcacagcgggccgctcacccgcgccgcgcgccagtcgccgcacaagctctcgggcacgccgtcggagtcggtgccagcgtcgtcggcggccgcaactggggacggggtgagcggcgggcaggcggtggttgatgcgatccggcccgagacagaggaaacgccggccccggagctgccgctggtagacgagatgttcgaggccgtccgatcccgtggcgctggcgtccatgtggtccctacctttgctggatggttttcgtggaaagaaatccacccagttgagaagcagaccttgccttctttttttaatggaaaatctgagaagcggacacctgagctggagtccaaagacctggctgagttgtcaatcggggagaccgatgctcggcaggaaatcttggaattcttggatcactggggcttgataaatttccaccctttcccaccagatggacatgaggagagtaagccagaggagacccaagacaattctaatgacgagaaagcttctttgatcgagcaactgtttaagtttgaatcagttcaatcatatatgacgcctttaccaatgaaagaagatcagctgagccttctgttgagtaccactgcaattcctgttcagttgattgctcacggaagcgctatcattgtcggacccaggcagattttgacctctgttgtgattgctataatgaagggaaatttgatccaggcatggccaaaaccgatttcatcctcatggattctgcaggagtttcaggtgctagtggtactagttggacagatgaggaaacattacttctattagaaggtttggaaatttttggtggaaaatgggctgagattgctgaacatgttgctactaagacaaaagcacaatgcatgttgcactttcttcaaatgcaaattgaagaccgcttccatgatggcaaagatattaatcaaaacatcccagtaagtacagatcaagccacaactgagaaagccattgctgaaacatctgagaaaatggaagttgaagataaagtggaaggaagaggtactgtggatgaaaaggcctcagagaaaacagagggaaactgtgaagaaacaaaaactgaaaatgccagtgttgttgtaaataaagatactcagaattcagatggcagagattcaggtgcatctccaagcactgaagagccaaagcaatcttctgatgagcaacctgtagtaaaggaaaattctgcagatgtagatacttctggtgaaaaactatcaaatgttgctattgatatcttaaaatctgcatttgaggctactggtcacagcccagaatatgaaggttcatttgcggatgcaggaaatccagttatggcactagcagcgtatttagctggtcttgtggaagatgataacaccaccacttcattccgtagttcactaaaatctgtatctgatgtgtctcctgcactccaattatcaagtaggcactgttttattcttgaggatccgccagatgaactcaaagacatttgtgctagtgtaagtaagaaaaatagagatggtgatcaaaaacaagatgaggatatgattcaaaattcaattgataccgagaaaaaagagatcaatgagaaagaaggtaagtctttatctgtggaaaagaaaaacaattcatccatgtcacaaaatgaccaccaagaatcaggcattaagagcgtctcaagtgatgattgctccttagtggagccaaaaaccaataatgctaaggagtcaggtgattcaactgctattggggacaagagtgcaaccgaaactacaaaaggtaatactgaacaagtgaatgacttgccaagtgttgaggtggaggctcctgatgattcatcttcaaaaggtaaggatgagctcaataagactaaagatgcagtggcgacaccagctaccgtacaggaacagaaacacagccaaacattgggaaatggggatagggaaggtacttcatctgcttttttctctcataaaactctctatatgaattatgaaaccaataaagggtaaccacacattttcactcggtttcaattagagcttctttatgtttgctgccttttctatagctcttggcttttattgaaagggcggagttattaattcctaacctggaggtgactatttgcttactcaattacatttacagctgtgactgattcacaaattaggcatattgctgacatttactggctagggttccttattttacaatatatctattgcaatttgctagcatgacatttgattgagtttcatccaagcggaagtagatatattcagaataagggggtgtttgaaagtaattttagaggtttgagataaaaccatggtattggagaatactatagtattttttccaagagatgtttggatatcttgtaaaaaaaaactctgttttgaataccatagtttagtagttacaattataattttttggagtatttaaaactccactacaacctgaagtttttgtctatgagactgactagcttcttgcacatgtatactaaataccatgatttgagatactttgtctccaaacaagtattatttggttatttggtgtgatgtaaaaaatactatggttgtgctataatattttaaaaccatagtattctaaaaccgtggtttgaaatactctgcttccaaacatgtcctaagccttgctagttgctacactagtaccgcgtgtgtgttttttttcctgattgaccagctcaccagcatgagagtaaatatttttgatgttctgtgttacgtattccctcaatcctgctaaaggtgtttgtgataaattgcattgccccttatccattttcagttgactctctttttctatatattgtctatcttgcagaacctaacaacattgaaagtgtagttgtcggtgaagagaagggctctgtagtgactgccaaccgacctgattccatagctaggctcaaaagagcagcagctactgctgtttcagcagctgctgtgaaagctaggtttctcggtgatcaggaggaatatcaaattcgaaggctgacagcacttgtaatcgaaaagctgttccaaaaaatagaagtgaagatgtcattgttttcagagattgagcaggtggtctttcgaacgagagagtacaccgagaagaccagaaagaagctcctgaaggaacgaaatgcgattattgcagctcggatgggcgcattgccgtctaggccaaaccagacaggtgtagccggaaacaggttaccacctggactgtcggactcatgagcattagtccgacgaacctattcacaggttatgatgatcatgctttccctggcattctacatggagctggcagatcatttgcatgggtctgctgaccctttctaaggaatgtcagctccatggtgttcaccgccaagaccgacgagcgtcgactactcatcgacttctactacatcctcgtgctaaagaactctatcattagtttgggacaactcgatagatcgactatggtgtcttgcacgtctagattaggggtaaaaacgattagaatatatctcgttctgttttgctctggtttctacattgacctattcaaattcgtatttatggacactatgaccattcttgtttatttgaaaatgtaaaaataggacggaaacagtatgagtgtttttcctaccgttttcacttctcgttttagtcaggattgaaaggaaaacatgctttaagccattttttagatgagtttaggtgtttgatgaccatcacattat

SEQ ID NO: 221248 - DNA, 3038 bp, Zea Mays
agaggtaggagagtaaggagaggaggaagagcactgccagtgctaggggcagtcggcaggcgcggcgcgttcccctcagtccccttccccggctggtcttgccgggagtaaggggaacgaagccaccggcgcggcatggagcccaagccgtcttcggcggcgcatgctgacgcgccagcggtcgaggccccccgccgccgtggcggcggcggcaagcgcaagtcggccgggtcctcgttcacgccgtcgaagcgtcaggccaaggagcggaacgcttccttccacgtgcccccgcatcttctgcacagcgggccgctcacccgcgccgcgcgccagtcgccgcacaagctctcgggcacgccgtcggagtcggtgccagcgtcgtcggcggccgcaactggggacggggtgagcggcgggcaggcggtggttgatgcgatccggcccgagacagaggaaacgccggccccggagctgccgctggtagacgagatgttcgaggccgtccgatcccgtggcgctggcgtccatgtggtccctacctttgctggatggttttcgtggaaagaaatccacccagttgagaagcagaccttgccttctttttttaatggaaaatctgagaagcggacacctgagatggacatgaggagagtaagccagaggagacccaagacaattctaatgacgagaaagcttctttgatcgagcaactgtttaagtttgaatcagttcaatcatatatgacgcctttaccaatgaaagaagatgtgagagctccgcctcctctgcctagcttgattcctgaatctgtactcattcaagatgtggttgcagcagctgagccttctgttgagtaccactgcaattcctgttcagttgattgctcacggaagcgctatcattgtcggacccaggcagattttgacctctgttgtgattgctataatgaagggaaatttgatccaggcatggccaaaaccgatttcatcctcatggattctgcaggagtttcaggtgctagtggtactagttggacagatgaggaaacattacttctattagaaggtttggaaatttttggtggaaaatgggctgagattgctgaacatgttgctactaagacaaaagcacaatgcatgttgcactttcttcaaatgcaaattgaagaccgcttccatgatggcaaagatattaatcaaaacatcccagtaagtacagatcaagccacaactgagaaagccattgctgaaacatctgagaaaatggaagttgaagataaagtggaaggaagaggtactgtggatgaaaaggcctcagagaaaacagagggaaactgtgaagaaacaaaaactgaaaatgccagtgttgttgtaaataaagatactcagaattcagatggcagagattcaggtgcatctccaagcactgaagagccaaagcaatcttctgatgagcaacctgtagtaaaggaaaattctgcagatgtagatacttctggtgaaaaactatcaaatgttgctattgatatcttaaaatctgcatttgaggctactggtcacagcccagaatatgaaggttcatttgcggatgcaggaaatccagttatggcactagcagcgtatttagctggtcttgtggaagatgataacaccaccacttcattccgtagttcactaaaatctgtatctgatgtgtctcctgcactccaattatcaagtaggcactgttttattcttgaggatccgccagatgaactcaaagacatttgtgctagtgtaagtaagaaaaatagagatggtgatcaaaaacaagatgaggatatgattcaaaattcaattgataccgagaaaaaagagatcaatgagaaagaaggcattaagagcgtctcaagtgatgattgctccttagtggagccaaaaaccaataatgctaaggagtcaggtgattcaactgctattggggacaagagtgcaaccgaaactacaaaaggtaatactgaacaagtgaatgacttgccaagtgttgaggtggaggctcctgatgattcatcttcaaaaggtaaggatgagctcaataagactaaagatgcagtggcgacaccagctaccgtacaggaacagaaacacagccaaacattgggaaatggggatagggaagaacctaacaacattgaaagtgtagttgtcggtgaagagaagggctctgtagtgactgccaaccgacctgattccatagctaggctcaaaagagcagcagctactgctgtttcagcagctgctgtgaaagctaggtttctcggtgatcaggaggaatatcaaattcgaaggctgacagcacttgtaatcgaaaagctgttccaaaaaatagaagtgaagatgtcattgttttcagagattgagcaggtggtctttcgaacgagagagtacaccgagaagaccagaaagaagctcctgaaggaacgaaatgcgattattgcagctcggatgggcgcattgccgtctaggccaaaccagacaggtgtagccggaaacaggttaccacctgggtatggcaaccctcctgtaaggcctccaaacgcaatgcctcggcccaccagctgaggaaattccggattccggacacccagtgatctataccccattcttttagaagcataccccaaagactcaaacctgccagcttgttgtagcattttttagaaagtacattgtacaattgtctgtataactgcttctatgaaaattcaccaaacctccacaactgttttaaacattccatcagataggaaaattccatttctctacaatgaacagcccacttgaccgttagcaagattatttctgctcaatttactaaaatagaatgctatatatctgctcaaagtttacttgcctaatggtccaatggtcgcaatgtctgaatggtccgatgctctgcagaaagaatcctagctactacatttataatatttggttcgacagcttcctttagaccagtccaacacaatctggatctggtttattttttgcagactg

SEQ ID NO: 221249 - DNA, 3024 bp, Zea Mays
gcagaggtaggagagtaaggagaggaggaagagcactgccagtgctaggggcagtcggcaggcgcggcgcgttcccctcagtccccttccccggctggtcttgccgggagtaaggggaacgaagccaccggcgcggcatggagcccaagccgtcttcggcggcgcatgctgacgcgccagcggtcgaggccccccgccgccgtggcggcggcggcaagcgcaagtcggccgggtcctcgttcacgccgtcgaagcgtcaggccaaggagcggaacgcttccttccacgtgcccccgcatcttctgcacagcgggccgctcacccgcgccgcgcgccagtcgccgcacaagctctcgggcacgccgtcggagtcggtgccagcgtcgtcggcggccgcaactggggacggggtgagcggcgggcaggcggtggttgatgcgatccggcccgagacagaggaaacgccggccccggagctgccgctggtagacgagatgttcgaggccgtccgatcccgtggcgctggcgtccatgtggtccctacctttgctggatggttttcgtggaaagaaatccacccagttgagaagcagaccttgccttctttttttaatggaaaatctgagaagcggacacctgaggtatatttggcggttagaaattcgatcatgatgaaatttcatgccaatcctcaattgcagctggagtccaaagacctggctgagttgtcaatcggggagaccgatgctcggcaggaaatcttggaattcttggatcactggggcttgataaatttccaccctttcccaccagatggacatgaggagagtaagccagaggagacccaagacaattctaatgacgagaaagcttctttgatcgagcaactgtttaagtttgaatcagttcaatcatatatgacgcctttaccaatgaaagaagatgcagattttgacctctgttgtgattgctataatgaagggaaatttgatccaggcatggccaaaaccgatttcatcctcatggattctgcaggagtttcaggtgctagtggtactagttggacagatgaggaaacattacttctattagaaggtttggaaatttttggtggaaaatgggctgagattgctgaacatgttgctactaagacaaaagcacaatgcatgttgcactttcttcaaatgcaaattgaagaccgcttccatgatggcaaagatattaatcaaaacatcccagtaagtacagatcaagccacaactgagaaagccattgctgaaacatctgagaaaatggaagttgaagataaagtggaaggaagaggtactgtggatgaaaaggcctcagagaaaacagagggaaactgtgaagaaacaaaaactgaaaatgccagtgttgttgtaaataaagatactcagaattcagatggcagagattcaggtgcatctccaagcactgaagagccaaagcaatcttctgatgagcaacctgtagtaaaggaaaattctgcagatgtagatacttctggtgaaaaactatcaaatgttgctattgatatcttaaaatctgcatttgaggctactggtcacagcccagaatatgaaggttcatttgcggatgcaggaaatccagttatggcactagcactgttttattcttgaggatccgccagatgaactcaaagacatttgtgctagtgtaagtaagaaaaatagagatggtgatcaaaaacaagatgaggatatgattcaaaattcaattgataccgagaaaaaagagatcaatgagaaagaaggtaagtctttatctgtggaaaagaaaaacaattcatccatgtcacaaaatgaccaccaagaatcaggcattaagagcgtctcaagtgatgattgctccttagtggagccaaaaaccaataatgctaaggagtcaggtgattcaactgctattggggacaagagtgcaaccgaaactacaaaaggtaatactgaacaagtgaatgacttgccaagtgttgaggtggaggctcctgatgattcatcttcaaaaggtaaggatgagctcaataagactaaagatgcagtggcgacaccagctaccgtacaggaacagaaacacagccaaacattgggaaatggggatagggaagaacctaacaacattgaaagtgtagttgtcggtgaagagaagggctctgtagtgactgccaaccgacctgattccatagctaggctcaaaagagcagcagctactgctgtttcagcagctgctgtgaaagctaggtttctcggtgatcaggaggaatatcaaattcgaaggctgacagcacttgtaatcgaaaagctgttccaaaaaatagaagtgaagatgtcattgttttcagagattgagcaggtggtctttcgaacgagagagtacaccgagaagaccagaaagaagctcctgaaggaacgaaatgcgattattgcagctcggatgggcgcattgccgtctaggccaaaccagacaggtgtagccggaaacaggttaccacctgggtatggcaaccctcctgtaaggcctccaaacgcaatgcctcggcccaccagctgaggaaattccggattccggacacccagtgatctataccccattcttttagaagcataccccaaagactcaaacctgccagcttgttgtagcattttttagaaagtacattgtacaattgtctgtataactgcttctatgaaaattcaccaaacctccacaactgttttaaacattccatcagataggaaaattccatttctctacaatgaacagcccacttgaccgttagcaagattatttctgctcaatttactaaaatagaatgctatatatctgctcaaagtttacttgcctaatggtccaatggtcgcaatgtctgaatggtccgatgctctgcagaaagaatcctagctactacatttataatatttggttcgacagcttcctttagaccagtccaacacaatctggatctggtttattttttgcagactg

SEQ ID NO: 221250 - DNA, 3313 bp, Zea Mays
gaaaaagttagccgccggcagcaaatgccccaccaatcagtgagacatacgagcggctatgggtacccgacgccacgtccccgcaacttcacaacgaacagcagaggtaggagagtaaggagaggaggaagagcactgccagtgctaggggcagtcggcaggcgcggcgcgttcccctcagtccccttccccggctggtcttgccgggagtaaggggaacgaagccaccggcgcggcatggagcccaagccgtcttcggcggcgcatgctgacgcgccagcggtcgaggccccccgccgccgtggcggcggcggcaagcgcaagtcggccgggtcctcgttcacgccgtcgaagcgtcaggccaaggagcggaacgcttccttccacgtgcccccgcatcttctgcacagcgggccgctcacccgcgccgcgcgccagtcgccgcacaagctctcgggcacgccgtcggagtcggtgccagcgtcgtcggcggccgcaactggggacggggtgagcggcgggcaggcggtggttgatgcgatccggcccgagacagaggaaacgccggccccggagctgccgctggtagacgagatgttcgaggccgtccgatcccgtggcgctggcgtccatgtggtccctacctttgctggatggttttcgtggaaagaaatccacccagttgagaagcagaccttgccttctttttttaatggaaaatctgagaagcggacacctgagctggagtccaaagacctggctgagttgtcaatcggggagaccgatgctcggcaggaaatcttggaattcttggatcactggggcttgataaatttccaccctttcccaccagatggacatgaggagagtaagccagaggagacccaagacaattctaatgacgagaaagcttctttgatcgagcaactgtttaagtttgaatcagttcaatcatatatgacgcctttaccaatgaaagaagatgtgagagctccgcctcctctgcctagcttgattcctgaatctgtactcattcaagatgtggttgcagcagctgagccttctgttgagtaccactgcaattcctgttcagttgattgctcacggaagcgctatcattgtcggacccaggcagattttgacctctgttgtgattgctataatgaagggaaatttgatccaggcatggccaaaaccgatttcatcctcatggattctgcaggagtttcaggtgctagtggtactagttggacagatgaggaaacattacttctattagaaggtttggaaatttttggtggaaaatgggctgagattgctgaacatgttgctactaagacaaaagcacaatgcatgttgcactttcttcaaatgcaaattgaagaccgcttccatgatggcaaagatattaatcaaaacatcccagtaagtacagatcaagccacaactgagaaagccattgctgaaacatctgagaaaatggaagttgaagataaagtggaaggaagaggtactgtggatgaaaaggcctcagagaaaacagagggaaactgtgaagaaacaaaaactgaaaatgccagtgttgttgtaaataaagatactcagaattcagatggcagagattcaggtgcatctccaagcactgaagagccaaagcaatcttctgatgagcaacctgtagtaaaggaaaattctgcagatgtagatacttctggtgaaaaactatcaaatgttgctattgatatcttaaaatctgcatttgaggctactggtcacagcccagaatatgaaggttcatttgcggatgcaggaaatccagttatggcactagcagcgtatttagctggtcttgtggaagatgataacaccaccacttcattccgtagttcactaaaatctgtatctgatgtgtctcctgcactccaattatcaagtaggcactgttttattcttgaggatccgccagatgaactcaaagacatttgtgctagttaagaaaaatagagatggtgatcaaaaacaagatgaggatatgattcaaaattcaattgataccgagaaaaaagagatcaatgagaaagaaggtaagtctttatctgtggaaaagaaaaacaattcatccatgtcacaaaatgaccaccaagaatcaggcattaagagcgtctcaagtgatgattgctccttagtggagccaaaaaccaataatgctaaggagtcaggtgattcaactgctattggggacaagagtgcaaccgaaactacaaaaggtaatactgaacaagtgaatgacttgccaagtgttgaggtggaggctcctgatgattcatcttcaaaaggtaaggatgagctcaataagactaaagatgcagtggcgacaccagctaccgtacaggaacagaaacacagccaaacattgggaaatggggatagggaagaacctaacaacattgaaagtgtagttgtcggtgaagagaagggctctgtagtgactgccaaccgacctgattccatagctaggctcaaaagagcagcagctactgctgtttcagcagctgctgtgaaagctaggtttctcggtgatcaggaggaatatcaaattcgaaggctgacagcacttgtaatcgaaaagctgttccaaaaaatagaagtgaagatgtcattgttttcagagattgagcaggtggtctttcgaacgagagagtacaccgagaagaccagaaagaagctcctgaaggaacgaaatgcgattattgcagctcggatgggcgcattgccgtctaggccaaaccagacaggtgtagccggaaacaggttaccacctgggtatggcaaccctcctgtaaggcctccaaacgcaatgcctcggcccaccagctgaggaaattccggattccggacacccagtgatctataccccattcttttagaagcataccccaaagactcaaacctgccagcttgttgtagcattttttagaaagtacattgtacaattgtctgtataactgcttctatgaaaattcaccaaacctccacaactgttttaaacattccatcagataggaaaattccatttctctacaatgaacagcccacttgaccgttagcaagattatttctgctcaatttactaaaatagaatgctatatatctgctcaaagtttacttgcctaatggtccaatggtcgcaatgtctgaatggtccgatgctctgcagaaagaatcctagctactacatttataatatttggttcgacagcttcctttagaccagtccaacacaatctggatctggtttattttttgcagactg

SEQ ID NO: 221251 - DNA, 3208 bp, Zea Mays
taagcagattcgatctcctcccatcacctccatcgcaacctctcgacggcagactaggtttcatccccatctcaaccggcggcagcctagggcttcatcccccacccccaaatccatgccgctcaggttggagatcaatgtgtgcctgctcgacctcactggatctcagtccccatgtcgtccttctacttctcgcgtcactttgattttgctctctagtttgattttgtttccattgtggtgattagtggaaattttctcaatggtcagagagggtcaagttggtggacttgcaccccacggaggcatggatgttgagcctgtactcgaggagtgcctgcatccgggattatcacacacagtcaatttgtaggagaggggacgccatacatcaaagatgactaaagaagaggaagatgaagaatacctcgaagaggaagaagatgcccttgctggtgcaggggggaacacatttagtttcacaaccttcatgctcttaacccctctgatcctggtgcgtggcagattagactccgatggggaagtcactagcgaggtggatcaagttcgtgctcttcaggaagaagtcgtcatccaggtccagctccaccaaggccaagaatttatcgataagaatgctgttacgatttcaagtgtggctctacatatgcatctccagctatggagtagggatttgttctagccactattgcccttatttttcaatgtgtagaaaggtgtgagtaacaaaggggaaactgctgccaggaaggagcccacgttctctgagagctctccagtgatctcagagcttgtgcttgttagcgcccataacaacgagatcatgcgggaggtggcaaagggtgaaaattctagcgtgcaagaagtgctagtgactgatgtcagtcaagacttggagaagcaggtagtgtggggctgatacgtccaataatgcgctagtgactgatgtcagtcaagacttggagaagcaggcagtgtggggctgatacatccaatgatgctgagagggtgagtgaacagcgagcggtcatgatggcacaagctaccttcccttattatctgctgaaagaagaggctatgctgaataaagtactaaaggagacagtcttgtcaaaggtagttgccattgataaattgcaatctggtctggcatcttcacttcgcatccaagatgttatgagaaatgagatccaaagagtccaggatgaactttcttgcataacccacaaagctaagcagttggagcttcaggtatcatgtgtaccttgcatatttcatatctattttccctaataaactagcagttcatagtttttatctaatcaaaataggattttggtaacagtttctctttcataatgaattaatcttagtttgtctagtgttagccaattgtagtggtcaagttgcagtatgtctcaaaatacttataagtaggtagacctttttgctgaatgagctggttacctaacgggtatttcgaggccaactgatgccactcatctctttgatctataaaagtattagaaatgcattttaatgattgaatcaagttatttgttgcttgtttgtctttagcaaatcattattttgtatttttttgcatattgccaatattttaggataatttttcccaagtgcagattaggtctactatgtgagtgttcagttagatagtcctttgaatgtttctagaaccagttctaaagttgagataatgtgaggtagcatacaaaacaacgtattgttagagatgcatactgtcaacaaacattcattccaggggtcatcttgatggtcatataagaaacactaggagaaaatgacataaattagtattacactgtcatgtttttgtatataaagtaggccatacaacttcactagaagtctagtctagagacagcagtgggctatcagtgaatgctatgttgttttaaagaccaacccataatgctgcgattgttacggtaccagcccaaatggcatgcttcttcaggacgacagatgatattcatatatgctagaatataagctctgtttgcggtattttcctccagtgctcctgctgtgtttgctgcacttaacaggtatccaagatggatgagtcaatcgatgagatccaataggatttctaggaatctacgaaggagctggctgctcttcgtggaacactgaaaacggtgattgaagacagggacctgtcgtggcaggaggtgaagtagctgagaagaaacatcagcatcatgctagaacgaggttgtgtcgctgaagaagatcgaagccttggacaaagacatacttgtcaaggagggagagatcacgatattgcaggacaacatcgacaagccgttcaatatcatctgcagcccaagttcgatgcaggagttcggcatggggtgaagatggctgctattttgtaagtgagttggtggatgaaaattcaagttattgtagaagacaacacatttctttgcatattacatcctgctatgatgttctgaactatgatgggttcaacgggtgccatttttctcttagagctattgttgacatggaagaaatggtggcagcaccagcttagtatggacaacaactgaaatctcctacagaagttgtttctaatgtgctattgagctccattgtgttttggcctacgcaatcttgttctccagtctgcctccaagaaaagctctatagtcccatagtttctgctaaggttcaacaacttcaggatcaattataggctgagaagcaagaaaaaatggacttcgtgatgaagcggaaaccattgatagtatgaagaggttgatggaagaaaataacaaccttcttcgtcaactataaagcttcaattgaagaaaagtgcctccatcttaagtttggttgactactataggacatgcagccttgtggtagctatagtagtagtagatatttatagttgctctagatttgaagttataggattatttttaattatgtttaatgtttaataatttgagttgaagttataagatttgctttgaattttaagttaaaggatttgagatatatggtttggagttatatgattatttgatggatggaatatttgtgtacaacaaattcatgtgatattttggctatgatgtgtaatattctatgacgatatcaattcatatgatgtgttccttttgatgacgac

SEQ ID NO: 221252 - DNA, 2184 bp, Zea Mays
atttatgtgttgagtcataatcacatgtgccctagtaccagtgtaccactcccaccaccaactaagcagattcgatctcctcccatcacctccatcgcaacctctcgacggcagactaggtttcatccccatctcaaccggcggcagcctagggcttcatcccccacccccaaatccatgccgctcaggttggagatcaatgtgtgcctgctcgacctcactggatctcagtccccatagagggtcaagttggtggacttgcaccccacggaggcatggatgttgagcctgtactcgaggagtgcctgcatccgggattatcacacacagtcaatttgtaggagaggggacgccatacatcaaagatgactaaagaagaggaagatgaagaatacctcgaagaggaagaagatgcccttgctggtgcaggggggaacacatttagtttcacaaccttcatgctcttaacccctctgatcctggtgcgtggcagattagactccgatggggaagtcactagcgaggtggatcaagttcgtgctcttcaggaagaagtcgtcatccaggaaggagcccacgttctctgagagctctccagtgatctcagagcttgtgcttgttagcgcccataacaacgagatcatgcgggaggtggcaaagggtgaaaattctagcgtgcaagaagtgctagtgactgatgtcagtcaagacttggagaagcaggtagtgtggggctgatacgtccaataatgcgctagtgactgatgtcagtcaagacttggagaagcaggcagtgtggggctgatacatccaatgatgctgagagggtgagtgaacagcgagcggtcatgatggcacaagctaccttcccttattatctgatgattttggattcaagctgaaagaagaggctatgctgaataaagtactaaaggagacagtcttgtcaaaggtagttgccattgataaattgcaatctggtctggcatcttcacttcgcatccaagatgttatgagaaatgagatccaaagagtccaggatgaactttcttgcataacccacaaagctaagcagttggagcttcaggtatccaagatggatgagtcaatcgatgagatccaataggatttctaggaatctacgaaggagctggctgctcttcgtggaacactgaaaacggtgattgaagacagggacctgtcgtggcaggaggtgaagtagctgagaagaaacatcagcatcatgctagaacgaggttgtgtcgctgaagaagatcgaagccttggacaaagacatacttgtcaaggagggagagatcacgatattgcaggacaacatcgacaagccgttcaatatcatctgcagcccaagttcgatgcaggagttcggcatggggtgaagatggctgctattttgtaagtgagttggtggatgaaaattcaagttattgtagaagacaacacatttctttgcatattacatcctgctatgatgttctgaactatgatgggttcaacgggtgccatttttctcttagagctattgttgacatggaagaaatggtggcagcaccagcttagtatggacaacaactgaaatctcctacagaagttgtttctaatgtgctattgagctccattgtgttttggcctacgcaatcttgttctccagtctgcctccaagaaaagctctatagtcccatagtttctgctaaggttcaacaacttcaggatcaattataggctgagaagcaagaaaaaatggacttcgtgatgaagcggaaaccattgatagtatgaagaggttgatggaagaaaataacaaccttcttcgtcaactataaagcttcaattgaagaaaagtgcctccatcttaagtttggttgactactataggacatgcagccttgtggtagctatagtagtagtagatatttatagttgctctagatttgaagttataggattatttttaattatgtttaatgtttaataatttgagttgaagttataagatttgctttgaattttaagttaaaggatttgagatatatggtttggagttatatgattatttgatggatggaatatttgtgtacaacaaattcatgtgatattttggctatgatgtgtaatattctatgacgatatcaattcatatgatgtgttccttttgatgacgac

SEQ ID NO: 221253 - DNA, 4580 bp, Zea Mays
gtctcattgcttattcccccgccacccccgcccaaaaaagaaaaagaaaaaaaacaccctcccttctccttgcttgtcagctcgcacccatggaaccctcgtcgccggccaccacggccaccttccctgctgccgtagaagaacatgagacgtaccctcccatggtgtcatcctctctattcccacttttccccttcgccgcctccacctcctctgctccccccgccgaatcccaatggctttcaaaccctagcttctccttcgatgcctcctccctgaacatcccggctaccacctcatcgtcgctcccgtcgccgcagagccactcgtccgatgaggacacgccgctgcaggccgctcctgcgaaatacgagctggtgccttcttcgccgtcctccgacgaggagagggggtcgcggaggaagagaagtgggaggaggaaacggaagcgcgagaaggagcgctatgatggggcagcgacatcgcggaaggctgggattcgtgcctgggctggattggagacgaagccagccaaggattactatgtcgacgcgaagggcgaccatgataacctggcttttggatccctctacagaatggatgttgcacgctacagatcccagaatatgatggaggcatttggtttaaatcatctgaggtttggttcatcacatattgatttggattcagacttggatggaatggataacaaagtaagagctggaggccgttactattctgcaaaaaatgcagtttctgaaagaaataaaggtttcaaacatctgaaaatatttaagggaaacacctctgtaatgctcgctgaagattttgtcccatttggtacacaatcacttcctttgaaaagcacaactgtggaacaagagctagaggagtcttgggaagatgaaatacttcgccggactagggaattcaataagatgtctcgtgaacgccctcacgatgaaaaagtttggctggctttcgctcaatttcaggacaaagttgctagcactcagccacaaaaggctgctcgtttacaaactaccgaaaggaaaattagcatattggagaaagctgtggagctcaatccagatagtgaggaattattgctttgccttctgaagtcatatggcaagagggacaacactgagactctattgactaaatgggagcaaatacttacgaagcacccagatagctctacgttgtggaaacagtatctgcttctgtgccaaggggaattctccagattcaaagtttctgaaattcggaagtcctacgtgtatgctgtacaggctctatctgcagcttgcaccaagttatgtaggcaggataataaaagcatggattccaaatcttcatccttagttcaactagaagtggggttggtggatatatttgttaatctgtgccgatttgagtggcagacaggacatcgggaactagcaactgggctatttcaggcgcagatggagtttagcttatttgcccctcctttgtatctgacaacaagcagtaagcaaaggctctttgaacacttctggaacagtggtggtgccagaattggggaagatggagctcttggatggtctgaatggttagcaaaagacgaggagagtagacaaaagttgtctatgcaagaaaattcacaagagactgaaacaggaggctggagtggttggtttgatccttctctgggtaatactgagacaaatgatttatcaaacaaatcactggaaccatcattgaccgatggaaatgatgctgaagaccttgatgctgaggactcaccagcacaagatgatgttgaatccttgctgaaaaagcttggtatcgatgtagatgcagagtccaatagtgaagttaaagacgcagaaacctggaatagatgggcctcaatggagctgtcacgggacaatcagcaatggatgcctcttcatgaaaattatggatcaattcattgtggtgatgctccatctggggaagacaatgaccagctttccagagtaattttgtttgaggatgtaactgagttcttgttttctctatcttcagaggaggcccgcttttctctgatgtgccaatttattgatttttatggtggcaaaatctcaagatggacatcaacaaacagtccaagttggctcgatcgaatattgagcttagagaatattacagatgacatcctggaagatctaggtgctgtatctgacgttgtaaacaagaaccaaagttcatatagttgtaaatataaattggaatcattactgggaagcatgtgtgacctttcacaaaggccgggcctgatgaaatttctcaaaaatgcgatactgcttctgcttggtgttttccctcgtaatcatatcctggaggaagctgttcttgttactacccaaatgtttactcctcaagagaactcttcctccattcaaactaatgcatcacgggctttggccaaaagtatgttgaagaaagaccgacaggattttttgctttgtgggatatatggacgaactgaggcaatgaatgggaacattgaacaagcaaggaagatatttgacatggcactgttatcaactgaagcaacttctgaggatcttaggaagaaggttcccatcctttatctttggtacgccgagatggagattacagtgtccgcttcaagaaacaactctgactcaatgcatcgtgcagtttacatcctatcctgcttagggagcaatctaaaatattctccttttgttggccctatttcaaggcttcaggtcttgagggctcgccaagggtttaaagagcagattagaagctcacgatctgcattttcctgtggtgctataaacaaagaatcagttgctctgatctgctcagcttctttgttcgaaagcatgacaacaggctgttactcgggtcttgaagtgatagaggagacttttccaatgacattttcagagagcaataatttggagtgtgaggatttgtgggtgtactacatcaaaatgcttcaaaaaaatcttaaccaattgaatctatcaagggtctggccaagcatatcacgcggagtgcacaaatatccctacaatccaaaatcatattcagcgacgttaaccctgagttatctttacagtgtatccaacaatctccgtctcacactcgacaaatgtagtcaaagggacccttctgtaatcaccttgctctttgctttgtcctttgaatggggtaaagctggatctgacaatagaatacacagcctgtttgagagagctctagctgatgataagttgcagaagtctgtcctattgtggcgctgttatctagcctatgaggcagaaatagtctgcaactcttctgcagcacggcgtgtgttcttcagagctatacatgcctgtccatggtctaaaagattatggcttgatggtttccaaaagttgggctctgttctgacattgaaggagttgtcagatctccaggaagtgatgcgtgacaaggaattaaacatccgcactgacatctatgagatactcctagaagaagaaacaaatacatgattctggtttgtgtgaagatcccgaaactgccccgcatgacatgctctgcagttataagtttccaaaggttcatgaaatattggttctgcattgctgttttgtggcctataagcatcgaactctgaagtctcaatcaagaacctgctatctatcatcaaataagatggatgggaagtacaatgggcatgccttggattgacaatcttgccaaatatgaccatgttttactatttttgttctttcaagatggaccttgttggctgccgttctgaatatctcacatgattcattatcggtatatagatagaagtggcttcagtgggcccttcaactgcacgataagatcaatgttaggaaggcctattacaaattcctgtacggaaatcatgccacgaacaaaaccgaaacatcaaaagcagcatatatttttgtttgactatcagtaaagcaactgcagccaggttaggggatcctgcagtgtgcttgagtgtccaaacaaaaaggcttcgaatgtatagcttcacctggcgttttgttgaaggtccccaaagttatggactttaagatgctggtatatactggctgggagcacagataagagaagtagcagcactgacatgacggcctcatgtgcttgtgcatactgtattgagtgttcatttctggaggaatcaagccatctgtttatgtgtgctagctggataaagcgctgcttgatgtacctacagggatatggccacatggctatgtacgccataggtcaacctgcattacagggttgttaatgtatctcatcctgggttgcgccttgataatgtgacaggcacgaaatggtagtgtaatttgatttaagtagttgagttttgtagaaacacagttcctggcacgatggtttgttgagtgcatgacagcatgagacaccaagctcagggatgcaggcatcctcatgaaattatgaaaccacgctgctgtggtagctggtatgttggacaaagttccgaggctgcagcttatgtacgtccaatttaaatccag

SEQ ID NO: 221254 - DNA, 4783 bp, Zea Mays
gtctcattgcttattcccccgccacccccgcccaaaaaagaaaaagaaaaaaaacaccctcccttctccttgcttgtcagctcgcacccatggaaccctcgtcgccggccaccacggccaccttccctgctgccgtagaagaacatgagacgtaccctcccatggtgtcatcctctctattcccacttttccccttcgccgcctccacctcctctgctccccccgccgaatcccaatggctttcaaaccctagcttctccttcgatgcctcctccctgaacatcccggctaccacctcatcgtcgctcccgtcgccgcagagccactcgtccgatgaggacacgccgctgcaggccgctcctgcgaaatacgagctggtgccttcttcgccgtcctccgacgaggagagggggtcgcggaggaagagaagtgggaggaggaaacggaagcgcgagaaggagcgctatgatggggcagcgacatcgcggaaggctgggattcgtgcctgggctggattggagacgaagccagccaaggattactatgtcgacgcgaagggcgaccatgataacctggcttttggatccctctacagaatggatgttgcacgctacagatcccagaatatgatggaggcatttggtttaaatcatctgaggtttggttcatcacatattgatttggattcagacttggatggaatggataacaaagtaagagctggaggccgttactattctgcaaaaaatgcagtttctgaaagaaataaaggtttcaaacatctgaaaatatttaagggaaacacctctgtaatgctcgctgaagattttgtcccatttggtacacaatcacttcctttgaaaagcacaactgtggaacaagagctagaggagtcttgggaagatgaaatacttcgccggactagggaattcaataagatgtctcgtgaacgccctcacgatgaaaaagtttggctggctttcgctcaatttcaggacaaagttgctagcactcagccacaaaaggctgctcgtttacaaactaccgaaaggaaaattagcatattggagaaagctgtggagctcaatccagatagtgaggaattattgctttgccttctgaagtcatatggcaagagggacaacactgagactctattgactaaatgggagcaaatacttacgaagcacccagatagctctacgttgtggaaacagtatctgcttctgtgccaaggggaattctccagattcaaagtttctgaaattcggaagtcctacgtgtatgctgtacaggctctatctgcagcttgcaccaagttatgtaggcaggataataaaagcatggattccaaatcttcatccttagttcaactagaagtggggttggtggatatatttgttaatctgtgccgatttgagtggcagacaggacatcgggaactagcaactgggctatttcaggcgcagatggagtttagcttatttgcccctcctttgtatctgacaacaagcagtaagcaaaggctctttgaacacttctggaacagtggtggtgccagaattggggaagatggagctcttggatggtctgaatggttagcaaaagacgaggagagtagacaaaagttgtctatgcaagaaaattcacaagagactgaaacaggaggctggagtggttggtttgatccttctctgggtaatactgagacaaatgatttatcaaacaaatcactggaaccatcattgaccgatggaaatgatgctgaagaccttgatgctgaggactcaccagcacaagatgatgttgaatccttgctgaaaaagcttggtatcgatgtagatgcagagtccaatagtgaagttaaagacgcagaaacctggaatagatgggcctcaatggagctgtcacgggacaatcagcaatggatgcctcttcatgaaaattatgtaggatcaattcattgtggtgatgctccatctggggaagacaatgaccagctttccagagtaattttgtttgaggatgtaactgagttcttgttttctctatcttcagaggaggcccgcttttctctgatgtgccaatttattgatttttatggtggcaaaatctcaagatggacatcaacaaacagtccaagttggctcgatcgaatattgagcttagagaatattacagatgacatcctggaagatctaggtgctgtatctgacgttgtaaacaagaaccaaagttcatatagttgtaaatataaattggaatcattactgggaagcatgtgtgacctttcacaaaggccgggcctgatgaaatttctcaaaaatgcgatactgcttctgcttggtgttttccctcgtaatcatatcctggaggaagctgttcttgttactacccaaatgtttactcctcaagagaactcttcctccattcaaactaatgcatcacgggctttggccaaaagtatgttgaagaaagaccgacaggattttttgctttgtgggatatatggacgaactgaggcaatgaatgggaacattgaacaagcaaggaagatatttgacatggcactgttatcaactgaagcaacttctgaggatcttaggaagaaggttcccatcctttatctttggtacgccgagatggagattacagtgtccgcttcaagaaacaactctgactcaatgcatcgtgcagtttacatcctatcctgcttagggagcaatctaaaatattctccttttgttggccctatttcaaggcttcaggtcttgagggctcgccaagggtttaaagagcagattagaagctcacgatctgcattttcctgtggtgctataaacaaagaatcagttgctctgatctgctcagcttctttgttcgaaagcatgacaacaggctgttactcgggtcttgaagtgatagaggagacttttccaatgacattttcagagagcaataatttggagtgtgaggatttgtgggtgtactacatcaaaatgcttcaaaaaaatcttaaccaattgaatctatcaagggtctggccaagcatatcacgcggagtgcacaaatatccctacaatccaaaatcatattcagcgacgttaaccctgagttatctttacagtgtatccaacaatctccgtctcacactcgacaaatgtagtcaaagggacccttctgtaatcaccttgctctttgctttgtcctttgaatggggtaaagctggatctgacaatagaatacacagcctgtttgagagagctctagctgatgataagttgcagaagtctgtcctattgtggcgctgttatctagcctatgaggcagaaatagtctgcaactcttctgcagcacggcgtgtgttcttcagagctatacatgcctgtccatggtctaaaagattatggcttgatggtttccaaaagttgggctctgttctgacattgaaggagttgtcagatctccaggaagtgatgcgtgacaaggaattaaacatccgcactgacatctatgagatactcctagaagaagaaacaaatacatgattctggtttgtgtgaagatcccgaaactgccccgcatgacatgctctgcagttataagtttccaaaggttcatgaaatattggttctgcattgctgttttgtggcctataagcatcgaactctgaagtctcaatcaagaacctgctatctatcatcaaataagatggatgggaagtacaatgggcatgccttggattgacaatcttgccaaatatgaccatgttttactatttttgttctttcaagatggaccttgttggctgccgttctgaatatctcacatgattcattatcggtatatagatagaagtggcttcagtgggcccttcaactgcacgataagatcaatgttaggaaggcctattacaaattcctgtacggaaatcatgccacgaacaaaaccgaaacatcaaaagcagcatatatttttgtttgactatcagtaaagcaactgcagccaggttaggggatcctgcagtgtgcttgagtgtccaaacaaaaaggcttcgaatgtatagcttcacctggcgttttgttgaaggtagaaggggacacgttcctgcaccctacactagcttgctgtactaaacatttactgtggtttgttttttaaaggtccccaaagttatggactttaagatgctggtatatactggctgggagcacagataagagaagtagcagcactgacatgacggcctcagtaagtaataatgttagttttcattcgctgaggatgggtattattgctagctgtgttttgtttgtgcatactgtattgactgttcatttctcgaggattcgagccatctgttgttcatgtgtgcagtgtgcttgtgcatactgtattgagtgttcatttctggaggaatcaagccatctgtttatgtgtgctagctggataaagcgctgcttgatgtacctacagggatatggccacatggctatgtacgccataggtcaacctgcattacagggttgttaatgtatctcatcctgggttgcgccttgataatgtgacaggcacgaaatggtagtgtaatttgatttaagtagttgagttttgtagaaacacagttcctggcacgatggtttgttgagtgcatgacagcatgagacaccaagctcagggatgcaggcatcctcatgaaattatgaaaccacgctgctgtggtagctggtatgttggacaaagttccgaggctgcagcttatgtacgtccaatttaaatccag

SEQ ID NO: 221255 - DNA, 4611 bp, Zea Mays
gtctcattgcttattcccccgccacccccgcccaaaaaagaaaaagaaaaaaaacaccctcccttctccttgcttgtcagctcgcacccatggaaccctcgtcgccggccaccacggccaccttccctgctgccgtagaagaacatgagacgtaccctcccatggtgtcatcctctctattcccacttttccccttcgccgcctccacctcctctgctccccccgccgaatcccaatggctttcaaaccctagcttctccttcgatgcctcctccctgaacatcccggctaccacctcatcgtcgctcccgtcgccgcagagccactcgtccgatgaggacacgccgctgcaggccgctcctgcgaaatacgagctggtgccttcttcgccgtcctccgacgaggagagggggtcgcggaggaagagaagtgggaggaggaaacggaagcgcgagaaggagcgctatgatggggcagcgacatcgcggaaggctgggattcgtgcctgggctggattggagacgaagccagccaaggattactatgtcgacgcgaagggcgaccatgataacctggcttttggatccctctacagaatggatgttgcacgctacagatcccagaatatgatggaggcatttggtttaaatcatctgaggtttggttcatcacatattgatttggattcagacttggatggaatggataacaaagtaagagctggaggccgttactattctgcaaaaaatgcagtttctgaaagaaataaaggtttcaaacatctgaaaatatttaagggaaacacctctgtaatgctcgctgaagattttgtcccatttggtacacaatcacttcctttgaaaagcacaactgtggaacaagagctagaggagtcttgggaagatgaaatacttcgccggactagggaattcaataagatgtctcgtgaacgccctcacgatgaaaaagtttggctggctttcgctcaatttcaggacaaagttgctagcactcagccacaaaaggctgctcgtttacaaactaccgaaaggaaaattagcatattggagaaagctgtggagctcaatccagatagtgaggaattattgctttgccttctgaagtcatatggcaagagggacaacactgagactctattgactaaatgggagcaaatacttacgaagcacccagatagctctacgttgtggaaacagtatctgcttctgtgccaaggggaattctccagattcaaagtttctgaaattcggaagtcctacgtgtatgctgtacaggctctatctgcagcttgcaccaagttatgtaggcaggataataaaagcatggattccaaatcttcatccttagttcaactagaagtggggttggtggatatatttgttaatctgtgccgatttgagtggcagacaggacatcgggaactagcaactgggctatttcaggcgcagatggagtttagcttatttgcccctcctttgtatctgacaacaagcagtaagcaaaggctctttgaacacttctggaacagtggtggtgccagaattggggaagatggagctcttggatggtctgaatggttagcaaaagacgaggagagtagacaaaagttgtctatgcaagaaaattcacaagagactgaaacaggaggctggagtggttggtttgatccttctctgggtaatactgagacaaatgatttatcaaacaaatcactggaaccatcattgaccgatggaaatgatgctgaagaccttgatgctgaggactcaccagcacaagatgatgttgaatccttgctgaaaaagcttggtatcgatgtagatgcagagtccaatagtgaagttaaagacgcagaaacctggaatagatgggcctcaatggagctgtcacgggacaatcagcaatggatgcctcttcatgaaaattatggatcaattcattgtggtgatgctccatctggggaagacaatgaccagctttccagagtaattttgtttgaggatgtaactgagttcttgttttctctatcttcagaggaggcccgcttttctctgatgtgccaatttattgatttttatggtggcaaaatctcaagatggacatcaacaaacagtccaagttggctcgatcgaatattgagcttagagaatattacagatgacatcctggaagatctaggtgctgtatctgacgttgtaaacaagaaccaaagttcatatagttgtaaatataaattggaatcattactgggaagcatgtgtgacctttcacaaaggccgggcctgatgaaatttctcaaaaatgcgatactgcttctgcttggtgttttccctcgtaatcatatcctggaggaagctgttcttgttactacccaaatgtttactcctcaagagaactcttcctccattcaaactaatgcatcacgggctttggccaaaagtatgttgaagaaagaccgacaggattttttgctttgtgggatatatggacgaactgaggcaatgaatgggaacattgaacaagcaaggaagatatttgacatggcactgttatcaactgaagcaacttctgaggatcttaggaagaaggttcccatcctttatctttggtacgccgagatggagattacagtgtccgcttcaagaaacaactctgactcaatgcatcgtgcagtttacatcctatcctgcttagggagcaatctaaaatattctccttttgttggccctatttcaaggcttcaggtcttgagggctcgccaagggtttaaagagcagattagaagctcacgatctgcattttcctgtggtgctataaacaaagaatcagttgctctgatctgctcagcttctttgttcgaaagcatgacaacaggctgttactcgggtcttgaagtgatagaggagacttttccaatgacattttcagagagcaataatttggagtgtgaggatttgtgggtgtactacatcaaaatgcttcaaaaaaatcttaaccaattgaatctatcaagggtctggccaagcatatcacgcggagtgcacaaatatccctacaatccaaaatcatattcagcgacgttaaccctgagttatctttacagtgtatccaacaatctccgtctcacactcgacaaatgtagtcaaagggacccttctgtaatcaccttgctctttgctttgtcctttgaatggggtaaagctggatctgacaatagaatacacagcctgtttgagagagctctagctgatgataagttgcagaagtctgtcctattgtggcgctgttatctagcctatgaggcagaaatagtctgcaactcttctgcagcacggcgtgtgttcttcagagctatacatgcctgtccatggtctaaaagattatggcttgatggtttccaaaagttgggctctgttctgacattgaaggagttgtcagatctccaggaagtgatgcgtgacaaggaattaaacatccgcactgacatctatgagatactcctagaagaagaaacaaatacatgattctggtttgtgtgaagatcccgaaactgccccgcatgacatgctctgcagttataagtttccaaaggttcatgaaatattggttctgcattgctgttttgtggcctataagcatcgaactctgaagtctcaatcaagaacctgctatctatcatcaaataagatggatgggaagtacaatgggcatgccttggattgacaatcttgccaaatatgaccatgttttactatttttgttctttcaagatggaccttgttggctgccgttctgaatatctcacatgattcattatcggtatatagatagaagtggcttcagtgggcccttcaactgcacgataagatcaatgttaggaaggcctattacaaattcctgtacggaaatcatgccacgaacaaaaccgaaacatcaaaagcagcatatatttttgtttgactatcagtaaagcaactgcagccaggttaggggatcctgcagtgtgcttgagtgtccaaacaaaaaggcttcgaatgtatagcttcacctggcgttttgttgaaggtccccaaagttatggactttaagatgctggtatatactggctgggagcacagataagagaagtagcagcactgacatgacggcctcagattcgagccatctgttgttcatgtgtgcagtgtgcttgtgcatactgtattgagtgttcatttctggaggaatcaagccatctgtttatgtgtgctagctggataaagcgctgcttgatgtacctacagggatatggccacatggctatgtacgccataggtcaacctgcattacagggttgttaatgtatctcatcctgggttgcgccttgataatgtgacaggcacgaaatggtagtgtaatttgatttaagtagttgagttttgtagaaacacagttcctggcacgatggtttgttgagtgcatgacagcatgagacaccaagctcagggatgcaggcatcctcatgaaattatgaaaccacgctgctgtggtagctggtatgttggacaaagttccgaggctgcagcttatgtacgtccaatttaaatccag

SEQ ID NO: 221256 - DNA, 4772 bp, Zea Mays
gtctcattgcttattcccccgccacccccgcccaaaaaagaaaaagaaaaaaaacaccctcccttctccttgcttgtcagctcgcacccatggaaccctcgtcgccggccaccacggccaccttccctgctgccgtagaagaacatgagacgtaccctcccatggtgtcatcctctctattcccacttttccccttcgccgcctccacctcctctgctccccccgccgaatcccaatggctttcaaaccctagcttctccttcgatgcctcctccctgaacatcccggctaccacctcatcgtcgctcccgtcgccgcagagccactcgtccgatgaggacacgccgctgcaggccgctcctgcgaaatacgagctggtgccttcttcgccgtcctccgacgaggagagggggtcgcggaggaagagaagtgggaggaggaaacggaagcgcgagaaggagcgctatgatggggcagcgacatcgcggaaggctgggattcgtgcctgggctggattggagacgaagccagccaaggattactatgtcgacgcgaagggcgaccatgataacctggcttttggatccctctacagaatggatgttgcacgctacagatcccagaatatgatggaggcatttggtttaaatcatctgaggtttggttcatcacatattgatttggattcagacttggatggaatggataacaaagtaagagctggaggccgttactattctgcaaaaaatgcagtttctgaaagaaataaaggtttcaaacatctgaaaatatttaagggaaacacctctgtaatgctcgctgaagattttgtcccatttggtacacaatcacttcctttgaaaagcacaactgtggaacaagagctagaggagtcttgggaagatgaaatacttcgccggactagggaattcaataagatgtctcgtgaacgccctcacgatgaaaaagtttggctggctttcgctcaatttcaggacaaagttgctagcactcagccacaaaaggctgctcgtttacaaactaccgaaaggaaaattagcatattggagaaagctgtggagctcaatccagatagtgaggaattattgctttgccttctgaagtcatatggcaagagggacaacactgagactctattgactaaatgggagcaaatacttacgaagcacccagatagctctacgttgtggaaacagtatctgcttctgtgccaaggggaattctccagattcaaagtttctgaaattcggaagtcctacgtgtatgctgtacaggctctatctgcagcttgcaccaagttatgtaggcaggataataaaagcatggattccaaatcttcatccttagttcaactagaagtggggttggtggatatatttgttaatctgtgccgatttgagtggcagacaggacatcgggaactagcaactgggctatttcaggcgcagatggagtttagcttatttgcccctcctttgtatctgacaacaagcagtaagcaaaggctctttgaacacttctggaacagtggtggtgccagaattggggaagatggagctcttggatggtctgaatggttagcaaaagacgaggagagtagacaaaagttgtctatgcaagaaaattcacaagagactgaaacaggaggctggagtggttggtttgatccttctctgggtaatactgagacaaatgatttatcaaacaaatcactggaaccatcattgaccgatggaaatgatgctgaagaccttgatgctgaggactcaccagcacaagatgatgttgaatccttgctgaaaaagcttggtatcgatgtagatgcagagtccaatagtgaagttaaagacgcagaaacctggaatagatgggcctcaatggagctgtcacgggacaatcagcaatggatgcctcttcatgaaaattatggatcaattcattgtggtgatgctccatctggggaagacaatgaccagctttccagagtaattttgtttgaggatgtaactgagttcttgttttctctatcttcagaggaggcccgcttttctctgatgtgccaatttattgatttttatggtggcaaaatctcaagatggacatcaacaaacagtccaagttggctcgatcgaatattgagcttagagaatattacagatgacatcctggaagatctaggtgctgtatctgacgttgtaaacaagaaccaaagttcatatagttgtaaatataaattggaatcattactgggaagcatgtgtgacctttcacaaaggccgggcctgatgaaatttctcaaaaatgcgatactgcttctgcttggtgttttccctcgtaatcatatcctggaggaagctgttcttgttactacccaaatgtttactcctcaagagaactcttcctccattcaaactaatgcatcacgggctttggccaaaagtatgttgaagaaagaccgacaggattttttgctttgtgggatatatggacgaactgaggcaatgaatgggaacattgaacaagcaaggaagatatttgacatggcactgttatcaactgaagcaacttctgaggaagaaggttcccatcctttatctttggtacgccgagatggagattacagtgtccgcttcaagaaacaactctgactcaatgcatcgtgcagtttacatcctatcctgcttagggagcaatctaaaatattctccttttgttggccctatttcaaggcttcaggtcttgagggctcgccaagggtttaaagagcagattagaagctcacgatctgcattttcctgtggtgctataaacaaagaatcagttgctctgatctgctcagcttctttgttcgaaagcatgacaacaggctgttactcgggtcttgaagtgatagaggagacttttccaatgacattttcagagagcaataatttggagtgtgaggatttgtgggtgtactacatcaaaatgcttcaaaaaaatcttaaccaattgaatctatcaagggtctggccaagcatatcacgcggagtgcacaaatatccctacaatccaaaatcatattcagcgacgttaaccctgagttatctttacagtgtatccaacaatctccgtctcacactcgacaaatgtagtcaaagggacccttctgtaatcaccttgctctttgctttgtcctttgaatggggtaaagctggatctgacaatagaatacacagcctgtttgagagagctctagctgatgataagttgcagaagtctgtcctattgtggcgctgttatctagcctatgaggcagaaatagtctgcaactcttctgcagcacggcgtgtgttcttcagagctatacatgcctgtccatggtctaaaagattatggcttgatggtttccaaaagttgggctctgttctgacattgaaggagttgtcagatctccaggaagtgatgcgtgacaaggaattaaacatccgcactgacatctatgagatactcctagaagaagaaacaaatacatgattctggtttgtgtgaagatcccgaaactgccccgcatgacatgctctgcagttataagtttccaaaggttcatgaaatattggttctgcattgctgttttgtggcctataagcatcgaactctgaagtctcaatcaagaacctgctatctatcatcaaataagatggatgggaagtacaatgggcatgccttggattgacaatcttgccaaatatgaccatgttttactatttttgttctttcaagatggaccttgttggctgccgttctgaatatctcacatgattcattatcggtatatagatagaagtggcttcagtgggcccttcaactgcacgataagatcaatgttaggaaggcctattacaaattcctgtacggaaatcatgccacgaacaaaaccgaaacatcaaaagcagcatatatttttgtttgactatcagtaaagcaactgcagccaggttaggggatcctgcagtgtgcttgagtgtccaaacaaaaaggcttcgaatgtatagcttcacctggcgttttgttgaaggtagaaggggacacgttcctgcaccctacactagcttgctgtactaaacatttactgtggtttgttttttaaaggtccccaaagttatggactttaagatgctggtatatactggctgggagcacagataagagaagtagcagcactgacatgacggcctcagtaagtaataatgttagttttcattcgctgaggatgggtattattgctagctgtgttttgtttgtgcatactgtattgactgttcatttctcgaggattcgagccatctgttgttcatgtgtgcagtgtgcttgtgcatactgtattgagtgttcatttctggaggaatcaagccatctgtttatgtgtgctagctggataaagcgctgcttgatgtacctacagggatatggccacatggctatgtacgccataggtcaacctgcattacagggttgttaatgtatctcatcctgggttgcgccttgataatgtgacaggcacgaaatggtagtgtaatttgatttaagtagttgagttttgtagaaacacagttcctggcacgatggtttgttgagtgcatgacagcatgagacaccaagctcagggatgcaggcatcctcatgaaattatgaaaccacgctgctgtggtagctggtatgttggacaaagttccgaggctgcagcttatgtacgtccaatttaaatccag

SEQ ID NO: 221257 - DNA, 4616 bp, Zea Mays
gtctcattgcttattcccccgccacccccgcccaaaaaagaaaaagaaaaaaaacaccctcccttctccttgcttgtcagctcgcacccatggaaccctcgtcgccggccaccacggccaccttccctgctgccgtagaagaacatgagacgtaccctcccatggtgtcatcctctctattcccacttttccccttcgccgcctccacctcctctgctccccccgccgaatcccaatggctttcaaaccctagcttctccttcgatgcctcctccctgaacatcccggctaccacctcatcgtcgctcccgtcgccgcagagccactcgtccgatgaggacacgccgctgcaggccgctcctgcgaaatacgagctggtgccttcttcgccgtcctccgacgaggagagggggtcgcggaggaagagaagtgggaggaggaaacggaagcgcgagaaggagcgctatgatggggcagcgacatcgcggaaggctgggattcgtgcctgggctggattggagacgaagccagccaaggattactatgtcgacgcgaagggcgaccatgataacctggcttttggatccctctacagaatggatgttgcacgctacagatcccagaatatgatggaggcatttggtttaaatcatctgaggtttggttcatcacatattgatttggattcagacttggatggaatggataacaaagtaagagctggaggccgttactattctgcaaaaaatgcagtttctgaaagaaataaaggtttcaaacatctgaaaatatttaagggaaacacctctgtaatgctcgctgaagattttgtcccatttggtacacaatcacttcctttgaaaagcacaactgtggaacaagagctagaggagtcttgggaagatgaaatacttcgccggactagggaattcaataagatgtctcgtgaacgccctcacgatgaaaaagtttggctggctttcgctcaatttcaggacaaagttgctagcactcagccacaaaaggctgctcgtttacaaactaccgaaaggaaaattagcatattggagaaagctgtggagctcaatccagatagtgaggaattattgctttgccttctgaagtcatatggcaagagggacaacactgagactctattgactaaatgggagcaaatacttacgaagcacccagatagctctacgttgtggaaacagtatctgcttctgtgccaaggggaattctccagattcaaagtttctgaaattcggaagtcctacgtgtatgctgtacaggctctatctgcagcttgcaccaagttatgtaggcaggataataaaagcatggattccaaatcttcatccttagttcaactagaagtggggttggtggatatatttgttaatctgtgccgatttgagtggcagacaggacatcgggaactagcaactgggctatttcaggcgcagatggagtttagcttatttgcccctcctttgtatctgacaacaagcagtaagcaaaggctctttgaacacttctggaacagtggtggtgccagaattggggaagatggagctcttggatggtctgaatggttagcaaaagacgaggagagtagacaaaagttgtctatgcaagaaaattcacaagagactgaaacaggaggctggagtggttggtttgatccttctctgggtaatactgagacaaatgatttatcaaacaaatcactggaaccatcattgaccgatggaaatgatgctgaagaccttgatgctgaggactcaccagcacaagatgatgttgaatccttgctgaaaaagcttggtatcgatgtagatgcagagtccaatagtgaagttaaagacgcagaaacctggaatagatgggcctcaatggagctgtcacgggacaatcagcaatggatgcctcttcatgaaaattatggatcaattcattgtggtgatgctccatctggggaagacaatgaccagctttccagagtaattttgtttgaggatgtaactgagttcttgttttctctatcttcagaggaggcccgcttttctctgatgtgccaatttattgatttttatggtggcaaaatctcaagatggacatcaacaaacagtccaagttggctcgatcgaatattgagcttagagaatattacagatgacatcctggaagatctaggtgctgtatctgacgttgtaaacaagaaccaaagttcatatagttgtaaatataaattggaatcattactgggaagcatgtgtgacctttcacaaaggccgggcctgatgaaatttctcaaaaatgcgatactgcttctgcttggtgttttccctcgtaatcatatcctggaggaagctgttcttgttactacccaaatgtttactcctcaagagaactcttcctccattcaaactaatgcatcacgggctttggccaaaagtatgttgaagaaagaccgacaggattttttgctttgtgggatatatggacgaactgaggcaatgaatgggaacattgaacaagcaaggaagatatttgacatggcactgttatcaactgaagcaacttctgaggcttcaggtcttgagggctcgccaagggtttaaagagcagattagaagctcacgatctgcattttcctgtggtgctataaacaaagaatcagttgctctgatctgctcagcttctttgttcgaaagcatgacaacaggctgttactcgggtcttgaagtgatagaggagacttttccaatgacattttcagagagcaataatttggagtgtgaggatttgtgggtgtactacatcaaaatgcttcaaaaaaatcttaaccaattgaatctatcaagggtctggccaagcatatcacgcggagtgcacaaatatccctacaatccaaaatcatattcagcgacgttaaccctgagttatctttacagtgtatccaacaatctccgtctcacactcgacaaatgtagtcaaagggacccttctgtaatcaccttgctctttgctttgtcctttgaatggggtaaagctggatctgacaatagaatacacagcctgtttgagagagctctagctgatgataagttgcagaagtctgtcctattgtggcgctgttatctagcctatgaggcagaaatagtctgcaactcttctgcagcacggcgtgtgttcttcagagctatacatgcctgtccatggtctaaaagattatggcttgatggtttccaaaagttgggctctgttctgacattgaaggagttgtcagatctccaggaagtgatgcgtgacaaggaattaaacatccgcactgacatctatgagatactcctagaagaagaaacaaatacatgattctggtttgtgtgaagatcccgaaactgccccgcatgacatgctctgcagttataagtttccaaaggttcatgaaatattggttctgcattgctgttttgtggcctataagcatcgaactctgaagtctcaatcaagaacctgctatctatcatcaaataagatggatgggaagtacaatgggcatgccttggattgacaatcttgccaaatatgaccatgttttactatttttgttctttcaagatggaccttgttggctgccgttctgaatatctcacatgattcattatcggtatatagatagaagtggcttcagtgggcccttcaactgcacgataagatcaatgttaggaaggcctattacaaattcctgtacggaaatcatgccacgaacaaaaccgaaacatcaaaagcagcatatatttttgtttgactatcagtaaagcaactgcagccaggttaggggatcctgcagtgtgcttgagtgtccaaacaaaaaggcttcgaatgtatagcttcacctggcgttttgttgaaggtagaaggggacacgttcctgcaccctacactagcttgctgtactaaacatttactgtggtttgttttttaaaggtccccaaagttatggactttaagatgctggtatatactggctgggagcacagataagagaagtagcagcactgacatgacggcctcagtaagtaataatgttagttttcattcgctgaggatgggtattattgctagctgtgttttgtttgtgcatactgtattgactgttcatttctcgaggattcgagccatctgttgttcatgtgtgcagtgtgcttgtgcatactgtattgagtgttcatttctggaggaatcaagccatctgtttatgtgtgctagctggataaagcgctgcttgatgtacctacagggatatggccacatggctatgtacgccataggtcaacctgcattacagggttgttaatgtatctcatcctgggttgcgccttgataatgtgacaggcacgaaatggtagtgtaatttgatttaagtagttgagttttgtagaaacacagttcctggcacgatggtttgttgagtgcatgacagcatgagacaccaagctcagggatgcaggcatcctcatgaaattatgaaaccacgctgctgtggtagctggtatgttggacaaagttccgaggctgcagcttatgtacgtccaatttaaatccag

SEQ ID NO: 221258 - DNA, 4214 bp, Zea Mays
gtctcattgcttattcccccgccacccccgcccaaaaaagaaaaagaaaaaaaacaccctcccttctccttgcttgtcagctcgcacccatggaaccctcgtcgccggccaccacggccaccttccctgctgccgtagaagaacatgagacgtaccctcccatggtgtcatcctctctattcccacttttccccttcgccgcctccacctcctctgctccccccgccgaatcccaatggctttcaaaccctagcttctccttcgatgcctcctccctgaacatcccggctaccacctcatcgtcgctcccgtcgccgcagagccactcgtccgatgaggacacgccgctgcaggccgctcctgcgaaatacgagctggtgccttcttcgccgtcctccgacgaggagagggggtcgcggaggaagagaagtgggaggaggaaacggaagcgcgagaaggagcgctatgatggggcagcgacatcgcggaaggctgggattcgtgcctgggctggattggagacgaagccagccaaggattactatgtcgacgcgaagggcgaccatgataacctggcttttggatccctctacagaatggatgttgcacgctacagatcccagaatatgatggaggcatttggtttaaatcatctgaggtttggttcatcacatattgatttggattcagacttggatggaatggataacaaagtaagagctggaggccgttactattctgcaaaaaatgcagtttctgaaagaaataaaggtttcaaacatctgaaaatatttaagggaaacacctctgtaatgctcgctgaagattttgtcccatttggtacacaatcacttcctttgaaaagcacaactgtggaacaagagctagaggagtcttgggaagatgaaatacttcgccggactagggaattcaataagatgtctcgtgaacgccctcacgatgaaaaagtttggctggctttcgctcaatttcaggacaaagttgctagcactcagccacaaaaggctgctcgtttacaaactaccgaaaggaaaattagcatattggagaaagctgtggagctcaatccagatagtgaggaattattgctttgccttctgaagtcatatggcaagagggacaacactgagactctattgactaaatgggagcaaatacttacgaagcacccagatagctctacgttgtggaaacagtatctgcttctgtgccaaggggaattctccagattcaaagtttctgaaattcggaagtcctacgtgtatgctgtacaggctctatctgcagcttgcaccaagttatgtaggcaggataataaaagcatggattccaaatcttcatccttagttcaactagaagtggggttggtggatatatttgttaatctgtgccgatttgagtggcagacaggacatcgggaactagcaactgggctatttcaggcgcagatggagtttagcttatttgcccctcctttgtatctgacaacaagcagtaagcaaaggctctttgaacacttctggaacagtggtggtgccagaattggggaagatggagctcttggatggtctgaatggttagcaaaagacgaggagagtagacaaaagttgtctatgcaagaaaattcacaagagactgaaacaggaggctggagtggttggtttgatccttctctgggtaatactgagacaaatgatttatcaaacaaatcactggaaccatcattgaccgatggaaatgatgctgaagaccttgatgctgaggactcaccagcacaagatgatgttgaatccttgctgaaaaagcttggtatcgatgtagatgcagagtccaatagtgaagttaaagacgcagaaacctggaatagatgggcctcaatggagctgtcacgggacaatcagcaatggatgcctcttcatgaaaattatggatcaattcattgtggtgatgctccatctggggaagacaatgaccagctttccagagtaattttgtttgaggatgtaactgagttcttgttttctctatcttcagaggaggcccgcttttctctgatgtgccaatttattgatttttatggtggcaaaatctcaagatggacatcaacaaacagtccaagttggctcgatcgaatattgagcttagagaatattacagatgacatcctggaagatctaggtgctgtatctgacgttgtaaacaagaaccaaagttcatatagttgtaaatataaattggaatcattactgggaagcatgtgtgacctttcacaaaggccgggcctgatgaaatttctcaaaaatgcgatactgcttctgcttggtgttttccctcgtaatcatatcctggaggaagctgttcttgttactacccaaatgtttactcctcaagagaactcttcctccattcaaactaatgcatcacgggctttggccaaaagtatgttgaagaaagaccgacaggattttttgctttgtgggatatatggacgaactgaggcaatgaatgggaacattgaacaagcaaggaagatatttgacatggcactgttatcaactgaagcaacttctgaggatcttaggaagaaggttcccatcctttatctttggtacgccgagatggagattacagtgtccgcttcaagaaacaactctgactcaatgcatcgtgcagtttacatcctatcctgcttagggagcaatctaaaatattctccttttgttggccctatttcaaggcttcaggtcttgagggctcgccaagggtttaaagagcagattagaagctcacgatctgcattttcctgtggtgctataaacaaagaatcagttgctctgatctgctcagcttctttgttcgaaagcatgacaacaggctgttactcgggtcttgaagtgatagaggagacttttccaatgacattttcagagagcaataatttggagtgtgaggatttgtgggtgtactacatcaaaatgcttcaaaaaaatcttaaccaattgaatctatcaagggtctggccaagcatatcacgcggagtgcacaaatatccctacaatccaaaatcatattcagcgacgttaaccctgagttatctttacagtgtatccaacaatctccgtctcacactcgacaaatgtagtcaaagggacccttctgtaatcaccttgctctttgctttgtcctttgaatggggtaaagctggatctgacaatagaatacacagcctgtttgagagagctctagctgatgataagttgcagaagtctgtcctattgtggcgctgttatctagcctatgaggcagaaatagtctgcaactcttctgcagcacggcgtgtgttcttcagagctatacatgcctgtccatggtctaaaagattatggcttgatggtttccaaaagttgggctctgttctgacattgaaggagttgtcagatctccaggaagtgatgcgtgacaaggaattaaacatccgcactgacatctatgagatactcctagaagaagaaacaaatacatgattctggtttgtgtgaagatcccgaaactgccccgcatgacatgctctgcagttataagtttccaaaggttcatgaaatattggttctgcattgctgttttgtggcctataagcatcgaactctgaagtctcaatcaagaacctgctatctatcatcaaataagatggatgggaagtacaatgggcatgccttggattgacaatcttgccaaatatgaccatgttttactatttttgttctttcaagatggaccttgttggctgccgttctgaatatctcacatgattcattatcggtatatagatagaagtggcttcagtgggcccttcaactgcacgataagatcaatgttaggaaggcctattacaaattcctgtacggaaatcatgccacgaacaaaaccgaaacatcaaaagcagcatatatttttgtttgactatcagtaaagcaactgcagccaggttaggggatcctgcagtgtgcttgagtgtccaaacaaaaaggcttcgaatgtatagcttcacctggcgttttgttgaaggtccccaaagttatggactttaagatgctggtatatactggctgggagcacagataagagaagtagcagcactgacatgacggcctcaactcaggccgtgagccgacacggcggggccgaacgcgaac

SEQ ID NO: 221259 - DNA, 1970 bp, Zea Mays
cagcatcggccttcccgtgtcaccctcactcagcccggcccgactcgtcaaggattcctatcttcctatggtcgtcgtcgtcgtcgtcgtcggagacgtcctcgagtccccctcccctcccctcccccccggccccgccgaagaggagcagcgcagccgcgatggaccgcgtccagctcgtgctcctcggcctccccatcctcctcttctgctccgacgtcgttaccctcttcgcgcctctcccgccgccgggccccgggcccgacaggggcccccacgcttttcagcccggcgccgaatcctcctccgccgccgacgcttccgcacatgtggagccacaggtggacggaactggctccggcaccaccgtcgacttcaagttctgcgcctcctgctcgtacaggggaactgcaatgaccatgaaacggatgctggaaacctcctttcctgggatccatgttgtcttggaaaattatcctccgccgttccccaaacgcgctctcagtaaagctgtaccccttcttcagttcggcgcgatggcaacattaatggccggtgatcagatcttccccaggtttggaatggtcccgcctccttggtactactcactccgcgctaatagatttgggaccatggcgtcaatctggctgtttggcaatttcgcccattcatttctacagagttctggtgcctttgaagtttattgcaacgggcaactggtaggttcctgtgaacacctagttttgctgcaatgttgttctcaagtacttttacttttgtttgcaacattatatttttttcgaaatcatttcatttcttgccgaatgttttctgggcactgaagctccctgagttatctgatttacttcattgagctattcgtatttcctctttgatagaagctagtaacattttggaaccctaggtaaactagtttcttttcctggatctctgaactgaaatgtggaggtcaggtcacgtttatgcatacaattcttcatatggtggtagaattatcaattgttggtcgcgaagctttggaaaaagagcaagttattctagaacagtatgagagagcagggtttgttatgtttgcttgtatggcatctgtgcttttctttctcttggtggagtcaaagtactaatatgtccaaattcataattactgaagtgcgtattagttgtacttatgctgcatagtactgtggcaatagccaaacaatgagactgaaagtggtactgtaaatgcaacaaaccaagtaggggaaattgtggtaatagtagacaactatgcagggcaggccgttccaaaatgacaagtggtcggtgtttgtaaaagtagcctgggatctaggtctttccttcatatggaactgcaagcttcaaacatcttgttttcttatatatgcagtccatatggatcattcattcaaatggtaaatatgatgagcaatcatagttctttgaagtgaaactatagttttactctttttcatatacattgtttgaaccattcctgcatttcccttttccgtaactgaatttcttatgcagccgacctggatgtgccttgcttatgctagcaattttctccacttttcaggttttctccaaactgtctgagcagaggtttcctagtgaacttgagctacaggagctcattggcagtaggataccggattctcagattgtagaaaatctggaaaaagatctggtcctagaaaaagatctggtcttagatgatgttgatgccgatgatgccatgagagactagcttcgcctgtttgtttgttactaaatagacagaacttgagagtttcacaacttaattgtcaaaaacatattgccttataatttgcactttattttcctcaattatgtacatatttataccatagttatgtaatatctattgaagtcgtcaagtcagaactttcacagattgcaatagctcattaaaaaggggcaaa

SEQ ID NO: 221260 - DNA, 1086 bp, Zea Mays
atgtccggtgacgggactggaggtgtaaggcaggtccagcaacctcgccaagctgctgctacgccagcggatgcgtcccacgtcggcaccccagatcgtggcgtggcgaacatgggttcccgtccacactctgggctcacgcaccagctgcgtgacggcacgcgtgggcgcagcctacgcgccatctaccccggggcgctggtcgacgtttcgtgcgggctgcgtctaccaaaggcggcgctgctccaacgctggggaacaagcctggtccgacccgtggttgatgagggagacctaggtgacatggcaggcaagagaaagataaaccccgaatgcgcaaagctgatccctgtgaagctggcgtttgataggctccatgcttccctgtcatcaggttctgcagatggtgctcccttcgaaccggctgctgttctgcagggtggggcaccaactacctcgcagggccctctcctcagcaatctctttgtaaggccagttgctgcaatacttgattcacctatgctgcctcaattgatgcctgcagaaacacctgttgtggccacagctgctgcatcaatagctcagaacactaaacatcgacgcttattcaacctctctgcgcgggcacaacgctacctctgtcgcaaacttggcctcttggcgaatgaaggaactcctaattttgataatgctttccaggactttcaggcttggttccagaaaccattatctaaggaggtgaagctatagaagaaatacaggatgagatggacaatctgcaagcagaagcaaggagcaatgctgcagcacgtctggtggctgtctgattccttgccagcctgtccgggtgtattttggttttagatgatgtactgcaactcagttttagtcccttttgcaatcggctgcgctgagctgctggttgtgggttttattttggtcgagatgttgtactgcatcttaggttcagcttcaattgcgaatagctccggatatgttgcgctgctgctagcttccagccttgttgcagaatactattccaaggcaatgatggcccttattaatttaacaactgttaattgtgtg

SEQ ID NO: 221261 - DNA, 3587 bp, Zea Mays
cgcggttgcagtagtgggttaggggaggtgaatggacagcatttgcacagccagtttcagaaggcgcagcgctgttccggaaggcttgtattggttgccatgacatgggaggaaacattctacagccaggagccactcttttcctgaaggacctcgagagaaacggagttgccacggaggaggaactgtataacatcacatactatgggaaaggaagaatgcccggttttggagagaaatgcaccccaagaggacagtgcaccttcggcccccggctatcggaagacgacatcaagatcctagcttcgtttgtcaagtcgcaagcccagaacgggtggccgaagattgagggggatggagattgatcaaactgaaaaaacgatgagaagacggtgcttgttagtcagatgaaaatggtgacgggaagatagtgtttgtatagtttaggaatctggtctttctgaacttgtaaccttttagtctctgtttctgaactgaacttgtaaccttctggtccgtgtttcagttttctgaacttctattccaggcagagtccacaccttttccagccagccgaacaaggctgacactgacagagttcagtgctcaggcagggtccccaacaagtcgcagtcgcagctcagctcctctgatcgagggttggtgagttcggttggtgacgccgcgcgaactgctaccaggcctggcgtggcgtcggcgtggtttaaacacgaagaaacccacgccctccgtcgcgcggctgctgctggtgcggaggggaggtggtggggaaggaaaacggcgtcgcaactcccccgcccgcctcgaaccgacatgttgccgcgcacgcactcccaccaggcgcggcggcgctccggcctgggcccgcagctctgcgccgcagcggccgcgctcctgctgctcctctccctcgccgtcctccactcgcgcctctcctcctcgtcctcctcccgcttccccacatccgcatcccgctcccgcccctccacgcccgcggccgactccaactcctccgctctcctcgccgacgaggaggacgaggacgtggccgccgcgctcgacccgctgctcaccgtcaccaccaccgccgccgagggcgattctctcgccaaccccgacgacgaccgcatcgatgagctcgacgtgttggacgaggacgccgcgggcgccaacgaggctgactccgcctccgcctctacggtgggggccgccacgcccctcgtatgggaccacgtcaccggcgccgctcgcctgccgttccgcctccccgcctccgtcgaatccctgcccgcggggctgccgcggcttgactccccgcgccggatcgccgccgcagccttcggatcggacgacgagctggtggatctggaactgcgggtcgagatctcgtccatcgccggtatcgaggacgcgcttctcctgaagcccgcctctggtaaggccgccgagacgcggctccgcgccgggtgggcacgctggctggaggggaaggccgactacctacggcgcgatcggatgctccgctccaacctggaatccctcaatccgcgcaaccacccgcttctccaggatccggacagccccggcctcacttctctcacccgcggcgaccgcatggtgcagcgaatgctactagccgagctcgacaagcccgcgtccaagagctttgagcggcgtaggcttctatcttacgagaacaagcagagcatgacaacaactgtgaaggagaagccgcagacgggaaggaggtggggatatttcccggggatcgatccacatttgggattctcagagttcatggagaggttcttcgagcatgggaagtgttccatgagagtgttcatggtgtggaacagcccgcagtgggcgtatgacatcaggcaccagaggggactggagagtctactcaagcagcacccagatgcctgtgtagtcatgctatcggagacactggaactagagtccttccaccaattcgtcaaggaaggatataaagttgctgttgcagtgccgaatcttgatgagcttttagaaagcactccaactcacgtatttgcatcagtgtggtatgaatggcggcagacaaaatattaccatttgcactacagtgaactagtacgccttgctgccctttacaaatatggtggaatataccttgactctgatgttattattcttaaacctttaacatcgctccggaattctattggtgccacaaatcatgtctctggaaattcccgttttggtggggctgtgttagcatttgaaaaacagaggtgtcagattggaacagctacatcattgactggctatgcagcatatgctcgtgcacgtgtagagtttctcacttggcttgtgctggttgcagccctttattggaggagtgccttagggaattttattcgacatatgatgataccctcgtgcagtggaatggggctgaacttatgacaagagtgataagcaatatttctagcagagcagatgaaaacagggggcatcttgacattaagttggagccctttgttaaattttaccctataagctctactgatattatacgatatttctcagagcccgataacatggtccaaaaagcacatcatgatgcaatcttttctaggatcgtgaatgactctaccactttccatttttggaatggcatcacatctgctctagttcctgaacccggcagtcttgtttcgaaaatccttaaccgttactgtctccattgccttgatgttttatagttgcaacagtctgaagctcctgctaagagctttattttggtttagaacaggtacacagaagaaatctttcaatgaggtactcagaatggctagtattgctgaatcttgcaaaacattgtgatggggggaaaattaccggcagcactgtgtatatattcttttcactaaggtttgtgccggagctgcgcctgcaaagtccaagcatgttgacttgactagttattgtcgatagcaaaagtcttcctcctggcaatacagaatgcaacaactgaagacacttggaactagagagttttgactagttcggtaccccttctatatttgcacatatactgataattttcacaatttgatattttgaaaataacatgattcgtgtaagacagtagaaattgaaggaccatataccgaattcactgggtttatctagatgtttggtaaacttttatttctcagagcatgattttgtctgaattaacgacttgggaacgagaatgtcagcgttgtaagcatctgcataaaattatagtgcaggtcttggcatcctcgaagctgaattgtttgctatgtaatgtaaattatgcatttttcaaacgttaaactgaaaggccaaagagacgatgatgaggacaatatttttttttcgaaagcgtaggagaactgcacatcattttaattagagaagaaaaaaggtccaaaatggaccaaggtacaaagccctaagcaggcttactcaaaacaaaaacacacaccactccctagaccctgtgaaggttacgcgcaagctctaagccaaagctctgaagatgtttggct

SEQ ID NO: 221262 - DNA, 4356 bp, Zea Mays
acttgaaccactctgtagagcaatcgccaatcggcagcttcgtcatccctcgtcgtcggattgtacgctccagctctccaagatttgccttggcttgccgtgccctgcgggagccaagccaaggacggctagcgctcgccacgcgcgatgtccgggcttcctccggccgcgcgaccgctgctaccgtctccctgcgcctcttcctccgttgttcgggcgaaggcagcgtcggcatgctgctccagcctaaagcagtcgcgcccaggccgaagtgctgccgcccgttccaccgtcgccgcgcgtcaggccgcgccgctcttggctgcggcgctcgtccttgtagcggcaccccctggcctgcctgctgctatctcaccaggtttctccggttcttgcttcctataagacgcacaaacctgttgtttttattattgtgtgtatgtattcgctgcatcgcgtaattacatgtgagaccgcttcttgtactaataatggtttcttggaatctgtagacaccatagcttactgttgcgtgccatttgagtttggttgctggttacttacagtggcagactgttagttggcacttggttgattggttctcacgctgtcagcatgccacgcacgcatggttggtgtgctgtggctagcgcacacgtcgcggttgcagtagtgggttaggggaggtgaatggacaggtgcgatttctacataattaattagctgaagaacacaagtacttgctccgcagtctgtgcgggcaaggaagcacctctaccatcacgtactgaaacttgctcgcctagtctagaaagaaaggaaactgaatcacattacacaggaccttcacactagttggaatccatgctgatcagcgtttttttttgccccatggtgcagcatttgcacagccagtttcagaaggcgcagcgctgttccggaaggcttgtattggttgccatgacatgggaggaaacattctacagccaggagccactcttttcctgaaggacctcgagagaaacggagttgccacggaggaggaactgtataacatcacatactatgggaaaggaagaatgcccggttttggagagaaatgcaccccaagaggacagtgcaccttcggcccccggctatcggaagacgacatcaagatcctagcttcgtttgtcaagtcgcaagcccagaacgggtggccgaagattgagggggatggagattgatcaaactgaaaaaacgatgagaagacggtgcttgttagtcagatgaaaatggtgacgggaagatagtgtttgtatagtttaggaatctggtctttctgaacttgtaaccttttagtctctgtttctgaactgaacttgtaaccttctggtccgtgtttcagttttctgaacttctattccaggcagagtccacaccttttccagccagccgaacaaggctgacactgacagagttcagtgctcaggcagggtccccaacaagtcgcagtcgcagctcagctcctctgatcgagggttggtgagttcggttggtgacgccgcgcgaactgctaccaggcctggcgtggcgtcggcgtggtttaaacacgaagaaacccacgccctccgtcgcgcggctgctgctggtgcggaggggaggtggtggggaaggaaaacggcgtcgcaactcccccgcccgcctcgaaccgacatgttgccgcgcacgcactcccaccaggcgcggcggcgctccggcctgggcccgcagctctgcgccgcagcggccgcgctcctgctgctcctctccctcgccgtcctccactcgcgcctctcctcctcgtcctcctcccgcttccccacatccgcatcccgctcccgcccctccacgcccgcggccgactccaactcctccgctctcctcgccgacgaggaggacgaggacgtggccgccgcgctcgacccgctgctcaccgtcaccaccaccgccgccgagggcgattctctcgccaaccccgacgacgaccgcatcgatgagctcgacgtgttggacgaggacgccgcgggcgccaacgaggctgactccgcctccgcctctacggtgggggccgccacgcccctcgtatgggaccacgtcaccggcgccgctcgcctgccgttccgcctccccgcctccgtcgaatccctgcccgcggggctgccgcggcttgactccccgcgccggatcgccgccgcagccttcggatcggacgacgagctggtggatctggaactgcgggtcgagatctcgtccatcgccggtatcgaggacgcgcttctcctgaagcccgcctctggtaaggccgccgagacgcggctccgcgccgggtgggcacgctggctggaggggaaggccgactacctacggcgcgatcggatgctccgctccaacctggaatccctcaatccgcgcaaccacccgcttctccaggatccggacagccccggcctcacttctctcacccgcggcgaccgcatggtgcagcgaatgctactagccgagctcgacaagcccgcgtccaagagctttgagcggcgtaggcttctatcttacgagaacaagcagagcatgacaacaactgtgaaggagaagccgcagacgggaaggaggtggggatatttcccggggatcgatccacatttgggattctcagagttcatggagaggttcttcgagcatgggaagtgttccatgagagtgttcatggtgtggaacagcccgcagtgggcgtatgacatcaggcaccagaggggactggagagtctactcaagcagcacccagatgcctgtgtagtcatgctatcggagacactggaactagagtccttccaccaattcgtcaaggaaggatataaagttgctgttgcagtgccgaatcttgatgagcttttagaaagcactccaactcacgtatttgcatcagtgtggtatgaatggcggcagacaaaatattaccatttgcactacagtgaactagtacgccttgctgccctttacaaatatggtggaatataccttgactctgatgttattattcttaaacctttaacatcgctccggaattctattggtgccacaaatcatgtctctggaaattcccgttttggtggggctgtgttagcatttgaaaaacagagccctttattggaggagtgccttagggaattttattcgacatatgatgataccctcgtgcagtggaatggggctgaacttatgacaagagtgataagcaatatttctagcagagcagatgaaaacagggggcatcttgacattaagttggagccctttgttaaattttaccctataagctctactgatattatacgatatttctcagagcccgataacatggtccaaaaagcacatcatgatgcaatcttttctaggatcgtgaatgactctaccactttccatttttggaatggcatcacatctgctctagttcctgaacccggcagtcttgtttcgaaaatccttaaccgttactgtctccattgccttgatgttttatagttgcaacagtctgaagctcctgctaagagctttattttggtttagaacaggtacacagaagaaatctttcaatgaggtactcagaatggctagtattgctgaatcttgcaaaacattgtgatggggggaaaattaccggcagcactgtgtatatattcttttcactaaggtttgtgccggagctgcgcctgcaaagtccaagcatgttgacttgactagttattgtcgatagcaaaagtcttcctcctggcaatacagaatgcaacaactgaagacacttggaactagagagttttgactagttcggtaccccttctatatttgcacatatactgataattttcacaatttgatattttgaaaataacatgattcgtgtaagacagtagaaattgaaggaccatataccgaattcactgggtttatctagatgtttggtaaacttttatttctcagagcatgattttgtctgaattaacgacttgggaacgagaatgtcagcgttgtaagcatctgcataaaattatagtgcaggtcttggcatcctcgaagctgaattgtttgctatgtaatgtaaattatgcatttttcaaacgttaaactgaaaggccaaagagacgatgatgaggacaatatttttttttcgaaagcgtaggagaactgcacatcattttaattagagaagaaaaaaggtccaaaatggaccaaggtacaaagccctaagcaggcttactcaaaacaaaaacacacaccactccctagaccctgtgaaggttacgcgcaagctctaagccaaagctctgaagatgtttggct

SEQ ID NO: 221263 - DNA, 3851 bp, Zea Mays
caaccacgtggcgtccacttgaaccactctgtagagcaatcgccaatcggcagcttcgtcatccctcgtcgtcggattgtacgctccagctctccaagatttgccttggcttgccgtgccctgcgggagccaagccaaggacggctagcgctcgccacgcgcgatgtccgggcttcctccggccgcgcgaccgctgctaccgtctccctgcgcctcttcctccgttgttcgggcgaaggcagcgtcggcatgctgctccagcctaaagcagtcgcgcccaggccgaagtgctgccgcccgttccaccgtcgccgcgcgtcaggccgcgccgctcttggctgcggcgctcgtccttgtagcggcaccccctggcctgcctgctgctatctcaccagcatttgcacagccagtttcagaaggcgcagcgctgttccggaaggcttgtattggttgccatgacatgggaggaaacattctacagccaggagccactcttttcctgaaggacctcgagagaaacggagttgccacggaggaggaactgtataacatcacatactatgggaaaggaagaatgcccggttttggagagaaatgcaccccaagaggacagtgcaccttcggcccccggctatcggaagacgacatcaagatcctagcttcgtttgtcaagtcgcaagcccagaacgggtggccgaagattgagggggatggagattgatcaaactgaaaaaacgatgagaagacggtgcttgttagtcagatgaaaatggtgacgggaagatagtgtttgtatagtttaggaatctggtctttctgaacttgtaaccttttagtctctgtttctgaactgaacttgtaaccttctggtccgtgtttcagttttctgaacttctattccaggcagagtccacaccttttccagccagccgaacaaggctgacactgacagagttcagtgctcaggcagggtccccaacaagtcgcagtcgcagctcagctcctctgatcgagggttggtgagttcggttggtgacgccgcgcgaactgctaccaggcctggcgtggcgtcggcgtggtttaaacacgaagaaacccacgccctccgtcgcgcggctgctgctggtgcggaggggaggtggtggggaaggaaaacggcgtcgcaactcccccgcccgcctcgaaccgacatgttgccgcgcacgcactcccaccaggcgcggcggcgctccggcctgggcccgcagctctgcgccgcagcggccgcgctcctgctgctcctctccctcgccgtcctccactcgcgcctctcctcctcgtcctcctcccgcttccccacatccgcatcccgctcccgcccctccacgcccgcggccgactccaactcctccgctctcctcgccgacgaggaggacgaggacgtggccgccgcgctcgacccgctgctcaccgtcaccaccaccgccgccgagggcgattctctcgccaaccccgacgacgaccgcatcgatgagctcgacgtgttggacgaggacgccgcgggcgccaacgaggctgactccgcctccgcctctacggtgggggccgccacgcccctcgtatgggaccacgtcaccggcgccgctcgcctgccgttccgcctccccgcctccgtcgaatccctgcccgcggggctgccgcggcttgactccccgcgccggatcgccgccgcagccttcggatcggacgacgagctggtggatctggaactgcgggtcgagatctcgtccatcgccggtatcgaggacgcgcttctcctgaagcccgcctctggtaaggccgccgagacgcggctccgcgccgggtgggcacgctggctggaggggaaggccgactacctacggcgcgatcggatgctccgctccaacctggaatccctcaatccgcgcaaccacccgcttctccaggatccggacagccccggcctcacttctctcacccgcggcgaccgcatggtgcagcgaatgctactagccgagctcgacaagcccgcgtccaagagctttgagcggcgtaggcttctatcttacgagaacaagcagagcatgacaacaactgtgaaggagaagccgcagacgggaaggaggtggggatatttcccggggatcgatccacatttgggattctcagagttcatggagaggttcttcgagcatgggaagtgttccatgagagtgttcatggtgtggaacagcccgcagtgggcgtatgacatcaggcaccagaggggactggagagtctactcaagcagcacccagatgcctgtgtagtcatgctatcggagacactggaactagagtccttccaccaattcgtcaaggaaggatataaagttgctgttgcagtgccgaatcttgatgagcttttagaaagcactccaactcacgtatttgcatcagtgtggtatgaatggcggcagacaaaatattaccatttgcactacagtgaactagtacgccttgctgccctttacaaatatggtggaatataccttgactctgatgttattattcttaaacctttaacatcgctccggaattctattggtgccacaaatcatgtctctggaaattcccgttttggtggggctgtgttagcatttgaaaaacagagccctttattggaggagtgccttagggaattttattcgacatatgatgataccctcgtgcagtggaatggggctgaacttatgacaagagtgataagcaatatttctagcagagcagatgaaaacagggggcatcttgacattaagttggagccctttgttaaattttaccctataagctctactgatattatacgatatttctcagagcccgataacatggtccaaaaagcacatcatgatgcaatcttttctaggatcgtgaatgactctaccactttccatttttggaatggcatcacatctgctctagttcctgaacccggcagtcttgtttcgaaaatccttaaccgttactgtctccattgccttgatgttttatagttgcaacagtctgaagctcctgctaagagctttattttggtttagaacaggtacacagaagaaatctttcaatgaggtactcagaatggctagtattgctgaatcttgcaaaacattgtgatggggggaaaattaccggcagcactgtgtatatattcttttcactaaggtttgtgccggagctgcgcctgcaaagtccaagcatgttgacttgactagttattgtcgatagcaaaagtcttcctcctggcaatacagaatgcaacaactgaagacacttggaactagagagttttgactagttcggtaccccttctatatttgcacatatactgataattttcacaatttgatattttgaaaataacatgattcgtgtaagacagtagaaattgaaggaccatataccgaattcactgggtttatctagatgtttggtaaacttttatttctcagagcatgattttgtctgaattaacgacttgggaacgagaatgtcagcgttgtaagcatctgcataaaattatagtgcaggtcttggcatcctcgaagctgaattgtttgctatgtaatgtaaattatgcatttttcaaacgttaaactgaaaggccaaagagacgatgatgaggacaatatttttttttcgaaagcgtaggagaactgcacatcattttaattagagaagaaaaaaggtccaaaatggaccaaggtacaaagccctaagcaggcttactcaaaacaaaaacacacaccactccctagaccctgtgaaggttacgcgcaagctctaagccaaagctctgaagatgtttggct

SEQ ID NO: 221264 - DNA, 1831 bp, Zea Mays
cctcgccattgctttgcgctctccggccccccgctcctccctgttctgcactcgccgtcagatttcgcaagaaccctcgttccctgcggcctcttgttggtttggtcggccgatacgtttgatctgtagagcaagacgacgagcctggagagaggaagaagtgcaccggcgattgtagaaccagcaccggcggaggagttgaagacgccgattcgagcccggcgaagtgctcgggacgtggcctcgtcgagcccggcgaaggccgcgtcggcattgaacatgatgagatacccgaggcctagctcagatggcctcccgctgcccaatggcatcgggagcggcggcggcggcgcgagcaagaagcctgcaacgccgccgcccagatcgagcaaggatgacgtggcgccggccgtcgccaccgacagctcccgactcgcggcgttcctggcctcgacgtcgctcgagtccaaggcgcgcgcccgcgcgccgccggcgcagcccgcgcctacctcggcggccaccgctgccgtcgccgcgaccaagagccctgttcgcgaccacgaccacggccatggccacagccacggcgcctcctccgaccactccgaccccgcctccccgagctccaccggaaccggcgaattgctgctccagtggggacagaacaagcgcatgcgctgccgccgagactccgcgtccccgtcgccgcagcaccggcaggccggcggcaagatccagcggcgctcgtcgtccccggcggtggacaagctgatgccgcccccgagcgcggcgccctacacccgcgggtccaacctccgctccgtctcgtctctccctccgcgctccggctccggctccggctccggatcctctgccggcgccctcccccacccgctcagatcagcggaggaccgtgcggcggggaagttctcggcggcgagggccgagaagcagcgtgcggtgtccccgggctccgtgatgggcatgggcgtcccggtcccggacccgaggcggcagcagcagcagcagcatgccggcgcggcggcagcggcgacgtcgaagccggcgtcgaaggtggagatgccgcggatctacaccacgctgtctcggaaggagaaggaggaggacttcatggccatgaagggcaccaagctgccgcagcgccccaagcggcggcccaagatcgtcgagaagaccgtcagtgcgatctgccccgggatgtggctgacggatgtgaccaggggccggtacgaggtgcgcgagaagaagtgccccaagaagcaacagaagaatcgaggcctcaaggggatggagggcatggacagcgactccgactgaccaccgacgccagcctgagttgcctgcccgaggcgcggtggcggcggaagaggaagaagggtcggcgacagtgacgggagacgaggagcgcgcgctcttgtacatggtcgcactgggttgaaggaagccataaaaaacgaaggtggattcaggggggggggggggggggggggggaagaacttccgaatgaatcgtagccggcgtcttccttcgttccttccttttttttgttcgacattgggtggtttgtgcatatcgtcggacaaccagtagactgtctccgcaagaggaaacaaggcatttagaccaccctctctctcgctcgctctatgtggttaattagagcatgtttggaaatactaggactagttgttaatcatggctaaaagctagctaaggatatctctcgcatgcttagattcttagctaaaaattagcttctagacaaaaaaaaaatactctttcttctaccttttctttcacccagagaat

SEQ ID NO: 221265 - DNA, 1523 bp, Zea Mays
gttatgatggactttgtcttctctgagtcagaaggtggaatatatgacaataggaatgggatggactatcatattcctgtgtctgattctgttgcaagggaacctccaatgcatattgtacacattgcagtggaaatggctcctatcgcgaaggtcggaggccttggtgatgttgttacaagcctttcacgagctgttcaagatttaggccataaagttgaggttattctgccgaaatatgattgtttaaaccttaacagtgtgaaggatttacgctaccaacaaagttttacttggggtggcacagagataaaagtatggtttggaaaggttgaagatctccctgtttatttcttggaaccacaaaatgggatgttttgggttggatgtgtctacgggaagaatgatgagagtagatttggcttcttctgtcattctgctctggagtttttgctccaaaaaggatcttctcctgatatcatacattgtcatgattggtcaagtgctcccgttgcttggctgtacaaggaacattatgctcttaatgggatcggaaatggtcggattgtatttaccatccacaatcttgagtttggagcgcatcacattggcaaggcaatggcacattgtgacaaagctacaactgtatccgatacatactcgaaggaagtggccggacatggagctattgcacctcactactataaattccatggaattcgaaatggaattgatcctgatatttgggatccatatactgacaaatttattccggtccattatacatcagagaatgttgttgagggcaagagtgctgcaaaaaaggcattgcagcagatgcttggattacagcaaactgatacccctgttgttggaatcatcactcgtctaacagttcagaagggaatccaccttatcaaacatgcaatgcatcgagctcttgaacgcaatggacaggtggttttactgggttctgcaccagatcctcgcatacaaagtgactttacaaatttggccagtaagctgcatggtgaataccatggccgagtgaagctatgtctaacctatgacgagccactgtcacatttgatatatgctggcgcagacttcattctcgttccttccatcttcgaaccttgtggtctaacacagcttattgctatgcgctatggatccatcccagttgttcggaaaactggaggcctgtacgacaccgtttttgatgtcgacaatgataaggatcgggctcaagcacaaggtctcgagccaaatggattcagtttcgaaggagctgatagcagtggtgtggattatgctctcgacagagccataaccacattttatgatgcacgcgactggttcaattccctttgcaagagggtaatggagcaagattggtcatggaacagacctgccctagactacatggagttgtaccattctgctcgcaaaagctgatagcttttaccactagggaaatcaggctcgttttgcccagggttggcatgctatgtggtattttg

SEQ ID NO: 221266 - DNA, 2391 bp, Zea Mays
aaagacaacctccttccacgtgagcgctttcttccttcagccttctcgttatcctgaacgcggcaatctccgaaggtcccatccaaaacctcgccgccggattcgcacctcactctcgcccgcgcactacgaattgactgacgcctacgccctaccgctgcaagcagcaccatagcgggagccgctaccatggcgtcctgctacaacccgtggcgcctattcccaggcatgtcgacggcggtccctgccgggcccgtcacggcgccggctcattctcgcacctgcaagtcctcgaaagtgttcagtgctttgcctcaccggaggggtctgctgttcctgggcacgcggcgtgccaggatcaagtgcgtcaaggacgactctctccatttcgacccgtcgaagatagaaccgccaccgtactccagctacttcgactccacatccggtcagctcgagccggcgtcgggcgctcgggcaagcatacccgggaaggagtactggccagagggcacggcggcccgcgtccgtgccgcgcgagcgcctgctccggttggggagtcagctgggatgccatcatttggcacgaagcccgggagcaggaggagagggtataaggagcaggtgacgtcggcgtcaggaacggagggtgcacagactgatgacagaaaggatggtgatgaacctgatgtggctattataggctctggggacgatgcattggaggagataaaggattcggtggatgagtatgtcatttatgagacaccagaggaagaggagctgagtgagtatgacatggacaaaatgatggggcggccacacccgttcattgatccagcaaaggcaatgtcactaggggagccgaaaaccagtgaagagctctggtggcactggaggaggaagtctcaggaggaggaaatgtggtcaagatggcagaggaggcgtccagatgttgacacggtttttgcaaaggcaatggcggagactgggcaaattaaaatttttggggaccatccttcacggacagaagctgctcttgcaaagacaagaagacatttgtacaaagaggaaaggttagaagcagagcaaaggagactagaagaaatagggccaatagcgtactactcagaatgggttgaagcttataaaaacaaggatacatcacgtgaggccatacagaagcactttgaggaaactggcgaagatgagaatgttcaacttataaaaatgtttcaacaccaaactgctggggaatatcgtatcatgatgggcaccgatgtgcgtattcagcgagatcctttggccatgagaatgcgggaagaccagatcaaacagatttggggcggtgatcctgtctatccaacaattaattatgttcaggatcctgatgaagtgattgactacagaggtcctgaatttcatgagcctacccctgaagttgtaccttacctgatggagcatgggataatgatcacaaaggaagagctatatgcacgtctgaatgaagagagagaggacgtcaatcaagacataacgtatattcctgaagctaaagatcctatggctaccgccattgatataggagagcattcttacaatgaagacagtgatgatgaggatgaggatgtcgataaagctgctgcacagcctcaatcactagaggatgaggaagacgatagggatgatgttgcagaagtagaagagaaagtgaaccagaattggagtgctctaaagtctactggacaggctgaaaagcccaaggaaaaatcaaagaaagatgaaatgacactaaaagaagctattgacgattctgagaacctaactgactttcttatggactttgaggaaaccgagtaatactctggacattttgctattctgtcccatcacacatgcccttaggggctaggggcgatgaagaaaactggatgtccacaaaactctacttgctcaatacgatggaaggtagctccagctgcctgttttgattcacaagttggcaatgctatcagaaaaaaggaatccagatagaatgttgtggcgcatggctcaagaattgacaacaatcttcatgcttttgaagaaacaagagaagccacaaaacaagagataaggagtagcttaaccatttgcagttggaactatgttagccttcttaggctgtccgcagaagatcgtgtaaaataggaaattcacactgtagattacattatttgcagagttaagtttgaaaaagaagataagacatgagatgagatatgatagctgctagagacagtgttacaccataaataatatatttcgactaggcatgagctgtgcgtttttagataagtttgccagttagggtgtgtgtggtttattggttacaatgatgcgacgagataagac

SEQ ID NO: 221267 - DNA, 2563 bp, Zea Mays
aaagacaacctccttccacgtgagcgctttcttccttcagccttctcgttatcctgaacgcggcaatctccgaaggtcccatccaaaacctcgccgccggattcgcacctcactctcgcccgcgcactacgaattgactgacgcctacgccctaccgctgcaagcagcaccatagcgggagccgctaccatggcgtcctgctacaacccgtggcgcctattcccaggcatgtcgacggcggtccctgccgggcccgtcacggcgccggctcattctcgcacctgcaagtcctcgaaagtgttcagtgctttgcctcaccggaggggtctgctgttcctgggcacgcggcgtgccaggatcaagtgcgtcaaggacgactctctccatttcgacccgtcgaagatagaaccgccaccgtactccagctacttcgactccacatccggtcagctcgagccggcgtcgggcgctcgggcaagcatacccgggaaggagtactggccagagggcacggcggcccgcgtccgtgccgcgcgagcgcctgctccggttggggagtcagctgggatgccatcatttggcacgaagcccgggagcaggaggagagggtataaggagcaggtgacgtcggcgtcaggaacggagggtgcacagactgatgacagaaaggatggtgatgaacctgatgtggctattataggctctggggacgatgcattggaggagataaaggattcggtggatgagtatgtcatttatgagacaccagaggaagaggagctgagtgagtatgacatggacaaaatgatggggcggccacacccgttcattgatccagcaaaggcaatgtcactaggggagccgaaaaccagtgaagagctctggtggcactggaggaggaagtctcaggaggaggaaatgtggtcaagatggcagaggaggcgtccagatgttgacacggtttttgcaaaggcaatggcggagactgggcaaattaaaatttttggggaccatccttcacggacagaagctgctcttgcaaagacaagaagacatttgtacaaagaggaaaggttagaagcagagcaaaggagactagaagaaatagggccaatagcgtactactcagaatgggttgaagcttataaaaacaaggatacatcacgtgaggccatacagaagcactttgaggaaactggcgaagatgagaatgttcaacttataaaaatgtttcaacaccaaactgctggggaatatcgtatcatgatgggcaccgatgtgcgtattcagcgagatcctttggccatgagaatgcgggaagaccagatcaaacagatttggggcggtgatcctgtctatccaacaattaattatgttcaggatcctgatgaagtgattgactacagaggtcctgaatttcatgagcctacccctgaagttgtaccttacctgatggagcatgggataatgatcacaaaggaagagctatatgcacgtctgaatgaagagagagaggacgtcaatcaagacataacgtatattcctgaagctaaagatcctatggctaccgccattgatataggagagcattcttacaatgaagacagtgatgatgaggatgaggatgtcgataaagctgctgcacagcctcaatcactagaggatgaggaagacgatagggatgatgttgcagaagtagaagagaaagtgaaccagaattggagtgctctaaagtctactggacaggctgaaaagcccaaggaaaaatcaaagaaagatgaaatgacactaaaagaagctattgacgattctgagaacctaactgactttcttatggactttgaggaaaccgagtaatactctggacattttgctattctgtcccatcacacatggactggagcaatgaaaggaaacactggtcgagtagccccttaatcatttctttgattcttcccaaggcttgaagctgcagctctaattagcctgagggattcaacaaagtcatccagcagcttatgagaatctggaaattattcttgagaacttacttctggagactcatagcccttaggggctaggggcgatgaagaaaactggatgtccacaaaactctacttgctcaatacgatggaaggtagctccagctgcctgttttgattcacaagttggcaatgctatcagaaaaaaggaatccagatagaatgttgtggcgcatggctcaagaattgacaacaatcttcatgcttttgaagaaacaagagaagccacaaaacaagagataaggagtagcttaaccatttgcagttggaactatgttagccttcttaggctgtccgcagaagatcgtgtaaaataggaaattcacactgtagattacattatttgcagagttaagtttgaaaaagaagataagacatgagatgagatatgatagctgctagagacagtgttacaccataaataatatatttcgactaggcatgagctgtgcgtttttagataagtttgccagttagggtgtgtgtggtttattggttacaatgatgcgacgagataagac

SEQ ID NO: 221268 - DNA, 2203 bp, Zea Mays
gcaagactgacggcgcggccgcgcgggaggttgagaagccacggtgagaccactgccgttaataccgaacctctcgcgccgttacccgctggtcctaaaaccctagcgaaggcgagccttccacttccctcaacctgccgccgccaccgccaccgccgccgccatgtgcccagcagcggcgaccacgagctccgccaagccgtcgaagaagcggaaacagcccgtcatagcgccgccggagtcggactctgaggaggaatctgtctacgacactgcctccgacgatgacgaggaggaagaggagacgcaggagttagagagtgaggatgtagacgaggaggtggaggaggggagcgagggcggcgaggaaaatgaaattggtgacgatagcgaggtggaagaagaggaggtgaaggagaaaaaagaaaaggaggagacggtgaaggagaaaaaggaaaagaaggacatgaagcaagagggaaagaaggcgaagaagcaagaggaaaagaaggcgaagaaggacaagaaggaagaggaaaaaaaggtgatggaggacaagaaagaagaggaaaagaaggcgaagaagaagagcgaggggagtggaatcctgtctaacaagctcttctcggagctccccctctctgagctcactgccaaggccatcagagagatgaactacacccacctcacccagattcaagctagatcaataccacatctgttggaggggaatgatgtgatgggcgcagccaagactggctctgggaagactcttgcattccttataccagcgattgagatgctatatcacacacacttctcaccgaggaatgggactggagctattgtggtttgcccgacacgggaacttgctatccagacacacaatgttgccaaggagttaatgaaatatcactcacaaactctcagatatgtcattggtggtaataatcgaagaagtgaggctgatcagcttgcaaaggggatcaatttattagttgctaccccaggcaggcttttggaccatctacaaaataccaagagtttcatatacagaaggctaaaatgccttgtcattgatgaagccgatcgcatacttgagcaaaactttgaggaagacatgaaacaaatatttaaacgccttccccagaataggcagactgttcttttttctgctacacaaactccagaggttgaaaaatttgctaaactgtcatttgagaaaaatgaagaaagtaaaaaaaaacctgtttatgttggagttgatgatgataagtcaaaggctactgttgaaggcctgcagcagggttattgtgtcatttctagcgataaaaggttcttggttctgtatgctttcctaagaaagaagcggaataagaagataatggtgttcttctcatcatcttttgcaaggcagaaaagggcatcttattgtgcactaatgtggctgcccgtggacttgatattcctgacgtggattatatcttgcaatatgaccctccagatgaaccaaaggattacattcacagagttggtcgtaccgcacgtggtgagaaaggcaaaggaagtgcattgctgttcttactaccagaagaactgaagtttctaatttacctgaaggcggccaaggttaccctgacggaatatgagttcaatcagaagaatgtgccaaatttgcaatcgcagcttgagaatattgttggtgagaattactttctgaaccagtctgccaaagaagcctacagatcctacgttttggcatatgactctcactctatgaaagacatttttaatgtccatcaacttgatctgcagaaagtagctgcgtcattcggtttcaagaatcccccgaaagtgaacctggacctggatagcagtgcggcgaagcatcggaagaagatgaggagagtagacggtgggaagaggcatggcatcagcgcttcgaacccgtacgggaggaaggacaaaggcggtgccggcgataaacgacagttggcgagattctagaaaggaaggaagagcaggagcgtttcactattgttgtgttcgtaccagggctttgattgatgttacctggcttgggaaaaatcttgacaggccactaagattggctataaattttgggttgtcttgatatatttggtgtgtaacgcaatcagcctgctcgatgcgaaaattggattattgctttatagtacttgtg

SEQ ID NO: 221269 - DNA, 5349 bp, Zea Mays
cctgtctctcttcctcctcgctccctccgccttgtccctctgtaggtcacttggtcaggttctcatccccttcttgctccctctgcatcgtccctctgtaggtccacgcgctcctcccgtccacgcctgcgagtatctcttctcagagtctccagatcggggcctccggcagccgctcgcgccaacgctgtcgccgcttgtccgctccttcaccagacaccagcatgcgacacacttctagaatcaaacaggcggtgggaaagagaaaaaaagggaggacgatctcggctctctcacgccgttaaggtcaacaaaggtggggagggccgaccctccggcgttgtcgtcggcgcttgtgcctggtggcggcaggcacagccccgtggacggcaagattaggagtgggggagtcttcaaccatccatcgcaccgcggtcaaagggtctgcgccgcctgcatccagcaggccatggcagtcagtcttcaaccagctactgcctactgtgccaccgtcaaaggggcccgcgccgcacacttccagcagaacaggcgagcaagcccgtcagtcttcaagggcctaaatcggattgaagtaatacatttggtttcttttttttggcctatcaaatatatatgctactgcatgtttaccatggccaactcgagagggaggcatgcaacttgctaccggaggggagctacgcaccactgcaccgtgcgcgcgtcctggggaggccctggcgcgctgaatcgctgaaggtcataatgtatagatgcagcttcaaactaagtaccaggtttgattcaaagcgaggtgagaatttcttacgttgttctttctgaattatgtttccctaagaagaagttatttaaccaaatagactatgttttatttgacgacagacatacaatttttcctttaaccattcatcacaacagtaatgtaacagttaattgcggcagtttttgcttaagcttttagtaaaagttggccatgttctttagttaaaaaaagaactttggtacattcagatggactcgatctatgtcctagctgttttatatcatttattgatcaggctctagccacaacaaatatccaattcgattagaaagcacgagtaaacatgtgccttgacattgcacggggattatcatacctccatcattgtgcttcttgacatggatcttacctcgaaaatcttagattttggtgtagcaaatcttcttccaccaaacgtaacgcatgctagcataacaattataggaacaatgtaagtgaatgtctgttttatatttttccgatttcttctcttattttttcctttagtgcttagagaagctcgattttgtaccattcttttcaatttaattaggcgatactttttaagaaatatccaaacaattaaggaaaacaatggcatttctaattacctgtatatgatatatatggcctatgaatacctttttgcagccttgcttacttcattctaattaggagactctatttgggtcctcagcattctattcgagaacaagtgacacacaaatcacatgtttacagttttcgtctgctgcttctagacattgttagcaggagatcaaacagtgacacaaggttagcacatgaaaatcagatactccttgaaaaaatagattttactctaggttatagtttacatatatttccatctcgaatatttgtcgcttgttagttcaaaaataaactaatggacgacaaatgaaaaaaaacgaaggaagtaccttctagtacatgcctaccggtacagtccacatttgcttaaataagatttcctcctcgagttataatacagtcacataaaaaatctattatatatatatatataattgtccaaatacagttgcacgatgagtaatcataatcaacataacattgtttactgtttcatacaacatgtacaggtatatgcatataggttcaagaaagaaaaacttcatgtccaaaaggaaggagaatgaattctccgcaaaatcataaaaaacattacaagtttatatcatgtttatgtgcacttcataacctttatgaacaatattttgctaactaaaaaggattgtacatatgactaatacttttgtcaacacattgtttcagaaactcactgcaaactactattcttattattttatggccttcaacaccaacattttattgcttacgtgcatgtacataccagctcctataggcaacaccaacgtaatacgacatcctgactgctcatactattatatttgtaaactaaactatcctgctaatgttatatgaacaaatatatattcagaataaatctgtcacttctatgatgaacttttggaacacactgctgaaatacaatgtaatatatatggtcctctcagtctaccgtaggtttgctgtaactactacaattacaatctcagcacatcaacttctgtaagcactggaaccagtttaaatttgcccttaaatttatggcagcatatggtacataataactgctaacaactactctaagtgtacatataattttaatacataaccccaacgaaactgatcgtaaaaatggttcaggttcaccatgcgcgcatggcgcgcaccatacactagtaaaagtgaaacatgatgcaaagggacaaatggaataacacataagaacttatcttattgctttaacattttcagtatgtttcttattgtattggacaaatttataagcataccttcggctcctgaataatgggatgcacgaagattctttgaaggctaagcactacgaagtcgggacccttccaaagatactttttgtagggtaatgttcatctatttataggggagacgaactgactttgtacatatttacagtaatgcccatccatttttacataagccatttacaaatgacattagggtagtaatgtacttcctcctttctcagctccgcaaattccaaccctcgtcgtccggtagccttccttttggacttgtggcccaagttgccgccttcagccattattttcgttgcttgcgtatagacgaaatgcctttgtacactgcttttagccaaagcttagctttgtccgtcagtgagaatattcctgaaacacacttgtgattttgaaaatggttgcttatgattttcgttgcttgtgattttgctcttcgtttttcgactttatgattttacccttctgttttgaaaaccaaattaccgtttgcctcaccctctcaacgccattagtgaaaatcagatttggtgattaaaaaaataaaaaatgtgaaaacaatggatgaaaggtccaaactgccctccttatattatatatgggtgttacctaacaagagtaaaatcacaattacataatataacaaagggcaaaatcacaatacatgtatagacatttttgtcttttttatatcagatttaacaccattaactacatgaaacgacgcaggggtatgccaaagcctcgtttccaaaaccaagggttaaaattacaaagttaaaaaacaaggttaaattacgattgcaaggctagagaggttatactaaatgcctctatagtttacgtggctgacctctaacataaaaatgatttagttctgctaagagtttaaaaataatttagaaagcctaaaatatataaaaaacggttgatttgaaatagtaaaattgaacgatgatcgcgagcgttgatttagatctagtcatcggctccgacttctccggtcaagtcctccccctacctctaccagctgcccgtcgcacacaaaaccccaggctgcccgccgccgccgcgacccgccacgccgccatgtccgctgccgcggcgctccggccgatcgagccacttcccctcccgactgggctctccctctcgccgcgcctcaagcttctgctcaccttctttcgcgccgacctcaccgtccggcccctggacgagtggcagctcaagtccgccctcctcgcgtttctccgcgacccacctctccccctcccgctcctccccgactcagacctctccgtgagccgcctccctgacctccagaagcgccgtcgcgaggagcccgtagcctctggggtcctccacgtccgcgacctctccttcctccgcccccgcaagggagacggcgaggccgaggagatgaccggggagcaggagaagtacttcgagtggcggagcaccctggttcagaagctcgaaggcatcgagctcaacctcgagggagtgaagttccggatgaccgtcgagatcccatcgtctgacgacttcagaacgatgaagaagtcatgggaggatttctactcctccgagctactcaataccaggaatcctgtgagaaagatagctaaaaggccagacacaattgttgtccgtggcgtgccttccaggtggtttgcagagacaagagtatcatccaaaccttccacgctggtcacccacactgttttctcagcgcttggtaaaataaggaacctaaatatttccaatgatgatgagatagaagcaaaaggacatggagtcaacaaggggctcatatctggacttaattgcaaagttcaggtgcaatttgagagctacaatgacttccaggatgcaatgaaggcattatgtggacgttctttagagaaggatcacggttgaaagtagactatgacgtgacctgggactgtgaaggtttctttcgcatttctcaatatgagccagttcgtaacaatttagaggagagggattcattagcatcggttaatagccagaggaaacatcacacttcgcgaattgaatcagattataggaagagattcagggagtgatgacataagcccatggtatgagcgagatttctttgtcctctggagagggaaaacagctgcattgtaccatcgtattgtttcgttctcagatttcaagttatatttctcatttgttcacaattaaccgaacagaaaaacccattctgatacttactaatttgtatttattattagtatcggttttatccttgatgatacccagaggccagagagcgccacaaaacgaactgtttttttattccaaagaattcttagatgttgagcattggcgcctggacccatgctcatcgatcagtcacagtggcgtctgagttcagacttcagagtaatgaatgatttcagaaatgagcatagggacgggtcagcctacacgtgccgagctttgacgatatatcggttacagccgtgcaggtggaaaattctagagaccaaaactaatagtctttctggtttggataagctattttctgtcagtctgtatggagaggatcagatcttttctgactcaagccag

SEQ ID NO: 221270 - DNA, 5353 bp, Zea Mays
cctgtctctcttcctcctcgctccctccgccttgtccctctgtaggtcacttggtcaggttctcatccccttcttgctccctctgcatcgtccctctgtaggtccacgcgctcctcccgtccacgcctgcgagtatctcttctcagagtctccagatcggggcctccggcagccgctcgcgccaacgctgtcgccgcttgtccgctccttcaccagacaccagcatgcgacacacttctagaatcaaacaggcggtgggaaagagaaaaaaagggaggacgatctcggctctctcacgccgttaaggtcaacaaaggtggggagggccgaccctccggcgttgtcgtcggcgcttgtgcctggtggcggcaggcacagccccgtggacggcaagattaggagtgggggagtcttcaaccatccatcgcaccgcggtcaaagggtctgcgccgcctgcatccagcaggccatggcagtcagtcttcaaccagctactgcctactgtgccaccgtcaaaggggcccgcgccgcacacttccagcagaacaggcgagcaagcccgtcagtcttcaagggcctaaatcggattgaagtaatacatttggtttcttttttttggcctatcaaatatatatgctactgcatgtttaccatggccaactcgagagggaggcatgcaacttgctaccggaggggagctacgcaccactgcaccgtgcgcgcgtcctggggaggccctggcgcgctgaatcgctgaaggtcataatgtatagatgcagcttcaaactaagtaccaggtttgattcaaagcgaggtgagaatttcttacgttgttctttctgaattatgtttccctaagaagaagttatttaaccaaatagactatgttttatttgacgacagacatacaatttttcctttaaccattcatcacaacagtaatgtaacagttaattgcggcagtttttgcttaagcttttagtaaaagttggccatgttctttagttaaaaaaagaactttggtacattcagatggactcgatctatgtcctagctgttttatatcatttattgatcaggctctagccacaacaaatatccaattcgattagaaagcacgagtaaacatgtgccttgacattgcacggggattatcatacctccatcattgtgcttcttgacatggatcttacctcgaaaatcttagattttggtgtagcaaatcttcttccaccaaacgtaacgcatgctagcataacaattataggaacaatgtaagtgaatgtctgttttatatttttccgatttcttctcttattttttcctttagtgcttagagaagctcgattttgtaccattcttttcaatttaattaggcgatactttttaagaaatatccaaacaattaaggaaaacaatggcatttctaattacctgtatatgatatatatggcctatgaatacctttttgcagccttgcttacttcattctaattaggagactctatttgggtcctcagcattctattcgagaacaagtgacacacaaatcacatgtttacagttttcgtctgctgcttctagacattgttagcaggagatcaaacagtgacacaaggttagcacatgaaaatcagatactccttgaaaaaatagattttactctaggttatagtttacatatatttccatctcgaatatttgtcgcttgttagttcaaaaataaactaatggacgacaaatgaaaaaaaacgaaggaagtaccttctagtacatgcctaccggtacagtccacatttgcttaaataagatttcctcctcgagttataatacagtcacataaaaaatctattatatatatatatataattgtccaaatacagttgcacgatgagtaatcataatcaacataacattgtttactgtttcatacaacatgtacaggtatatgcatataggttcaagaaagaaaaacttcatgtccaaaaggaaggagaatgaattctccgcaaaatcataaaaaacattacaagtttatatcatgtttatgtgcacttcataacctttatgaacaatattttgctaactaaaaaggattgtacatatgactaatacttttgtcaacacattgtttcagaaactcactgcaaactactattcttattattttatggccttcaacaccaacattttattgcttacgtgcatgtacataccagctcctataggcaacaccaacgtaatacgacatcctgactgctcatactattatatttgtaaactaaactatcctgctaatgttatatgaacaaatatatattcagaataaatctgtcacttctatgatgaacttttggaacacactgctgaaatacaatgtaatatatatggtcctctcagtctaccgtaggtttgctgtaactactacaattacaatctcagcacatcaacttctgtaagcactggaaccagtttaaatttgcccttaaatttatggcagcatatggtacataataactgctaacaactactctaagtgtacatataattttaatacataaccccaacgaaactgatcgtaaaaatggttcaggttcaccatgcgcgcatggcgcgcaccatacactagtaaaagtgaaacatgatgcaaagggacaaatggaataacacataagaacttatcttattgctttaacattttcagtatgtttcttattgtattggacaaatttataagcataccttcggctcctgaataatgggatgcacgaagattctttgaaggctaagcactacgaagtcgggacccttccaaagatactttttgtagggtaatgttcatctatttataggggagacgaactgactttgtacatatttacagtaatgcccatccatttttacataagccatttacaaatgacattagggtagtaatgtacttcctcctttctcagctccgcaaattccaaccctcgtcgtccggtagccttccttttggacttgtggcccaagttgccgccttcagccattattttcgttgcttgcgtatagacgaaatgcctttgtacactgcttttagccaaagcttagctttgtccgtcagtgagaatattcctgaaacacacttgtgattttgaaaatggttgcttatgattttcgttgcttgtgattttgctcttcgtttttcgactttatgattttacccttctgttttgaaaaccaaattaccgtttgcctcaccctctcaacgccattagtgaaaatcagatttggtgattaaaaaaataaaaaatgtgaaaacaatggatgaaaggtccaaactgccctccttatattatatatgggtgttacctaacaagagtaaaatcacaattacataatataacaaagggcaaaatcacaatacatgtatagacatttttgtcttttttatatcagatttaacaccattaactacatgaaacgacgcaggggtatgccaaagcctcgtttccaaaaccaagggttaaaattacaaagttaaaaaacaaggttaaattacgattgcaaggctagagaggttatactaaatgcctctatagtttacgtggctgacctctaacataaaaatgatttagttctgctaagagtttaaaaataatttagaaagcctaaaatatataaaaaacggttgatttgaaatagtaaaattgaacgatgatcgcgagcgttgatttagatctagtcatcggctccgacttctccggtcaagtcctccccctacctctaccagctgcccgtcgcacacaaaaccccaggctgcccgccgccgccgcgacccgccacgccgccatgtccgctgccgcggcgctccggccgatcgagccacttcccctcccgactgggctctccctctcgccgcgcctcaagcttctgctcaccttctttcgcgccgacctcaccgtccggcccctggacgagtggcagctcaagtccgccctcctcgcgtttctccgcgacccacctctccccctcccgctcctccccgactcagacctctccgtgagccgcctccctgacctccagaagcgccgtcgcgaggagcccgtagcctctggggtcctccacgtccgcgacctctccttcctccgcccccgcaagggagacggcgaggccgaggagatgaccggggagcaggagaagtacttcgagtggcggagcaccctggttcagaagctcgaaggcatcgagctcaacctcgagggagtgaagttccggatgaccgtcgagatcccatcgtctgacgacttcagaacgatgaagaagtcatgggaggatttctactcctccgagctactcaataccaggaatcctgtgagaaagatagctaaaaggccagacacaattgttgtccgtggcgtgccttccaggtggtttgcagagacaagagtatcatccaaaccttccacgctggtcacccacactgttttctcagcgcttggtaaaataaggaacctaaatatttccaatgatgatgagatagaagcaaaaggacatggagtcaacaaggggctcatatctggacttaattgcaaagttcaggtgcaatttgagagctacaatgacttccaggatgcaatgaaggcattatgtggacgttctttagagaaggaaggatcacggttgaaagtagactatgacgtgacctgggactgtgaaggtttctttcgcatttctcaatatgagccagttcgtaacaatttagaggagagggattcattagcatcggttaatagccagaggaaacatcacacttcgcgaattgaatcagattataggaagagattcagggagtgatgacataagcccatggtatgagcgagatttctttgtcctctggagagggaaaacagctgcattgtaccatcgtattgtttcgttctcagatttcaagttatatttctcatttgttcacaattaaccgaacagaaaaacccattctgatacttactaatttgtatttattattagtatcggttttatccttgatgatacccagaggccagagagcgccacaaaacgaactgtttttttattccaaagaattcttagatgttgagcattggcgcctggacccatgctcatcgatcagtcacagtggcgtctgagttcagacttcagagtaatgaatgatttcagaaatgagcatagggacgggtcagcctacacgtgccgagctttgacgatatatcggttacagccgtgcaggtggaaaattctagagaccaaaactaatagtctttctggtttggataagctattttctgtcagtctgtatggagaggatcagatcttttctgactcaagccag

SEQ ID NO: 221271 - DNA, 2273 bp, Zea Mays
cctgtctctcttcctcctcgctccctccgccttgtccctctgtaggtcacttggtcaggttctcatccccttcttgctccctctgcatcgtccctctgtaggtccacgcgctcctcccgtccacgcctgcgagtatctcttctcagagtctccagatcggggcctccggcagccgctcgcgccaacgctgtcgccgcttgtccgctccttcaccagacaccagcatgcgacacacttctagaatcaaacaggcggtgggaaagagaaaaaaagggaggacgatctcggctctctcacgccgttaaggtcaacaaaggtggggagggccgaccctccggcgttgtcgtcggcgcttgtgcctggtggcggcaggcacagccccgtggacggtaaggtcggcgcgtctgcgagggtattcgacggtggcttccaggaggcgtatgctttatctcattatctgctctgcttccaggcaagattaggagtgggggagtcttcaaccatccatcgcaccgcggtcaaagggtctgcgccgcctgcatccagcaggccatggcagtcagtcttcaaccagctactgcctactgtgccaccgtcaaaggggcccgcgccgcacacttccagcagaacaggcggttagactggctccaacaaggccctctaaagggtcctgtaccctaaatttagaggacgaggacgtcctctactccctccagcaacgtcctctaaacggtcctctaaatttagagaacgctgctggatcctctatatgtagagtttctctaaacggttctctatctatttgaatactttaaacaaccgatttaataaaactaaaatatgtacaatacatttgagagtatgacaaatacgtatgtacaaaaattaaaaaattaaaaatgtgtttaatataggtatttacatatagagaacgtgatttagaggacgttgttggagagaaagtagatataggagatggaatcttttagagaagactgtaaaggacggatatagaggatgtatatagaggacgttgctggagacagtcttagtcttcaatgtgcaatcatgcacacctattttcctctaatttattttctttttttgggattctactgaaaaaggaattcttttgcaaacaatctctcaaggcagagcaagcccgtcagtcttcaagggcctaaatcggattgaagtaatacatttggtttcttttttttggcctatcaaatatatatgctactgcatgtttaccatggccaactcgagagggaggcatgcaacttgctaccggaggggagctacgcaccactgcaccgtgcgcgcgtcctggggaggccctggcgcgctgaatcgctgaaggtcataatgtatagatgcagcttcaaactaagtaccaggtttgattcaaagcgaggaacctaaatatttccaatgatgatgagatagaagcaaaaggacatggagtcaacaaggggctcatatctggacttaattgcaaagttcaggtgcaatttgagagctacaatgacttccaggatgcaatgaaggcattatgtggacgttctttagagaaggatcacggttgaaagtagactatgacgtgacctgggactgtgaaggtttctttcgcatttctcaatatgagccagttcgtaacaatttagaggagagggattcattagcatcggttaatagccagaggaaacatcacacttcgcgaattgaatcagattataggaagagattcagggagtgatgacataagcccatggtatgagcgagatttctttgtcctctggagagggaaaacagctgcattgtaccatcgtattgtttcgttctcagatttcaagttatatttctcatttgttcacaattaaccgaacagaaaaacccattctgatacttactaatttgtatttattattagtatcggttttatccttgatgatacccagaggccagagagcgccacaaaacgaactgtttttttattccaaagaattcttagatgttgagcattggcgcctggacccatgctcatcgatcagtcacagtggcgtctgagttcagacttcagagtaatgaatgatttcagaaatgagcatagggacgggtcagcctacacgtgccgagctttgacgatatatcggttacagccgtgcaggtggaaaattctagagaccaaaactaatagtctttctggtttggataagctattttctgtcagtctgtatggagaggatcagatcttttctgactcaagccag

SEQ ID NO: 221272 - DNA, 6346 bp, Zea Mays
cctgtctctcttcctcctcgctccctccgccttgtccctctgtaggtcacttggtcaggttctcatccccttcttgctccctctgcatcgtccctctgtaggtccacgcgctcctcccgtccacgcctgcgagtatctcttctcagagtctccagatcggggcctccggcagccgctcgcgccaacgctgtcgccgcttgtccgctccttcaccagacaccagcatgcgacacacttctagaatcaaacaggcggtgggaaagagaaaaaaagggaggacgatctcggctctctcacgccgttaaggtcaacaaaggtggggagggccgaccctccggcgttgtcgtcggcgcttgtgcctggtggcggcaggcacagccccgtggacggcaagattaggagtgggggagtcttcaaccatccatcgcaccgcggtcaaagggtctgcgccgcctgcatccagcaggccatggcagtcagtcttcaaccagctactgcctactgtgccaccgtcaaaggggcccgcgccgcacacttccagcagaacaggcgagcaagcccgtcagtcttcaagggcctaaatcggattgaagtaatacatttggtttcttttttttggcctatcaaatatatatgctactgcatgtttaccatggccaactcgagagggaggcatgcaacttgctaccggaggggagctacgcaccactgcaccgtgcgcgcgtcctggggaggccctggcgcgctgaatcgctgaaggtcataatgtatagatgcagcttcaaactaagtaccaggtttgattcaaagcgaggtgagaatttcttacgttgttctttctgaattatgtttccctaagaagaagttatttaaccaaatagactatgttttatttgacgacagacatacaatttttcctttaaccattcatcacaacagtaatgtaacagttaattgcggcagtttttgcttaagcttttagtaaaagttggccatgttctttagttaaaaaaagaactttggtacattcagatggactcgatctatgtcctagctgttttatatcatttattgatcaggctctagccacaacaaatatccaattcgattagaaagcacgagtaaacatgtgccttgacattgcacggggattatcatacctccatcattgtgcttcttgacatggatcttacctcgaaaatcttagattttggtgtagcaaatcttcttccaccaaacgtaacgcatgctagcataacaattataggaacaatgtaagtgaatgtctgttttatatttttccgatttcttctcttattttttcctttagtgcttagagaagctcgattttgtaccattcttttcaatttaattaggcgatactttttaagaaatatccaaacaattaaggaaaacaatggcatttctaattacctgtatatgatatatatggcctatgaatacctttttgcagccttgcttacttcattctaattaggagactctatttgggtcctcagcattctattcgagaacaagtgacacacaaatcacatgtttacagttttcgtctgctgcttctagacattgttagcaggagatcaaacagtgacacaaggttagcacatgaaaatcagatactccttgaaaaaatagattttactctaggttatagtttacatatatttccatctcgaatatttgtcgcttgttagttcaaaaataaactaatggacgacaaatgaaaaaaaacgaaggaagtaccttctagtacatgcctaccggtacagtccacatttgcttaaataagatttcctcctcgagttataatacagtcacataaaaaatctattatatatatatatataattgtccaaatacagttgcacgatgagtaatcataatcaacataacattgtttactgtttcatacaacatgtacaggtatatgcatataggttcaagaaagaaaaacttcatgtccaaaaggaaggagaatgaattctccgcaaaatcataaaaaacattacaagtttatatcatgtttatgtgcacttcataacctttatgaacaatattttgctaactaaaaaggattgtacatatgactaatacttttgtcaacacattgtttcagaaactcactgcaaactactattcttattattttatggccttcaacaccaacattttattgcttacgtgcatgtacataccagctcctataggcaacaccaacgtaatacgacatcctgactgctcatactattatatttgtaaactaaactatcctgctaatgttatatgaacaaatatatattcagaataaatctgtcacttctatgatgaacttttggaacacactgctgaaatacaatgtaatatatatggtcctctcagtctaccgtaggtttgctgtaactactacaattacaatctcagcacatcaacttctgtaagcactggaaccagtttaaatttgcccttaaatttatggcagcatatggtacataataactgctaacaactactctaagtgtacatataattttaatacataaccccaacgaaactgatcgtaaaaatggttcaggttcaccatgcgcgcatggcgcgcaccatacactagtaaaagtgaaacatgatgcaaagggacaaatggaataacacataagaacttatcttattgctttaacattttcagtatgtttcttattgtattggacaaatttataagcataccttcggctcctgaataatgggatgcacgaagattctttgaaggctaagcactacgaagtcgggacccttccaaagatactttttgtagggtaatgttcatctatttataggggagacgaactgactttgtacatatttacagtaatgcccatccatttttacataagccatttacaaatgacattagggtagtaatgtacttcctcctttctcagctccgcaaattccaaccctcgtcgtccggtagccttccttttggacttgtggcccaagttgccgccttcagccattattttcgttgcttgcgtatagacgaaatgcctttgtacactgcttttagccaaagcttagctttgtccgtcagtgagaatattcctgaaacacacttgtgattttgaaaatggttgcttatgattttcgttgcttgtgattttgctcttcgtttttcgactttatgattttacccttctgttttgaaaaccaaattaccgtttgcctcaccctctcaacgccattagtgaaaatcagatttggtgattaaaaaaataaaaaatgtgaaaacaatggatgaaaggtccaaactgccctccttatattatatatgggtgttacctaacaagagtaaaatcacaattacataatataacaaagggcaaaatcacaatacatgtatagacatttttgtcttttttatatcagatttaacaccattaactacatgaaacgacgcaggggtatgccaaagcctcgtttccaaaaccaagggttaaaattacaaagttaaaaaacaaggttaaattacgattgcaaggctagagaggttatactaaatgcctctatagtttacgtggctgacctctaacataaaaatgatttagttctgctaagagtttaaaaataatttagaaagcctaaaatatataaaaaacggttgatttgaaatagtaaaattgaacgatgatcgcgagcgttgatttagatctagtcatcggctccgacttctccggtcaagtcctccccctacctctaccagctgcccgtcgcacacaaaaccccaggctgcccgccgccgccgcgacccgccacgccgccatgtccgctgccgcggcgctccggccgatcgagccacttcccctcccgactgggctctccctctcgccgcgcctcaagcttctgctcaccttctttcgcgccgacctcaccgtccggcccctggacgagtggcagctcaagtccgccctcctcgcgtttctccgcgacccacctctccccctcccgctcctccccgactcagacctctccgtgagccgcctccctgacctccagaagcgccgtcgcgaggagcccgtagcctctggggtcctccacgtccgcgacctctccttcctccgcccccgcaagggagacggcgaggccgaggagatgaccggggagcaggagaagtacttcgagtggcggagcaccctggttcagaagctcgaaggcatcgagctcaacctcgagggagtgaagttccggatgaccgtcgagatcccatcgtctgacgacttcagaacgatgaagaagtcatgggaggatttctactcctccgagctactcaataccaggaatcctgtgagaaagatagctaaaaggccagacacaattgttgtccgtggcgtgccttccaggtggtttgcagagacaagagtatcatccaaaccttccacgctggtcacccacactgttttctcagcgcttggtaaaataaggtgaactttggtgatctctagtttgttcggatcatagtccactatctattttttcgctgattaactagttagtgcttttgcatcagggtgctgcatccctgatgaattagtgctacaagaaatggaaactgcaaaaacctaaagacatctaaattaactgagcatgacccacatttggaatttatagaaacctaacacatcattgttggattaatgattcaatgttgtttgtgtcggcagcttctttgtttcgcttgtagaacaatatttactcccatgtacctaaccctcatgttatcctgaaaagtgcatggtgttacacaattgatgtgcataggtaaaaacctgtatcacagttttggagtgaccttcctcattttgtgtttgtattagttcatttttctctattgttttctgtacttttgtaatatatacttaacacataaattataatatatatatttcacacataaattagtaaataatcccttcattcaaaattacaggatgtttaggttttttttaaatacacagtttttactatatatctagacatagcagatatctaagtgcatagtaatgggtctgtttctagagccgccaaaacttctcataatttggaacggagggagtatatattactggtgattgtaattgactaactgtaactcatgtgaagaacattctgaaacataactagaaaaatacattccaaaaacacaccatgattagtatatcacttttcaataaactgacaagcttgcaaaatgattttctgcgaattggcttcactgaagtggtgatgcatagacccttcaatttcattttttcattggtatctgtattcacctagttttgacctgctagccttcaaattaatataatgaaaaaaaatctctgttaattagtactggtttatgcaatacacttgactgtctgtaaatactttttaaattagtacttccttgcaacattcttccatccaaatgtcaggaacctaaatatttccaatgatgatgagatagaagcaaaaggacatggagtcaacaaggggctcatatctggacttaattgcaaagttcaggtgcaatttgagagctacaatgacttccaggatgcaatgaaggcattatgtggacgttctttagagaaggaaggatcacggttgaaagtagactatgacgtgacctgggactgtgaaggtttctttcgcatttctcaatatgagccagttcgtaacaatttagaggagagggattcattagcatcggttaatagccagaggaaacatcacacttcgcgaattgaatcagattataggaagagattcagggagtgatgacataagcccatggtatgagcgagatttctttgtcctctggagagggaaaacagctgcattgtaccatcgtattgtttcgttctcagatttcaagttatatttctcatttgttcacaattaaccgaacagaaaaacccattctgatacttactaatttgtatttattattagtatcggttttatccttgatgatacccagaggccagagagcgccacaaaacgaactgtttttttattccaaagaattcttagatgttgagcattggcgcctggacccatgctcatcgatcagtcacagtggcgtctgagttcagacttcagagtaatgaatgatttcagaaatgagcatagggacgggtcagcctacacgtgccgagctttgacgatatatcggttacagccgtgcaggtggaaaattctagagaccaaaactaatagtctttctggtttggataagctattttctgtcagtctgtatggagaggatcagatcttttctgactcaagccag

SEQ ID NO: 221273 - DNA, 1230 bp, Zea Mays
ctcaaccactgctcccctctgatcggtgaagaagtgaagccaggagccacggtttcttgcaaagttggtgatggtttggttatccacctttcacaggctgccctaggggaaccaaagaaagcgagtgagaatgccattgtgtctgtcaaaattgatgataagaaactagtgcttggaaccttatcagttgagaagcatcctcaaatctcttgtgatctggtatttgataaagattttgagttatcacacaattcaaagacagctagtgttttcttctgtggctacaagtcacctgttcctctgtttgagtctgattctggtgaagatagttcagatgaagaggttgaacccgatctaattccaatgcagaataatgaaattaaaatttctactgcaaaggttcccgtgaaggttggtatacaaaatgctgatgaagatgaaacttctagtggtgatgatgatgatttcactgatagtgatagtgaaatgtctgaggaagatgagtccagtgatgaagatgaagtgtcaagcgatacagatactagtgatgattctggttcggaagaacagacacctaccccaaagaagactgaggtagtagttggcaagaagagggcaattgaagctgagacaccttctggtaagaaggctaagtctgaacaatctgctcagaaaacaggcgacaaggtctcaacttctcatcctgcaaagcagtccagcaagactcctgcagacaaatctacaaagacccccacagctgacaagaagtcccccaaatctgggagccatgcctgcaagtcatgcagcaatgcgtcagcacttgagtctcatcagaaggcaaagaagcatgaagcctagagcacgtgctataccatctactcgttatcaaaatcagtggtcttatttttgaacttgaaaatgtccaagtttggaacttgcccagtagtcatctgattagtggtgttatttttctttgaacttgggaattgtctagtttgggacatacgcggtatgcctggttaagaacatgggaaatgtcaggttagaacaggtcctgctggcccagttttggtcgtcgtcgaatgttgctaatgttggaactgattattgtgacccgtaaggccgtaagggagaatctttgttatctggtagtgcctagtgcaaatcacctttttctcagttgttaaacatcttgcttttacggtgttcgttttttcccgagaaatgtgc

SEQ ID NO: 221274 - DNA, 251 bp, Zea Mays
aagtttcaagctaggggccggggctttttaaggcaacggtggagagcgtcagtggcagcagctcgtggtccgtccggggtttgctgctccgttttcttcagagcagcgtccatccatggagaggacgaagaaaccatgccttggtgtcgtcgctctgcttctcttcctgctcctggcgtcggccgcccatggagctcagcctgcagatgccaaggacatagcagcactgccgcttgctttctgtgattcag

SEQ ID NO: 221275 - DNA, 3661 bp, Zea Mays
caacctctcaagtgccacgtgtaccatacgtcgcgaaacatctcgacccaaccgacgccccgcctcttaaaacggcgaccttcctccatggccaaatcgttgtcctcctccgcttccctccaaatccaccctggatccaaccccgattttccccagcagaagcaaacccgagcaaattgagcgcttgcagcttcacccggcgaagcagaatcgaatcggagccgctcgccactccgcgatggggatcctcctccggtccctcctcgtcgcctcgctcgtcctcagttcgctcgtcttgcacgtcgcagcggctaaaactatagatccttacaaggttctaggagttgacaagaatgctagccaacgggatattcagaaagcctttcacaaactttctctaaaataccaccctgacaagaataaagggaagggcgcacaggaaaaatttgaagaaataaacaatgcatatgagattctatctgatgaagagaagaggaaaaactatgacctctacggggatgagaagggtaaccctgaatttggtggtggaaattttggaaatcatgggggttctacatacttcactggtggtggccctaagtccagtcaattcacatctggtaatggatggcagacgatgggtggtcaaggaaatacaaaaacgttttcattttcatttggtggtaaacctggggccagtggtggaaacccgtttggtggtggttttgatcttggtgatgttttctcgaacctttttggtggtggaccaatgggtgatagccatattggtggatcaagtggctcagctagagccaacactggaacttctggtcagcattctggcactaccaagattgaggatatcaccacacaagttttcaataaagaagtagctgatcaaggaactacttggcttctgttattttatactccccaatctaaaagtcagtttgtgctagagagtgtcatgcaagacgtggtccattcactagatggtgttcttagggctggtaagatcaactgtgacaatgaaaaatctctttgcaaaaggtctggtgtttcaatagggaaatcggcccgtctcttcatctattcatatgctactgcagagaaagggtctttgcacgagtattctggggaacatgatgctaagagcttgaagacattttgtcaagaacacctgccaagattctccaaacgggtagatattagccaattcagcttccctttaaatgttctaccaaaccttcctcaagtgctcttactatcgagtaagaaggacacaccagcaatgtggcgtgctatcagtgggatgttccgcaatcggataatcttttatgatgctgaggttcacgatgtttctcatcctctgctgaaaagtcttggcgtgaagaatctcccagctgtaattggccgaaccgtgaatggtgaggagctccttctgaaggatggcatttcggtgaaagatctcagatctggtgtcaaggaattgaagacactgctagatagttttgagaagaagaataagaagttattatcgaatctagctaataagaaaccttccggtcaatgggaagaaatcaagaagattcctctcctcacagcttccaactttgaggaaacatgtggagagaagacttcagtatgcatcattggtgttttcgggtcaaacaaagccaaggggcagcttgaagcagtcctgtctgagatatctatgaagactttgataagggggcagaactataattccagaaatgctgtctcctatgctttgctggataaggacaaacaatctggattcctgtcatcgtttgacaagtctggatacaggtcatctgacaagctgctcatcgcctacaagccccgccgggggaagttcgcggtgtacgacggcgaggtgacactggaagaagctgaaaggttcgtgggatccgttttgaacggagacgttcaactgtcgccgacgaaacaaaaacctgtccttcggtagacgattattgcaagttgcaagggttttagatctaacacttattatcttaattaaggccttaattaaggcttgtacatagatggacgaagagagtaaaatcatagagcgtttgctggacagtttagtcgttcggtaaaccagagttgctacatctctccctcaaccgtgccaatgtaaattgtgcaaatgctgcagtcctgtcgagatattgaatatatacaggcatacagcggaccatttctatactagccaagtctactaccttttgtttccacaatatcctgttgtcttgttcaaagtatactagcaaacatttttttttcttttggtctgccttgagatagagttgcttctgagaacatgacgcgactgttactcacagaatcagttgtgaggaatcaacccatttcacagcaaaattgtatgaaaaaaaaaaacatatatttactggaatcagcttattttacagaaaaaatgcaggaaaaaatcatatgttccaaaagggagccttaaatgccgtggagatcgaagaagaaatgaattgctgttgaatttatgccaaaattgctgtcgatttgattgtataccgaaagacaactctgggcttacggatgatacaaaattcggcccagcccaacgtgcttgtcggatctatccagtcgcacgccaccgcctcacaccacacggctctacacggctccctcttcgacagcctaattctcagacgaatgctatcttcactggcctcgacctcgagcacaaaacgctgtggccgagcggatgagaggaggatggcttccaccagcctcagctcctccttgcgcagggctactgcaaactagcaggagtcccaagatcttcgtcgtaccacacccagctgacctgttgctcgaggaatccctcccagaacgcggaggcagagctcctccggttgagctacccggcgaggaaataacaagcatgcaaaagaccagctgccggcgggccacggatggcgaccaagcggcgccgtccgcggcgcaagaaacaaccgacacccctcctcctcctccggcctttcacgttcccagcgccgagagattcccggtgacgcctggcaacggacagccgccgcagtagttagccaacgccaacggcgtcgcgccgagcgagccgctgacggcgcgggagcggctgcgggcggcgcgcgtgctgggcaagtacgcggagccgccggcgtcgaaaccggccaagccgagttcgggagcggcgtgctggacgcgctgcggggaggcggacgcgaagaaggccggggggtgggggcgggcggcgcgggtcgcgtcgcggatgcccgaggcgccgccgcgccgggcaacctgttcgacgacagcaggcgtgggatgcccaaggaggggtggacgtcttcctcgtcctcgtctccttcacgctcatcaccagcgtcatgttcgacaccgccttcctcgtgtggaagtggaagctcggcgcaatacacttcaacgagtactagctagccttttgactgactatagattggggaataaaagggcgattatgcagtgattcttgcggttgacaacaagggcaaccttgagccgccacaatctatatgtatactgatctggcgcagattgttgagagaacataaaaatgttgcaattaaacaaaaccgat

SEQ ID NO: 221276 - DNA, 3665 bp, Zea Mays
caacctctcaagtgccacgtgtaccatacgtcgcgaaacatctcgacccaaccgacgccccgcctcttaaaacggcgaccttcctccatggccaaatcgttgtcctcctccgcttccctccaaatccaccctggatccaaccccgattttccccagcagaagcaaacccgagcaaattgagcgcttgcagcttcacccggcgaagcagaatcgaatcggagccgctcgccactccgcgatggggatcctcctccggtccctcctcgtcgcctcgctcgtcctcagttcgctcgtcttgcacgtcgcagcggctaaaactatagatccttacaaggttctaggagttgacaagaatgctagccaacgggatattcagaaagcctttcacaaactttctctaaaataccaccctgacaagaataaagggaagggcgcacaggaaaaatttgaagaaataaacaatgcatatgagattctatctgatgaagagaagaggaaaaactatgacctctacggggatgagaagggtaaccctgaatttggtggtggaaattttggaaatcatgggggttctacatacttcactggtggtggccctaagtccagtcaattcacatctggtaatggatggcagacgatgggtggtcaaggaaatacaaaaacgttttcattttcatttggtggtaaacctggggccagtggtggaaacccgtttggtggtggttttgatcttggtgatgttttctcgaacctttttggtggtggaccaatgggtgatagccatattggtggatcaagtggctcagctagagccaacactggaacttctggtcagcattctggcactaccaagattgaggatatcaccacacaagttttcaataaagaagtagctgatcaaggaactacttggcttctgttattttatactccccaatctaaaagtcagtttgtgctagagagtgtcatgcaagacgtggtccattcactagatggtgttcttagggctggtaagatcaactgtgacaatgaaaaatctctttgcaaaaggtctggtgtttcaatagggaaatcggcccgtctcttcatctattcatatgctactgcagagaaagggtctttgcacgagtattctggggaacatgatgctaagagcttgaagacattttgtcaagaacacctgccaagattctccaaacgggtagatattagccaattcagcttccctttaaatgttctaccaaaccttcctcaagtgctcttactatcgagtaagaaggacacaccagcaatgtggcgtgctatcagtgggatgttccgcaatcggataatcttttatgatgctgaggttcacgatgtttctcatcctctgctgaaaagtcttggcgtgaagaatctcccagctgtaattggccgaaccgtgaatggtgaggagctccttctgaaggatggcatttcggtgaaagatctcagatctggtgtcaaggaattgaagacactgctagatagttttgagaagaagaataagaagttattatcgaatctagctaataagaaaccttccggtcaatgggaagaaatcaagaagattcctctcctcacagcttccaactttgaggaaacatgtggagagaagacttcagtatgcatcattggtgttttcgggtcaaacaaagccaaggggcagcttgaagcagtcctgtctgagatatctatgaagactttgataagggggcagaactataattccagaaatgctgtctcctatgctttgctggataaggacaaacaatctggattcctgtcatcgtttgacaagtctggatacaggtcatctgacaagctgctcatcgcctacaagccccgccgggggaagttcgcggtgtacgacggcgaggtgacactggaagaagctgaaaggttcgtgggatccgttttgaacggagacgttcaactgtcgccgacgaaacaaaaacctgtccttcggtagacgattattgcaagttgcaagggttttagatctaacacttattatcttaattaaggccttaattaaggcttgtacatagatggacgaagagagtaaaatcatagagcgtttgctggacagtttagtcgttcggtaaaccagagttgctacatctctccctcaaccgtgccaatgtaaattgtgcaaatgctgcagtcctgtcgagatattgaatatatacaggcatacagcggaccatttctatactagccaagtctactaccttttgtttccacaatatcctgttgtcttgttcaaagtatactagcaaacatttttttttcttttggtctgccttgagatagagttgcttctgagaacatgacgcgactgttactcacagaatcagttgtgaggaatcaacccatttcacagcaaaattgtatgaaaaaaaaaaacatatatttactggaatcagcttattttacagaaaaaatgcaggaaaaaatcatatgttccaaaagggagccttaaatgccgtggagatcgaagaagaaatgaattgctgttgaatttatgccaaaattgctgtcgatttgattgtataccgaaagacaactctgggcttacggatgatacaaaattcggcccagcccaacgtgcttgtcggatctatccagtcgcacgccaccgcctcacaccacacggctctacacggctccctcttcgacagcctaattctcagacgaatgctatcttcactggcctcgacctcgagcacaaaacgctgtggccgagcggatgagaggaggatggcttccaccagcctcagctcctccttgcgcagggctactgcaaacctagtagcaggagtcccaagatcttcgtcgtaccacacccagctgacctgttgctcgaggaatccctcccagaacgcggaggcagagctcctccggttgagctacccggcgaggaaataacaagcatgcaaaagaccagctgccggcgggccacggatggcgaccaagcggcgccgtccgcggcgcaagaaacaaccgacacccctcctcctcctccggcctttcacgttcccagcgccgagagattcccggtgacgcctggcaacggacagccgccgcagtagttagccaacgccaacggcgtcgcgccgagcgagccgctgacggcgcgggagcggctgcgggcggcgcgcgtgctgggcaagtacgcggagccgccggcgtcgaaaccggccaagccgagttcgggagcggcgtgctggacgcgctgcggggaggcggacgcgaagaaggccggggggtgggggcgggcggcgcgggtcgcgtcgcggatgcccgaggcgccgccgcgccgggcaacctgttcgacgacagcaggcgtgggatgcccaaggaggggtggacgtcttcctcgtcctcgtctccttcacgctcatcaccagcgtcatgttcgacaccgccttcctcgtgtggaagtggaagctcggcgcaatacacttcaacgagtactagctagccttttgactgactatagattggggaataaaagggcgattatgcagtgattcttgcggttgacaacaagggcaaccttgagccgccacaatctatatgtatactgatctggcgcagattgttgagagaacataaaaatgttgcaattaaacaaaaccgat

SEQ ID NO: 221277 - DNA, 1484 bp, Zea Mays
acagctccaggccacgagaccgtccagcgcgcgggcaggcgcgccgctaaactaaacccgaccaaatgccgcctctcctcacctcctcctccgtaccggcgctgccgctggccgcgtggtccaggtaccgcctcagggttgcggcttccaacgccgcctccgccccggacggggccggcgccactgccagatgcaccagcaccggcgggttcccgtccttccttcccggggcggtggagcgcatccgcgacggcgctgccatccgcctggccaagcgaatcgagcgcgtgcccgtccagaccagtttctcgggtagcgcgatatcgagcagctgtgtgaggccgctcaagcagcaacaggacggtgatccggtcgtgctgctgcatggattcgacagttctgttctagaatggagatacacctacccattgctcgaggaggccggattggaggcttgggctgtggacatccttgggtggggcttctctgatttggaaacacggccgccatgtgatgttgcatccaaacgcgagcatttttaccagttctggaaatcttacatcaaaaggcctatggtgttagtcgggcccagccttggtgctgctgttgccattgatttttcagtcaactaccccgaagcggtctcgaaattgatcttcattggtgcaagtgtatactctgagggcccaaaagatatgaccaggatgcctaaatttgtttcatatgctggggtgtttatattgaagagtcttccactgcgatttttagcaacaagattggcatttaaaaaaactccaaatgaattctttgattgggtgcaaattggccgtctgcattgcctacttccctggtgggaggatgctacagtagattttatgattagagggggttataatgtcataaaccaaataaaacaggtgaagcataaatgcctgatcctgtggggagaggatgatggaataataagcagcaaactagcatataggttgcatcaggaactcccagacgctattctgaggcaggtccggcagtgtggccatattcctcacgtggagaagccaagggaggccgcaaaacatgttcttgaattcctcgcaagaaacacgtcagacaagtcagaccagtctccttccgagccgtcagacaagtcagaccagtctccttccgagccgtcagtagtcgtgaaccgctgagcagatcacagatccttgaagggtaggctgtacaaagtggaatgtttggccatggatgatggatacagtcgctaactcgctatgctcagccaagctgctgctgcggaaggctgaagctgaactcggcgatggttctcagcgacactagaagataggttgttggtcagttaggactaactgtactgtacggtagcactgcaatgcaagggacgcagtggatgggagcatgacaatttcggctgttgccagtactgtaaattatgcaatgtaaaattatttggaaaaaaaaga

SEQ ID NO: 221278 - DNA, 1630 bp, Zea Mays
tggcaatgcggcaccacacgatgccacgcggcctccaccgtcctagcgccctataacacccgtgcagcggagtgggcatggcacacagctccaggccacgagaccgtccagcgcgcgggcaggcgcgccgctaaactaaacccgaccaaatgccgcctctcctcacctcctcctccgtaccggcgctgccgctggccgcgtggtccaggtaccgcctcagggttgcggcttccaacgccgcctccgccccggacggggccggcgccactgccagatgcaccagcaccggcgggttcccgtccttccttcccggggcggtggagcgcatccgcgacggcgctgccatccgcctggccaagcgaatcgagcgcgtgcccgtccagaccagtttctcgggtagcgcgatatcgagcagctgtgtgaggccgctcaagcagcaacaggacggtgatccggtcgtgctgctgcatggattcgacagttctgttctagaatggagatacacctacccattgctcgaggaggccggattggaggcttgggctgtggacatccttgggtggggcttctctgatttggaaacacggccgccatgtgatgttgcatccaaacgcgagcatttttaccagttctggaaatcttacatcaaaaggcctatggtgttagtcgggcccagccttggtgctgctgttgccattgatttttcagtcaactaccccgaagcggtctcgaaattgatcttcattggtgcaagtgtatactctgagggcccaaaagatatgaccaggatgcctaaatttgtttcatatgctggggtgtttatattgaagagtcttccactgcgatttttagcaacaagattggcatttaaaaaaactccaaatgaattctttgattgggtgcaaattggccgtctgcattgcctacttccctggtgggaggatgctacagtagattttatgattagagggggttataatgtcataaaccaaataaaacaggtgaagcataaatgcctgatcctgtggggagaggatgatggaataataagcagcaaactagcatataggttgcatcaggaactcccagacgctattctgaggcaggtccggcagtgtggccatattcctcacgtggagaagccaagggaggccgcaaaacatgttcttgaattcctcgcaagaaacacgtcagacaagtcagaccagtctccttccgagccgtcagacaagtcagaccagtctccttccgagccgtcagtagtcgtgaaccgctgagcagatcacagatccttgaagggtaggctgtacaaagtggaatgtttggccatggatgatggatacagtcgctaactcgctatgctcagccaagctgctgctgcggaaggctgaagctgaactcggcgatggttctcagcgacactagaagataggttgttggtcagttaggactaactgtactgtacggtagcactgcaatgcaagggacgcagtggatgggagcatgacaatttcggctgttgccagtactgtaaattatgcaatgtaaaattatttggagtttgcaagggcattgcccttttccctcgccgttgatatccagacagcgccgccatcggcacaagccaagc

SEQ ID NO: 221279 - DNA, 1340 bp, Zea Mays
tgcggatgcgcaattgcgccaggagtacagatttgaggctaagttgcttctggagaagctaaggaacaaaaggctgatgtttgtgggtgattctctgaatcggaaccagtgggagtccatggtgtgcctggtccagtcagaggcaccatgggacaaaaaatctctcgtcaagaatggttctcttaatgtcttccatcttcaggagtacaatgcaacagttgagttctactgggctccgttcctagtggagtcaaactcagacgacccagacattcacagcatcagcgaccgcatgatcaagccgacatcgatcgcgaagcatgcggcaaactgggaaggcgtggactacctgatcttcaacacttacatttggtggatgaacacaccgcagatgaaaaccgtgtgagtaattaattgtcttactcgcgaacaatggaaagggtgagctgctcatgccttacacgagctaccttcttgactacaggcacggtggatctttctcaaggaaacacgtaaagtacgatgaaatagagcgtgtggaggcataccggaaggtcctcaagacgtggtccagatgggtagaggcgcacattgatcccaagagaagcacggtcctattcatgagcgtgtcaccggtacatatgcagagtgaaggctggggcagccccaacgccgtaaaatgcttctccgagacgcagccggcgatcaactacacgaagaaactggaggtgggcacggactgggacctcttcgcggccgcccagcgcgtgacgaggtcgatggagaaggtgccggtgcgcttcgtcgacgtgaccgcgctgtcggagatccgcaaggacgcgcacacctccgtgcacacgctgcggcaggggaagctcctgacgcccgagcagaaggcgaacccgaggaagttcgcggattgcatccactggtgcctccccggcgtgccggacacgtggaaccagttcgtttatggtcacatcgtgtcgagcccgccgccgccgcaggatcaacctcacagataacaacagctagaaatacttctcgtgcatcagtgtgtttgtggtcgacgccataagttatttctttttcccctaatagtaggtttagaagcctatgctgctggactggttcacctgagcatctgttggaaggtcagatcgcactagtgtagccaaaaaaagcagcagtaaatgtggttgtttgagcctgaggggaaatgcgcgcttctgtgcctcgtgtttctacctggcacgtgtacataattttttaccagaatcattcgtgaaattgtttctattcgtgtcgaaatatttctcttaaaaggtgccagaaatttg

SEQ ID NO: 221280 - DNA, 1312 bp, Zea Mays
caacatgtagtggctgactgacaactacttgactgctacaggaatccaagcgctcagactcactcttactggagaccactatatggtttacctgtggcacatgcaaactctccaggggcattctcgggcaatgctttgtggccccacatgtcccagcttcatattcggtgctcgacgccgtgtgactctgccagagtgccacctgccacggacacggagggagggaggtgtgccatcagcgcgcagcatcctccagccgatagcctctcactgcctcacttcagcctcggacctgaacagacctcaggaaaggggagacctggaacgaccgtcgagctagagcggctgcgcgctgcgccgagagctggggagtggggactggggaccgaattgaaggcaagaaagtagaaacgaaccaccacaggcggcgcggcaatggatgagcgcggggagaaggaggaggagcacggagtagtggaggaggagacggcggcggttgtgctcaaggaggtggaggtggagatggagatggtcggcggctctgaagaagcctcggcggcgccgctcctcctcgcgcacccgtgctcgctgctgcagctcctgctccgcgcctgcgccggctgcctggtgcgcctgctgcacggccactgcagcgacggcgccaacgacgacccaaaagctgctgccgacgacgacgacgctgcgcctgaagctgctgctgctgcggcggcggcggcgggcgatggcggcgacaaggcagccacctacttgtacatgcaggaggtgtgggcagtgaggaggaggccgacgacgcccggccgtccgagagaaggttccggtggcaatggagggaaccaccactagctagctagctctctagcgcgacgccgctgcaacgtacgtacggtgaccctagcttgttcgcttgcgcgtgatcagagtgcgtagcttcttcgatccgaatgaaatcaccttggggccgggggcaggtcgggtgtttttattgaaacgaaaaggacgacgggaggcgaaaataaagcatacccgatcgagagggcagaaacgacagcgccaaccttgcactgcactggcgtcttggcagttggcacaacccatgcatgaccgaaactacttctgatgaaccacacgcgcgcgtgcacagctgcgcaggacgtacgcgacgacgaccaccaagtacgacgtgtgccccggcctggctatatgtcgtcgttgttagaaagttaggcatttttagttttaatttaatccagataatcagtgcgatatatgtaatgacatgtatatgcatgtg

SEQ ID NO: 221281 - DNA, 1319 bp, Zea Mays
gccacctgccacggacacggagggagggaggtgtgccatcagcgcgcagcatcctccagccgatagcctctcactgcctcacttcagcctcggacctgaacagacctcaggaaaggggagacctggaacgaccgtcgagctagagcggctgcgcgctgcgccgagagctggggagtggggactggggaccgaattgaaggcaagaaagtagaaacgaaccaccacaggcggcgcggcaatggatgagcgcggggagaaggaggaggagcacggagtagtggaggaggagacggcggcggttgtgctcaaggaggtggaggtggagatggagatggtcggcggctctgaagaagcctcggcggcgccgctcctcctcgcgcacccgtgctcgctgctgcagctcctgctccgcgcctgcgccggctgcctggtgcgcctgctgcacggccactgcagcgacggcgccaacgacgacccaaaagctgctgccgacgacgacgacgctgcgcctgaagctgctgctgctgcggcggcggcggcgggcgatggcggcgacaaggcagccaccgaggtgtgggcagtgaggaggaggccgacgacgcccggccgtccgagagaaggttccggtggcaatggagggaaccaccactagctagctagctctctagcgcgacgccgctgcaacgtacgtacggtgaccctagcttgttcgcttgcgcgtgatcagagtgcgtagcttcttgtaagttgtaacttacttggtactcgtactagatttcgaaagtaacgtcgttaattagtaagtagtactagtacgtgagtgtggtttatgttatatgttctgtagcttcaatgcaaagaagactgtgtgcatgtgtttgaggattattgtttcgactttcgccgaatgattccaggtagatgcggtagtatgtgattcacacgtcttatttcttggcagcgatccgaatgaaatcaccttggggccgggggcaggtcgggtgtttttattgaaacgaaaaggacgacgggaggcgaaaataaagcatacccgatcgagagggcagaaacgacagcgccaaccttgcactgcactggcgtcttggcagttggcacaacccatgcatgaccgaaactacttctgatgaaccacacgcgcgcgtgcacagctgcgcaggacgtacgcgacgacgaccaccaagtacgacgtgtgccccggcctggctatatgtcgtcgttgttagaaagttaggcatttttagttttaatttaatccagataatcagtgcgatatatgtaatgacatgtatatgcatgtg

SEQ ID NO: 221282 - DNA, 722 bp, Zea Mays
ccacctgccacggacacggagggagggaggtgtgccatcagcgcgcagcatcctccagccgatagcctctcactgcctcacttcagcctcggacctgaacagacctcaggaaaggggagacctggaacgaccgtcgagctagagcggctgcgcgctgcgccgagagctggggagtggggactggggaccgaattgaaggcaagaaagtagaaacgaaccaccacaggcggcgcggcaatggatgagcgcggggagaaggaggaggagcacggagtagtggaggaggagacggcggcggttgtgctcaaggaggtggaggtggagatggagatggtcggcggctctgaagaagcctcggcggcgccgctcctcctcgcgcacccgtgctcgctgctgcagctcctgctccgcgcctgcgccggctgcctggtgcgcctgctgcacggccactgcagcgacggcgccaacgacgacccaaaagctgctgccgacgacgacgacgctgcgcctgaagctgctgctgctgcggcggcggcggcgggcgatggcggcgacaaggcagccacctacttgtacatgcaggaggtgtgggcagtgaggaggaggccgacgacgcccggccgtccgagagaaggttccggtggcaatggagggaaccaccactagctagctagctctctagcgcgacgccgctgcaaccgatccgaatgaaatcaccttgg

SEQ ID NO: 221283 - DNA, 666 bp, Zea Mays
ccacctgccacggacacggagggagggaggtgtgccatcagcgcgcagcatcctccagccgatagcctctcactgcctcacttcagcctcggacctgaacagacctcaggaaaggggagacctggaacgaccgtcgagctagagcggctgcgcgctgcgccgagagctggggagtggggactggggaccgaattgaaggcaagaaagtagaaacgaaccaccacaggcggcgcggcaatggatgagcgcggggagaaggaggaggagcacggagtagtggaggaggagacggcggcggttgtgctcaaggaggtggaggtggagatggagatggtcggcggctctgaagaagcctcggcggcgccgctcctcctcgcgcacccgtgctcgctgctgcagctcctgctccgcgcctgcgccggctgcctggtgcgcctgctgcacggccactgcagcgacggcgccaacgacgacccaaaagctgctgccgacgacgacgacgctgcgcctgaagctgctgctgctgcggcggcggcggcgggcgatggcggcgacaaggcagccacctacttgtacatgcaggaggtgtgggcagtgaggaggaggccgacgacgcccggccgtccgagagaaggttccggtggcaatggaggcagccacaactag

SEQ ID NO: 221284 - DNA, 594 bp, Zea Mays
gaaaccaaaacagaaaaaaagtaaagtcctgctggcagctgtcaaccacccgtggtcccgtggaagagaagagagcatcgccggacccggggacggcgcgccgagaaggaacaaaagaagacggcggcggggcggagatggggagccctctgggcgggtggccgtcatacaacccgcacaacttcagccagttggtccctgccgacccctccgcgcagccctcgaatgtcacaccagccacttatgttgcgacccacaggacagatccgccacccaatcaagtgataaccacggaggccaggaacatcctgctgaggcacttgtaccagaaatccgaggagaagctgaggccaaagagagctgcggcggacaacctcgctccggagaacaacaacaagaagcagcccaggggacctgtgggcgacgtcgggggccagtcgagcgcaagaagctgaagacgcacagctggtggccgtcctcccctgcttctcatctatcggtgtcatgcagcctgcatctctcactcacagctgagctggtagctggtggtggttgccctcccctcccctatatgattacaccttatataccggg

SEQ ID NO: 221285 - DNA, 315 bp, Zea Mays
gaaaccaaaacagaaaaaaagtaaagtcctgctggcagctgtcaaccacccgtggtcccgtggaagagaagagagcatcgccggacccggggacggcgcgccgagaaggaacaaaagaagacggcggcggggcggagatggggagccctctgggcgggtggccgtcatacaacccgcacaacttcagccagttggtccctgccgacccctccgcgcagccctcgaatgtcacaccagccacttatgttgcgacccacaggacagatccgccacccaatcaagactactgcggactgaatcgcgccctggaattgc

SEQ ID NO: 221286 - DNA, 823 bp, Zea Mays
ggctccacagcgccacctcggccaggtactcaccagaccagatgtttgctgttgtcgcgtcagtggacctctacgaggactttgtgccatggtgccagcggtccaggattattaggtgccatgaagatggctcatttgatgcagagctcgagattggattcaagttccttgttgaaagttatgtctcccgtgtggagatggagaagcccagactacagcatctgaaagtggactttttgatcatttggtaaacgtttgggagtttaagcctggtcctgttccagggacatgtgacatctatttcttagtcaattttaagtttcaatcaccactgtatcgtcaggtaaatcatgcttttaatgatactgcacatatattaacttgtcatatgcccgttatgtctcttagagtacggatctttctcatctcaggttgcatcaatgttcttcaaggaagttgtttctcgactagtgagctcatttagtgaccgttgttttagaatatatggccctgctgttccagtgctggaaaatagttatggacaaagaagatgaagccgttatggttcaattttgaaggttgtatctttcatggatctctagggattacttgtagtcaaggcataatccttccttttgtaatcggtggtagtgccatttagaacaccatcgtgcaagaggtcgtctataaggaaatcagtcagtattgagttttcatcattggctatttctgaggttatattttcatctatttcaaaattcgtttcacgtgcatacaacgaaatggttatgttttcatcattggcaaattggcaattcctgag

SEQ ID NO: 221287 - DNA, 2065 bp, Zea Mays
ctcctatccgccgttgctaatccttccacactcctcccccgcaaccacgggatctctcactgtcccaccccactccctcctccatttggcagtggcacatctatataggcacccggaatccccactcccccacgacgccgtccccgtccccgtcccgacgaattggaataggagaagcaaaagctagtgcttgccgctctgcatcctaaccccacggaactgccgttcgtttcccacgaatcagatgatggatctcgccgacagccagcaacagcggctcatcgccggcgcggctctgctggtcgccaccgtcgccttcttcaggttcctcctgcgctctcgctccgggggcaagcgcctgccgcccaccatcccgggggcgccggtggtcggcggcctcgtcaagttcatgcgcgggcctatcccgatgatccgggagcagtacgcccgcctcggcagcgtcttcaccgtccccatcatcagccgcaagatcacgttcctcgtcgggcccgaggtgtccgcgcacttcttcaagggcaacgaggccgagatgagccagcaggaggtgtacaggttcaacgtgcccaccttcggccccggggtcgtctttgacgtcgactactccatcaggcaggagcagttcaggttcttcaccgaggcgctccgggccaataagctgcgcagctatgtcgaccagatggttgttgaggctgaggagtacttctcaaagtggggagaaagtggcactgttgatttgaagtacgagttggagcacctcatcatactgacagctagccggtgcttgctgggaagggaggtgcgagaaaagctgttcgacgatgtttctgctctcttccatgaccttgacaacgggatgcagccaatcagtgtcctcttcccgtacctcccaatccctgcgcataagcgccgtgacagggcacgggcacgtttggcagaaatctttgccaccatcatcaagtcccgcaaggcctctggacagtctgaggaagacatgctgcagtgcttcattgattccaagtacaagaatgggcgccccaccaccgagggtgaggtaaccgggctacttatcgcagcgctctttgctggacagcataccagctcaatcacctcaacctggactggagcgtacatgcttcgcttcaagcagtactttgcagaagccgtagaggagcagaaggatatcatgagacggcatggcgacaagatcgatcatgacatcctggcagagatggatgtcctctaccggtgcatcaaggaggcccttcgtctccacccgccgctgattatgttgcttcgccaatcacacagtgacttcaccgtgacaacaaaggaaggcaaagagtacgacatccccaagggccacatcgtcgcgacatcgccatcctttgccaacaggctgccccacatctacaagaaccctgactcgtatgaccctgatcggttcggtcctggaagggaggaggacaaggctgcaggcgccttctcatacatctccttcggtggcggcaggcatgggtgcctcggtgagcccttcgcctacctgcagatcaaggcaatctggacgcacctactgaggaactttgagttcgagctggtatcgccattcccagagaacgactggaacgccatggtggttggcatcaagggcgaggtgatggttaactacaagaggcggaagcttgccgtggacaactaagattgtggccgcagtctctagatgcttgcttcttgttgattcaattgttttcacatgtttgtcagcatttgttcagtgcaagttctgctgtacgcaagccagccttgttaggggtgtttctgttgtttaggattttgaaatttgtttcactatggggccgccatgatctgcaacttctgcatgttcagcttcctggctaagcattcccctatgtcaaatctgtaacttgtagcatctataagcctgtgggtcttttgttcaaatcctgatgtttatcattgtcttagatggatgtaaacacaaacataacaaataacctaatgaataaactcaggtgttcagtgtgaa

SEQ ID NO: 221288 - DNA, 3293 bp, Zea Mays
aaagaatcttcgtcgtcgtcgtagtagtagttagtacgtgtagtgtaggcttcaccgtatgttcactgcaccagatttaacatgcaaccgcaggccgtgccgtgacgtgctcatatggatgtacatttgaaatagcgagtagcatatagaggctgctggtctggttgccctttccaattttcttgggacgtcagccgtcttacggacgcgccatgaagctgagagcccccaccccacccagtcccagccatctagcctgctttcttgccaaaacacacccaagggcagacgaagaaaccaaacatacagtcgcaaggctcacagcacccagattgaagaccactctgttttcggcaggcccgcagcacctagatcaaattcctgctcttcaggtcttcgtcatatatcagcagaacaccagcaaaagcagcaaagaaggaaccctttttttcctcgaaatttcaggctcagttattgcgaccttccatcacaaattggcacctttacaccctgcatatcaggtggctgcggagcatgcgttgtgcttgtctcgaagtacgacccagccaccgacgaggtgaccgagttctcagcgagctcctgcctgacgctgctccatagcgtggaccggtgctcggtgaccaccagcgagggcattggcaacaccaaggatggctaccaccctgtgcagcagcgcctctccggcttccacgcctcccagtgcggtttctgcacgcccggcatgtgcatgtccatcttctctgcgcttgtcaaagccgacaaggcggccaaccggccagccccaccggccggcttctccaagctcacttcctcggaggctgagaaggctgtctctggcaacctgtgccgctgcacagggtacaggcccatcgtcgacgcctgtaagagcttcgcagccgatgttgatcttgaggacctgggcctcaactgcttctggaagaagggtgatgagcctgcagatgtcagcaagctgccaggctacaacagtggtgacgtctgcactttccctgactttctcaaatctgagatcaagtcctcaattcagcaggctaacagcgctccagttcctgtttctgacgatggctggtaccgtcctaggagcattgacgagcttcacaggttgtttcaatctagctccttcgatgaaaattccgtgaagatagtggcttcaaacactgggtctggagtgtacaaggatcaggacctttatgacaagtacattgacatcaaaggaatcccagagctttcagtcatcaacagaagcagcaaaggaattgagcttggatcagttgtgtccatctctaaagctattgaggtgctgtcagatggaaatctcgtcttcagaaagattgctggtcacctgaacaaagtggcttcaccgtttgttcggaacactgcaaccataggtggaaacatagtcatggcacaaagattgccattcgcatcggacattgcaaccatactactagctgcaggttcaacagtcacaatccaggtggcttccaaaaggctgtgcttcactctggaggagttcttgcagcagcctccatgcgattctaggaccctgctgctgagcatatttatcccggaatggggctcaaatgatgtcacctttgagactttccgagcagcacctcgtccacttggcaatgctgtctcatatgtcaattcagctttcttggcaaggacttcattggatgcagcatcaaaggaccatctcatcgaggatatatgtctggcgttcggtgcttatggagctgatcatgctattagaactagaaaggttgaggattacctgaagggcaaaacagtgagctcgtctgtcatacttgaagctgttcggttgcttaaagggtctattaaaccatcagaaggctcaacacatcctgagtatagaattagcttggctgtcagtttcttgtttaccttcctatcctcccttgccaatagcttgaatgaatctgcaaaggttaatggtaccaacgagcactcaccagagaagcaactcaagttggacatcaatgatttgccaatacgatcaagacaagaaatatttttcactgatgcatataagccagttggcaaagcaattaagaaagctggggtagagatccaagcttcaggggaagctgtgtacgttgatgatatccctgctcccaaagattgcctctatggggcatttatttatagcacacaccctcatgcacatgtaaagtcaatcaactttaaaccatctttggcttcacagaagatcatcacagttatcactgcaaaggatattcccagcggtggacaaaatgttggttatagcttcccgatgattggagaagaagcactttttgcagatccagttgctgaatttgctggtcaaaatattggtgttgtgattgctcaaacacagaagtatgcctacatggcggcaaagcaagccgtcattgagtatagcacagaaaatctgcagccaccaattctgacaatagaagatgcaatcgaacgaagcagcttcttccaaaccctcccatttgtagctcctaagccagttggtgattacgacaaagggatgtctgaagctgatcacaagattttatcggcagaggtaaaaattgaatcccaatactttttctacatggagccacaagtggcgctagctattcctgatgaagataactgcataaccatctattcttcaacacaattacctgagtccacacaaaatgtggttgcaaagtgcgttggcattccatttcacaatgtccgcgtaatcaccagaagggtcggaggaggctttggtggaaaagcattgaaatcaatgcatgttgcatgtgcatgtgcagttgctgcattgaagctacaacgtccagttcggatgtacctcgatcgcaagacagacatgataatggcaggcgggcggcatcctatgaaggtgaagtactctgttgggttcaagtcaaacggcaagatcacagccttacatcttgatcttgggatcaatggtggaatatctccagatatgagtccaatgattgcagcacctgtcataggttctctcaaaaagtacaactggggcaatcttgcatttgacaccaaggtctgcaaaacaaatgtctcatcaaaatcgtcaatgagagctcctggagatgcgcagggctctttcattgctgaagccatcatcgagcatgttgcctcggcactttcagccgacactaataccataaggagaaagaaccttcatgactttgagagccttgcagtgttctttggagatagtgcat

SEQ ID NO: 221289 - DNA, 2560 bp, Zea Mays
gagggttttgcctcaggcagtacaaatagcgcgcctcatccgcgccgcccccgcgctttttctctctgctgacgccgccgccgccgggagccgtaccccgggagagccccccagcccttatcaaaccctaaatcaaaaactatccaaaaaaatccgcaaaaaactagaaaaaatcccaaaaatcaccacttgattggagatggcggcgcaagggcaggcggcggctggatccgcgtccgagtctggcggctcaccggctgcctcagctgctgcagcggcggcggctgcgttcccggcgacttctctctacgtgggtgacctgcacgagagcgttcaggacgcacagctcttcgacgtcttcagccaggtcggcggcgtcgtctccgtgcgcgtctgcagagacatcaactcccgcaagtcgctcggctacgcctacgtcaactacaacaacactagcgacgctgcacgggcacttgaactgcttaacttcactcctatcaatggaaagcctatcaggatcatgtattctaaccgtgaccccagctcgcgcaaaagcggtgcaggaaatatatttattaagaatcttgataagtcaatagacaacaaagctttatatgacacgttctgtgcatttgggaatatcctttcatgtaaaattgcaacagacccctcaggagaatcaaggggatatggttttgttcagtttgagatggatgaatccgctcagtctgccattgataaactcaatggtatgcttatcaatgacaagaaagtgtatgttggaccttttgttcgtaagcaggacagggaaaatgtctcgaacaatatcaaattcagtaatgtgtatgtgaagaatctgtccgatactgttactgatgatgagttgaaggagatgtttggaaaatatggaaccataacaagtgctgttgttatgcgggatagtgatggaaattctaggtgttttggatttgtcaattttgaaaatgcagatgctgctgctcaggctgttcaagagttgaatggcaagatattcaatgataaggaactgtatgttggaagagcacaaaagaagtctgaaagagagatggagttgaaggagaaatttgaaaagaatattcaagaggtagctgagaagttccaaaacactaacttgtatctgaagaacttagatgataacattgatgatgaaaagttgcgtgaaatctttgctgagtatggcaatattacttcttgcaaggttatgcgggattcttatggtgttagcagagggtctggatttgtttctttcaaatctgctgaagatgctaaccgagctatttctcccatttagcttaccgagatgaatggcaaaatggttggaagcaagcccctttatgtagctcttgcacagcgtaaagatgacagaaaggcaaagctacaggcacagttttcacaaatgcgtcctgttgcaatggcaccttcagtaggtcctcgcatgcccatgtttccacctagtgttcctggagttggtcagcagctgttttatggtcagccacctccagccttcatcaaccctcaggctggatttgctttccagcaacctatgatgcctggtatgaggcctggtggtccaatgccgaactttatgatgcctatggttcagcagggacagcaaccgcaacgtcctgctggtaggcgtgctgggtctggtggaatgcagcagcccatgccaatgggtagtcagcaacagatattccctagaggtggtcgtggctaccgctatgctactggacgtggaatgcctgatcctggcatgcataatgttggtgctgtgatgccatctccatatgagatgggagggatggcaatgagagatgctggtgtctcacaacctgttccaattggggcactagccactgcgcttgctaacgcctcaccagatcagcaaagactgatgcttggtgagaacctgtatcctcttgttgaacagctggagcgtgagcaggctgccaaggtcactggcatgcttttggagatggaccagacggaggttcttcacctgctggagtcgccagatgctctcaaggctaaggttgctgaagccatggaggttctccgctcagcccagcatctccagcagagcaatgcctccaccgagcagcagctggctaatctatcactgaatgatggcgtcctctccagctgaatgtttctgatgattcagaaattgctggcaatttttgcttgatacctatctctagaatgcaattactttgtttactttattggaattttaggtgctgctctataattagctgaactagggggtggatttaattgccttgaattggttattttggttatatgaatatgttatgtcggagctcaggtctgtcattttggtatatggttatgttagcccttgtccgtttatcacccgaattatcacagattgaattttagagcgtcattgcttttctagctgatattttgttaagcaactcgttgcctcgagatgatcgattaggctatgatttttttctagcagcgtactaatttttatcttttatttcaaacccta

SEQ ID NO: 221290 - DNA, 2446 bp, Zea Mays
tttgcctcaggcagtacaaatagcgcgcctcatccgcgccgcccccgcgctttttctctctgctgacgccgccgccgccgggagccgtaccccgggagagccccccagcccttatcaaaccctaaatcaaaaactatccaaaaaaatccgcaaaaaactagaaaaaatcccaaaaatcaccacttgattggagatggcggcgcaagggcaggcggcggctggatccgcgtccgagtctggcggctcaccggctgcctcagctgctgcagcggcggcggctgcgttcccggcgacttctctctacgtgggtgacctgcacgagagcgttcaggacgcacagctcttcgacgtcttcagccaggtcggcggcgtcgtctccgtgcgcgtctgcagagacatcaactcccgcaagtcgctcggctacgcctacgtcaactacaacaacactagcgacgctgcacgggcacttgaactgcttaacttcactcctatcaatggaaagcctatcaggatcatgtattctaaccgtgaccccagctcgcgcaaaagcggtgcaggaaatatatttattaagaatcttgataagtcaatagacaacaaagctttatatgacacgttctgtgcatttgggaatatcctttcatgtaaaattgcaacagacccctcaggagaatcaaggggatatggttttgttcagtttgagatggatgaatccgctcagtctgccattgataaactcaatggtatgcttatcaatgacaagaaagtgtatgttggaccttttgttcgtaagcaggacagggaaaatgtctcgaacaatatcaaattcagtaatgtgtatgtgaagaatctgtccgatactgttactgatgatgagttgaaggagatgtttggaaaatatggaaccataacaagtgctgttgttatgcgggatagtgatggaaattctaggtgttttggatttgtcaattttgaaaatgcagatgctgctgctcaggctgttcaagagttgaatggcaagatattcaatgataaggaactgtatgttggaagagcacaaaagaagtctgaaagagagatggagttgaaggagaaatttgaaaagaatattcaagaggtagctgagaagttccaaaacactaacttgtatctgaagaacttagatgataacattgatgatgaaaagttgcgtgaaatctttgctgagtatggcaatattacttcttgcaaggttatgcgggattcttatggtgttagcagagggtctggatttgtttctttcaaatctgctgaagatgctaaccgagctcttaccgagatgaatggcaaaatggttggaagcaagcccctttatgtagctcttgcacagcgtaaagatgacagaaaggcaaagctacagttttcacaaatgcgtcctgttgcaatggcaccttcagtaggtcctcgcatgcccatgtttccacctagtgttcctggagttggtcagcagctgttttatggtcagccacctccagccttcatcaaccctcagggacagcaaccgcaacgtcctgctggtaggcgtgctgggtctggtggaatgcagcagcccatgccaatgggtagtcagcaacagatattccctagaggtggtcgtggctaccgctatgctactggacgtggaatgcctgatcctggcatgcataatgttggtgctgtgatgccatctccatatgagatgggagggatggcaatgagagatgctggtgtctcacaacctgttccaattggggcactagccactgcgcttgctaacgcctcaccagatcagcaaagactgatgcttggtgagaacctgtatcctcttgttgaacagctggagcgtgagcaggctgccaaggtcactggcatgcttttggagatggaccagacggaggttcttcacctgctggagtcgccagatgctctcaaggctaaggttgctgaagccatggaggttctccgctcagcccagcatctccagcagagcaatgcctccaccgagcagcagctggctaatctatcactgaatgatggcgtcctctccagctgaatgtttctgatgattcagaaattgctggcaatttttgcttgatacctatctctagaatgcaattactttgtttactttattggaattttaggtgctgctctataattagctgaactagggggtggatttaattgccttgaattggttattttggttatatgaatatgttatgtcggagctcaggtctgtcattttggtatatggttatgttagcccttgtccgtttatcacccgaattatcacagattgaattttagagcgtcattgcttttctagctgatattttgttaagcaactcgttgcctcgagatgatcgattaggctatgatttttttctagcagcgtactaatttttatcttttatttcaaacccta

SEQ ID NO: 221291 - DNA, 2537 bp, Zea Mays
tttgcctcaggcagtacaaatagcgcgcctcatccgcgccgcccccgcgctttttctctctgctgacgccgccgccgccgggagccgtaccccgggagagccccccagcccttatcaaaccctaaatcaaaaactatccaaaaaaatccgcaaaaaactagaaaaaatcccaaaaatcaccacttgattggagatggcggcgcaagggcaggcggcggctggatccgcgtccgagtctggcggctcaccggctgcctcagctgctgcagcggcggcggctgcgttcccggcgacttctctctacgtgggtgacctgcacgagagcgttcaggacgcacagctcttcgacgtcttcagccaggtcggcggcgtcgtctccgtgcgcgtctgcagagacatcaactcccgcaagtcgctcggctacgcctacgtcaactacaacaacactagcgacgctgcacgggcacttgaactgcttaacttcactcctatcaatggaaagcctatcaggatcatgtattctaaccgtgaccccagctcgcgcaaaagcggtgcaggaaatatatttattaagaatcttgataagtcaatagacaacaaagctttatatgacacgttctgtgcatttgggaatatcctttcatgtaaaattgcaacagacccctcaggagaatcaaggggatatggttttgttcagtttgagatggatgaatccgctcagtctgccattgataaactcaatggtatgcttatcaatgacaagaaagtgtatgttggaccttttgttcgtaagcaggacagggaaaatgtctcgaacaatatcaaattcagtaatgtgtatgtgaagaatctgtccgatactgttactgatgatgagttgaaggagatgtttggaaaatatggaaccataacaagtgctgttgttatgcgggatagtgatggaaattctaggtgttttggatttgtcaattttgaaaatgcagatgctgctgctcaggctgttcaagagttgaatggcaagatattcaatgataaggaactgtatgttggaagagcacaaaagaagtctgaaagagagatggagttgaaggagaaatttgaaaagaatattcaagaggtagctgagaagttccaaaacactaacttgtatctgaagaacttagatgataacattgatgatgaaaagttgcgtgaaatctttgctgagtatggcaatattacttcttgcaaggttatgcgggattcttatggtgttagcagagggtctggatttgtttctttcaaatctgctgaagatgctaaccgagctcttaccgagatgaatggcaaaatggttggaagcaagcccctttatgtagctcttgcacagcgtaaagatgacagaaaggcaaagctacaggcacagttttcacaaatgcgtcctgttgcaatggcaccttcagtaggtcctcgcatgcccatgtttccacctagtgttcctggagttggtcagcagctgttttatggtcagccacctccagccttcatcaaccctcaggctggatttgctttccagcaacctatgatgcctggtatgaggcctggtggtccaatgccgaactttatgatgcctatggttcagcagggacagcaaccgcaacgtcctgctggtaggcgtgctgggtctggtggaatgcagcagcccatgccaatgggtagtcagcaacagattccctagaggtggtcgtggctaccgctatgctactggacgtggaatgcctgatcctggcatgcataatgttggtgctgtgatgccatctccatatgagatgggagggatggcaatgagagatgctggtgtctcacaacctgttccaattggggcactagccactgcgcttgctaacgcctcaccagatcagcaaagactgatgcttggtgagaacctgtatcctcttgttgaacagctggagcgtgagcaggctgccaaggtcactggcatgcttttggagatggaccagacggaggttcttcacctgctggagtcgccagatgctctcaaggctaaggttgctgaagccatggaggttctccgctcagcccagcatctccagcagagcaatgcctccaccgagcagcagctggctaatctatcactgaatgatggcgtcctctccagctgaatgtttctgatgattcagaaattgctggcaatttttgcttgatacctatctctagaatgcaattactttgtttactttattggaattttaggtgctgctctataattagctgaactagggggtggatttaattgccttgaattggttattttggttatatgaatatgttatgtcggagctcaggtctgtcattttggtatatggttatgttagcccttgtccgtttatcacccgaattatcacagattgaattttagagcgtcattgcttttctagctgatattttgttaagcaactcgttgcctcgagatgatcgattaggctatgatttttttctagcagcgtactaatttttatcttttatttcaaacccta

SEQ ID NO: 221292 - DNA, 499 bp, Zea Mays
gggggggcctcaaaaagaactcgaatttgacgggatgccgtcgacctcccagttgtcgttgtcctcgtcccgagccttggaggtcgcgtcggcgtcttcttctgggaacctcggctcgtccatcatacgcctgcgacggttgcggcgtccggcctcgcgcgccttgcgcttcttctcgtctgtcttgctctcgtacctccggcggcgcttgatctcctgcagcacgccggcgcgcatcacctcccgccggaacctgcgaaagatggactcctccccctcgttctcgtccaccaggatctgcacattgaaccccttggccgccaccaccgccgtcggcgcccggcgcgccacgtgcaccacggacggcggcgagctcttccccgagaacggagcgagcggtagctgcagcagcgtgctcagcagggagctcgttgcgggggcggccatggctgctggcctgctgcgagttcgtgggtctcggttctgcgttcttggatag

SEQ ID NO: 221293 - DNA, 487 bp, Zea Mays
cggccaaaacgcaaatatacggatgccgtcgacctcccagttgtcgttgtcctcgtcccgagccttggaggtcgcgtcggcgtcttcttctgggaacctcggctcgtccatcatacgcctgcgacggttgcggcgtccggcctcgcgcgccttgcgcttcttctcgtctgtcttgctctcgtacctccggcggcgcttgatctcctgcagcacgccggcgcgcatcacctcccgccggaacctgcgaaagatggactcctccccctcgttctcgtccaccaggatctgcacattgaaccccttggccgccaccaccgccgtcggcgcccggcgcgccacgtgcaccacggacggcggcgagctcttccccgagaacggagcgagcggtagctgcagcagcgtgctcagcagggagctcgttgcgggggcggccatggctgctggcctgctgcgagttcgtgggtctcggttctgcgttcttggatag

SEQ ID NO: 221294 - DNA, 2267 bp, Zea Mays
ctcagagccacacagcgagcgcgagcgagaggcgcgctgttgcggaaatgccgctcccggcgttcctggcggcggcggcgaggctcgccgtcctgctggccgccgccgtgactgcggccaacgcggtctccttcgcgcgctaccggcgccgccacctccgccgcatccccaaccccatcgacgagtccgccgaccccgtcgccgacttccgcgccctccgccccgcctcggccgaggacgccgcagcgaccgcgccggcacatgtggaggacaggttggaagacgcttggcttcagtttgcggtggagcactcctgcgacgacaaggaggccatgcgcgaccctacgacagcagatgcggtgatggcgtccgctgcaggggacggaggtgctcagttggcttctcgtaggtcgtccagaggggatgatgatagggatggtgatggagagttgaggaagcctcttaagatcgccatggaggcgatgctcagggggtttgaaatgtttgctgagggtggtgagtcaggttctgctgctgctgctggtgacagttgcagccacaacgttgcggcttggcacaatgtcccttgcccgtaagtcccaaccgtaccttatgttgtctgctcaactgttgtagatgttgtcccaagtcccaacccttctgtttgtctgacatttggacaatccaggcaagaaaggcttaagttttggtctgatcctgatactgagttgaaacttgctaaggaaactgggatcagtgttttccgcatggggattgattggacgagggtaatgccgaaggaaccaatcgaagacctcgagagctcagtcaattttgcggcgctcgagcggtatagatggatcgtccaaagggttcgtgactatggaatgaaagtgatgcttacgctgtttcaccactcgcttccaccttgggccggagaatatggcgggtggaggatggaaaaaacggtcaagtactttctggactttgtgaggcttgttgttgatcgtgtatcagatttggtggactactgggtggttttcaatgaacctcatgtgtttgtgatgctgacctattgtgccggtgcttggcctggtggtgaccctaatgcaatcgaggtagcgacgtctgctttgccgactggtgtatacaaccaagcattgcattggatggctattgcacatgcggaagcctacgattacatacattcaaaaggcgaaagtaaaaggaagccggtcgttggtgtcgctcatcatgtatcatttacacgaccctatggtctgtttgatgttgccgctgtcacactggctaattcattgacccttttcccttacatcgatagcatatgtgacaaattggattttattggcatcaactactacgggcaggaggtgatatcaggccctggcctaaagctcgtggacaatgatgagtacagcgaatctggtcggggtgtttatcctgacgggctgtttcgtattctgattcggtttaacgaacgatacaagagcttgaatatacctttcgtagttactgaaaatggagtttctgatgagactgatctgatccggaaaccatatattctggagcacctgttagccatttatgctgcaatccttatgggtgtgcctgtgcttggttatctattctggacaacgtcagataattgggaatgggcagatggctatggtcctaagtttgggcttgtggctgttgatcgtgctaacaacatagcacggaaacctaggccatcatactatttgttctctaagattgttacaactgggaaaatcacaagacatgacaggttggctgcttggagggagctgcaacaggcagcgtttcagaagaaaacacgcccgttttttagggcagtagataaacatggccggatgtatgcagggggtctggatcggcctatccagagatcattcatattgcgggattggcgatttggtcattatgaaatggaaggcttgcaggatcctttcagccgatttataacatccattatttcaacaattttgtggaagaagaagatcagttacattgaggatgaggatatttcttattctctttcttgttgatgcttcttactctaggtgttatgtctaagagaatttgaggtcccatttttttttactttcactgtatatggcctgtataaaattgtttgcccttatttttatatgtaagtagcatgattcgtcctctagacaaagtaaatataaagttctagaaagtaaaagtttctctttatggataaa

SEQ ID NO: 221295 - DNA, 1886 bp, Zea Mays
catctcttccccacgcacacaacaaaagatctcagagccacacagcgagcgcgagcgagaggcgcgctgttgcggaaatgccgctcccggcgttcctggcggcggcggcgaggctcgccgtcctgctggccgccgccgtgactgcggccaacgcggtctccttcgcgcgctaccggcgccgccacctccgccgcatccccaaccccatcgacgagtccgccgaccccgtcgccgacttccgcgccctccgccccgcctcggccgaggacgccgcagaagatgacagcttcttctttgggctagcgaccgcgccggcacatgtggaggacaggttggaagacgcttggcttcagtttgcggtggagcactcctgcgacgacaaggaggccatgcgcgaccctacgacagcagatgcggtgatggcgtccgctgcaggggacggaggtgctcagttggcttctcgtaggtcgtccagaggggatgatgatagggatggtgatggagagttgaggaagcctcttaagatcgccatggaggcgatgctcagggggtttgaaatgtttgctgagggtggtgagtcaggttctgctgctgctgctggtgacagttgcagccacaacgttgcggcttggcacaatgtcccttgcccgcaagaaaggcttaagttttggtctgatcctgatactgagttgaaacttgctaaggaaactgggatcagtgttttccgcatggggattgattggacgagggtaatgccgaaggaaccaatcgaagacctcgagagctcagtcaattttgcggcgctcgagcggtatagatggatcgtccaaagggttcgtgactatggaatgaaagtgatgcttacgctgtttcaccactcgcttccaccttgggccggagaatatggcgggtggaggatggaaaaaacggtcaagtactttctggactttgtgaggcttgttgttgatcgtgtatcagatttggtggactactgggtggttttcaatgaacctcatgtgtttgtgatgctgacctattgtgccggtgcttggcctggtggtgaccctaatgcaatcgaggtagcgacgtctgctttgccgactggtgtatacaaccaagcattgcattggatggctattgcacatgcggaagcctacgattacatacattcaaaaggcgaaagtaaaaggaagccggtcgttggtgtcgctcatcatgtatcatttacacgaccctatggtctgtttgatgttgccgctgtcacactggctaattcattgacccttttcccttacatcgatagcatatgtgacaaattggattttattggcatcaactactacgggcaggaggtgatatcaggccctggcctaaagctcgtggacaatgatgagtacagcgaatctggtcggggtgtttatcctgacgggctgtttcgtattctgattcggtttaacgaacgatacaagagcttgaatatacctttcgtagttactgaaaatggagtttctgatgagactgatctgatccggaaaccatatattctggagcacctgttagccatttatgctgcaatccttatgggtgtgcctgtgcttggttatctattctggacaacgtcagataattgggaatgggcagatggctatggtcctaagtttgggcttgtggctgttgatcgtgctaacaacatagcacggaaacctaggccatcatactatttgttctctaagattgttacaactgggaaaatcacaagacatgacaggttggctgcttggagggagctgcaacaggcagcgtttcagaagaaaacacgcccgttttttagggcagtagataaacatggccggatgtatgcagacttcttagagtcgagagtgatg

SEQ ID NO: 221296 - DNA, 1052 bp, Zea Mays
gtctgagtccatcattcacacccaggaagcctctccaatctgacaacacttctcacagtcaagatgatgactcatattctgtcacttcttcaactgtaacttcagcaagagctgggaaaactaagaagacaactgttgctgttgcacctacattcgtctgtgctaatcgtgctgagaagagaggagagttttacacaaaattagaagaaaaacgcaaggctttggaagaggagaaactccaagcagaggccagaaagagggaagaggaagaagaagctctaagacaactgaggaagaacttggtcgtccgagcaaaacccatgccaagcttctaccaagagggacccccaccaaaggttgaacttaagaaggtgcctccaactcgtgccaagtcaccaaaattgacacggagaaagagctgcagtgaaacccctcatacaccagagggaggaaatggcagtgcagtatgctgccggttgcatcgccacagcattgggaacgccagagatgttagcagcaaggcacaatgttctccaaagagcgcctcaaaggctggatcagctactagatccagggtcaccaaatccagggaagacctgaaggcttccgtgaagaaagtgggactgccaagcgccgcgaacttcgctgtacaaacctaactcatcaggcattcactcccatatgccatttttcattttaatttatacctcacatcaccaaaaagatggcctcgtgttatttttgcattgtccttgtaagaacctggctaccagagacctgcgctgttcccgtcctgtaaatttgttgaaggttttgtaagggggtaaccgagtcagtcctgtgagaaccaagcgggtgggcagctgatgggatattggagtgacatattgtcgttgtgtggcggcattcgcgcgttctatgtattgtatctgagctgtaacttattgtggacattggcaaagcgattctgattgttgtcgcaaaatttgatcaggtcgtgtttcgaacttttaatcaggtatccttatgaattggaaactgggttgtgtttt

SEQ ID NO: 221297 - DNA, 717 bp, Zea Mays
atggggttcgtgtccttcgtcgggcgggtgctcttcgtcgccgctttcctcctctccgcctaccagggtttaatgaatttggcgctgatggtgggccagcagctaaggcccttcagcccaagttcaatgtgtttgtaaaaaatatctctgcacatctgggagtagctgtgccgcacattgagttgaagcatgtgattgctgctacaattgctcttaagggacttggaagtctcctttttattttgagcagctccctcggtgcttatctcctgctgctgtacctcgctctgatcactcctatcgttcacgacttctacaactacgacacggagaaggaagaattcgcgcggctgtttgcgaagttcacccagctctcctcgtcttcctgggcatgaagaactccatcccgaagcggcagggcaagaagaaggctcacaaggcgaagacgaactagtaggaggctgctcgctctttctttagatggttgcgcgccggcctcaggcgggtgtcaggagacgaataggcccactagtgcgaagcagtcgtcgatgcgcatcgagctgccggctgcgcttttacatgtatcggatattcagattccattttgcggggcgcggcccgaacgaaggtgtgactagtgagcggcccgaacgaaggtgtgactagtgagcggcggtcatgtatgtgattgcgattggttggttggtttcttgaact

SEQ ID NO: 221298 - DNA, 5023 bp, Zea Mays
tcccatcccctcctcacaacaccccccacagcccccaaatgctcctccacgcctccgcttcccgtcgccggctcccaaaaccctagcgcccacgccgcctcgatgtcgcctccgccggcggtggcgacgggcggttccggagaacccacggtgccggcgtggctccgcggcctcccgcgcgccccggagtaccgccccacggagtcggagttcgccgaccccatcgccttcctctcccgcgtggagcgcgaggccgccgcctacggcatctgcaaggtcatcccgccctacccgcgcccctcccgccgcttcgtcttcgcgcacctcaatcgctccctcgtctcctcctctgaagccgccaaccccaccactgcctccggctcctccgccactgccccctcgctgccggaatccgccgctgtgttcacgacccgtcaccaggagcttggcacgccgcggcgtgggcgaccgcctccgcaggtgctcaagcaggtgtggcagagcggcgagcggtacacgctcgaccagtttgaggccaagtcccgcgccttctccaagatccacctcgctgggcttcgcgagcctactccactagaggtggaatcccttttctggaaggcgtccgctgacaggcctatctatatcgagtatgcgaatgacgttccggggtctggctttgccgccccaaaacagtcccagcggcacaagaaacggagacgagagagcgatcaggtggaagagggggagaaaggctctgggtggcggctctcaggaagcccatggaacctccaggcgattgcgcgggctcctggttcgcttacgcgattcatgccagatgatgtgcctggggttacctcgccaatggtgtacatcgggatgctctttagttggtttgcatggcatgtagaagatcatgaattgcacagtctcaacttccttcacaccggtgcacccaagacatggtatgcagtccctggggaccgagcctcagagctcgaggaagttattcgtgtacatggatatggaggaaaccctgaccgccttggtatttgtcctttctcatgctcgccgtctgaatgtttcggttgtggtctagcaggtacaagctctgaaatggccagcgtttccattgggtcaaatgttcatgatattattcagacatcagattcttatgaattctttgctgatatgtactgtttcagctttattgaattgattgtgatgtgctatttgttaactatgtttattccagctttgctagattttcaccttcatggatttaattgtggtgaagctgccaactttgcaactccacaatggttaaaatttgctaaagaggctgccgtacgaagggctgtgatgaattatcttccgatgctctctcatcagcagcttctgtacttgctagcagtttcttttataaccagaaccccaaatgtattgtctggaattcgttctcgcttgagagatcggaaaaaagaagaaagagaactgctggtgaagcaggaattcttgcaggacatgattagtgaaaacaagcttttgtgttctttcctggaaaagaaatcaattcgtcatgttgtgctctgggagcctgacttgttaccatcttcgactgctctacattcctgttcttctggctcaaaagctcctgagaagaagtctgaggatggttgcagaattgaatctagtgaacgtggcaccaaagataacagctctgatggcagtgcacatatgattggcgcacaaactaaatttatgtccgggaatagcaaatcatctggaactgcatctgcttccatggatgaggtcaatgctgatactgatgatgaggatgacctaccttttgatttgagcattgattctgggtcattgacctgtgttgcttgtggaattcttggttatccattcatggcaattctgcaaccttcaagagaagtattggaagggatttcccttgctcacacgagtagatacaagatgagttctgaaaaagataattgttcaaacacaattccatgctgtcccactgacagtaagtttggatgttcatttgttcccagtagaccttcttggcctgcggaacagcaatgtctggctactcctttggggcaagctaacatcagtcatcagaatgtaaattcacataaagatgtttgtttaagggagaatgaacctaatgggcctgtgccacaatgtaacaatatttcacattcttgcagaagtgaaaatactcttcattcatgtagtgacaggggaaaatccgagaataagatttctgaggacagtcttggcccagaagtaggtgaacaaacaggcaaatatgtcatcaatgcgcaagctgcagaaagttctgatggtactattaactggaatacttattgtacatttgcacggccccggatcttttgcctgcagcatgcccttgagattgaaaagttgcttgagggcaaaggcggtgtccatggtctcattatttgccactcaggaagatggaagagactggacgtcacagatgggtctaaacctgaaatattctgccaaactcaggaaagagaaatcagaaaatcaagaacagtctcctttgccatttgggggactgctttcctgcccttcgcctgtttcggttgttcctaatcttaagtggctttgcaaaagagcgcggacaccatacacagttattggtactatgaggggttctagtgcaacagcaactgctgcggaacttaagcctggagtgaaaacagaaatattcactaatggaaatgtttgcgaggatgacaatagacatcattcttttcgacaaactggcctcgagcaaccaggtggactgcaagattgtgataagccttcatgttccgaggagaatggccatggaagacattgtcttgttaacattcctatcgctgttgctgaatatcctatgatgcatcaagtccgtgagggtccagtgagtgttagcacgtgcaatgactccatttgtttgtcaggttccctggatttacctccacacgcctctccagttgaagtaactagatacctaggatgtatacagtcaactgagctgagcagtttaccagccttttctgttcaacatttctttaatgatgaaagtacctctgtggaaggaagcatagactgtgtaagcaatggctgcttagaatctcaggatgatattttagggagcagagatgaacgtttgcaagttcaacaatatcaagagaagatggggcttcgcaataaccccaatatgaagtcagttgattcacacctgatagaaggtttggctgtatcagaaggaaagcatggggaaactgtggcagcattccttgaaaacaaggagcgttgtgctaagacatcctactgttctaatactgaaacaaaaactactaaatctgcaatagacaatcgattggagactcatcatctgggtactggtccagtgaaactaaattcaagctttaatgagatgcacagtgctgatagacaatgcagtttagtctttggctgccttgactcagctgatgttcctgcttcaactcaggctctgtcagtttcacctgttttgatgagtgacgagcagcaggtcgatgacgcccattctgctgtcaaggccattgagcacctgggcaataatctggctaacataaagcacaaatccctgcatatggatgtcctcatgttagaggacgcccaagttgcttccatggctgcagtccctgggcatgagggagaatctgtcgaggctggatcaaattcttttgatattttacttggagctctggctgaagagtccaaggcagcagatgctcctgggaaagatgaagttggcaaagcttccttgacattaataacactggctagcaacgagccctctgttacagaaggcagagttgtagacgtggtggaaacagacacaattttgggagcaggaaaagatgataaacaacttgaccagccacatggcttccatttgtcagatctggtgtctagatgcatcgggagctcaaatagatccgatatcatatgctatgtcagacgcaaacacaaaaggaagagggattactcgtgtttcgtccgctctccctgtgagagcttgaggccaaggtccaagcctgcagtagtcgaggagtcggaatggagcagaacagccgaggcttcttttgctaaaaggggtaagaggacacaagcagtgggatcatttcagtgtgatattgatctgtgtgacatggcatttgagactagggccgaactcaatgcccacaagcgcaatatttgcactgacgagtcatgtggcaagcgtttcagctcacacaaatacttgaagcgacatcagtgtgtccacagcgagatgaggccatttaaatgcccctgggaaggttgtaaaatgaccttcaagtggttgtgggctcagactgagcatgtcagagtgcacactggagagcggccatacaagtgctcggctcctgactgcgggcagacattcagatacgtatcggattacagccggcacagaaagaaatttaaccattactgacagcttctagttttccgagttattggccgcagctcggggcaaatctccagctgcttgtgtcggtgggccttgtttgttgtagtagctcagctcacgtatttattaacaacctgacagctgataggcctagtgaatgttccccgttaacaatgggctagtaatttagtcggtgtaggagttagaaattgttggggggtgaagtgcaacccccttctgttggtgtaggtttgcataagctgatcaccccccactgacacgtggccattcattatttgtttctcagatcagtgatgatgtatttaatccctgatgacaaacttcatgaacactgaaaccatatgatgtcggatgtcaaaatgatcaggggttgccaccgtcctcatgtaattcctgtcttcgacacattgtccaggtcctcattattctgtcatactgtttcagcagattacttgtatgcctttgtctacgcgaaatctaatcattttt

SEQ ID NO: 221299 - DNA, 3849 bp, Zea Mays
ctggagagtttgtggtgacattcccaagggcataccacattgggtttagtcatggatttaattgtggtgaagctgccaactttgcaactccacaatggttaaaatttgctaaagaggctgccgtacgaagggctgtgatgaattatcttccgatgctctctcatcagcagcttctgtacttgctagcagtttcttttataaccagaaccccaaatgtattgtctggaattcgttctcgcttgagagatcggaaaaaagaagaaagagaactgctggtgaagcaggaattcttgcaggacatgattagtgaaaacaagcttttgtgttctttcctggaaaagaaatcaattcgtcatgttgtgctctgggagcctgacttgttaccatcttcgactgctctacattcctgttcttctggctcaaaagctcctgagaagaagtctgaggatggttgcagaattgaatctagtgaacgtggcaccaaagataacagctctgatggcagtgcacatatgattggcgcacaaactaaatttatgtccgggaatagcaaatcatctggaactgcatctgcttccatggatgaggtcaatgctgatactgatgatgaggatgacctaccttttgatttgagcattgattctgggtcattgacctgtgttgcttgtggaattcttggttatccattcatggcaattctgcaaccttcaagagaagtattggaagggatttcccttgctcacacgagtagatacaagatgagttctgaaaaagataattgttcaaacacaattccatgctgtcccactgacagatgttcatttgttcccagtagaccttcttggcctgcggaacagcaatgtctggctactcctttggggcaagctaacatcagtcatcagaataagtgaaaatactcttcattcatgtagtgacaggggaaaatccgagaataagatttctgaggacagtcttggcccagaagtaggtgaacaaacaggcaaatatgtcatcaatgcgcaagctgcagaaagttctgatggtactattaactggaatacttattgtacatttgcacggccccggatcttttgcctgcagcatgcccttgagattgaaaagttgcttgagggcaaaggcggtgtccatggtctcattatttgccactcagactttgtcaaactaaaagcacttgcaatatcagtagctgaggaaattgagtttcaatttgattgtacagacatttcacttgcaaaagcatcaaagtctgatttacatctgatcaatatttcaattgacgacgagggacatgaggaagatggaagagactggacgtcacagatgggtctaaacctgaaatattctgccaaactcaggaaagagaaatcagaaaatcaagaacagtctcctttgccatttgggggactgctttcctgcccttcgcctgtttcggttgttcctaatcttaagtggctttgcaaaagagcgcggacaccatacacagttattggtactatgaggggttctagtgcaacagcaactgctgcggaacttaagcctggagtgaaaacagaaatattcactaatggaaatgtttgcgaggatgacaatagacatcattcttttcgacaaactggcctcgagcaaccaggtggactgcaagattgtgataagccttcatgttccgaggagaatggccatggaagacattgtcttgttaacattcctatcgctgttgctgaatatcctatgatgcatcaagtccgtgagggtccagtgagtgttagcacgtgcaatgactccatttgtttgtcaggttccctggatttacctccacacgcctctccagttgaagtaactagatacctaggatgtatacagtcaactgagctgagcagtttaccagccttttctgttcaacatttctttaatgatgaaagtacctctgtggaaggaagcatagactgtgtaagcaatggctgcttagaatctcaggatgatattttagggagcagagatgaacgtttgcaagttcaacaatatcaagagaagatggggcttcgcaataaccccaatatgaagtcagttgattcacacctgatagaaggtttggctgtatcagaaggaaagcatggggaaactgtggcagcattccttgaaaacaaggagcgttgtgctaagacatcctactgttctaatactgaaacaaaaactactaaatctgcaatagacaatcgattggagactcatcatctgggtactggtccagtgaaactaaattcaagctttaatgagatgcacagtgctgatagacaatgcagtttagtctttggctgccttgactcagctgatgttcctgcttcaactcaggctctgtcagtttcacctgttttgatgagtgacgagcagcaggtcgatgacgcccattctgctgtcaaggccattgagcacctgggcaataatctggctaacataaagcacaaatccctgcatatggatgtcctcatgttagaggacgcccaagttgcttccatggctgcagtccctgggcatgagggagaatctgtcgaggctggatcaaattcttttgatattttacttggagctctggctgaagagtccaaggcagcagatgctcctgggaaagatgaagttggcaaagcttccttgacattaataacactggctagcaacgagccctctgttacagaaggcagagttgtagacgtggtggaaacagacacaattttgggagcaggaaaagatgataaacaacttgaccagccacatggcttccatttgtcagatctggtgtctagatgcatcgggagctcaaatagatccgatatcatatgctatgtcagacgcaaacacaaaaggaagagggattactcgtgtttcgtccgctctccctgtgagagcttgaggccaaggtccaagcctgcagtagtcgaggagtcggaatggagcagaacagccgaggcttcttttgctaaaaggggtaagaggacacaagcagtgggatcatttcagtgtgatattgatctgtgtgacatggcatttgagactagggccgaactcaatgcccacaagcgcaatatttgcactgacgagtcatgtggcaagcgtttcagctcacacaaatacttgaagcgacatcagtgtgtccacagcgagatgaggccatttaaatgcccctgggaaggttgtaaaatgaccttcaagtggttgtgggctcagactgagcatgtcagagtgcacactggagagcggccatacaagtgctcggctcctgactgcgggcagacattcagatacgtatcggattacagccggcacagaaagaaatttaaccattactgacagcttctagttttccgagttattggccgcagctcggggcaaatctccagctgcttgtgtcggtgggccttgtttgttgtagtagctcagctcacgtatttattaacaacctgacagctgataggcctagtgaatgttccccgttaacaatgggctagtaatttagtcggtgtaggagttagaaattgttggggggtgaagtgcaacccccttctgttggtgtaggtttgcataagctgatcaccccccactgacacgtggccattcattatttgtttctcagatcagtgatgatgtatttaatccctgatgacaaacttcatgaacactgaaaccatatgatgtcggatgtcaaaatgatcaggggttgccaccgtcctcatgtaattcctgtcttcgacacattgtccaggtcctcattattctgtcatactgtttcagcagattacttgtatgcctttgtctacgcgaaatctaatcattttt

SEQ ID NO: 221300 - DNA, 921 bp, Zea Mays
cgaggctgcgcggcactccgctgatccgctccgctccgctccaacacccctacgcggacacgcgtgttgtcatcaaaaatgaaaaaacaaaaccacgcgcgccacgtggccgtggctggcggcccctcgccgcagcccggcacgccgcccgcccgcgctagccggccatcaaccgcatctgaaaggaggagtccacctgacgccgcccgcctcctcgtcaccccgtttcgcttcgccttccttcccctctctccctttattcctatcggcgctcggccaccttcccgcaccaacccactcgcccccgcattcccgggtgcctcgcttcgctttgcgcgcgattcgatccaggcttctttggttggaggcatggcctcgtcgcccgcgagcagctacgactgctccttcaaggtcctgcttatcggggattcggccgtcggcaagagcagcctcctcgtcagcttcgtctccgccgctcacatcgacgacgacatcgcgccaaccataggggtggattttaaaatcaattttctcagtgtgggtgggaagaaactaaaactgacaatatgggacactgccggtcaagagaggttcaggacaattaccagctcttactacaggggtgctcatgggattattttagtttatgacgttacaaagagggagagtttcacaaatttggctgatgtgtggaccaaggaaatagagttacactcaacaaataaggaatgcatcaaaatgcttgttggaaataaagtggacaaggatgaggacagaatggtgacaaaagaagaaggtcttgcatttgcacaagaacgtggatgtctctttgtcgagagtagtgctaaaacaagagaaaacgtggaaaaatgttttgaagagcttgcattaaaggcaaaatgtaaatgccttctgctggtg

SEQ ID NO: 221301 - DNA, 1401 bp, Zea Mays
cccgaagtggattcgagtttccatactagcccggaaggtttctggtttggttagccacgcttggttcgttgggggtgcccagggcaagcaaaccgtctcctcactcacatggcaagaatggcgtgccgagtggcgctcttcgccaccgtcctcctgtgcgcggccgcgggggtggccctgggggcgaagcgggcgcccatcccggacgacctgcgcgacgtgatagacgaggaggaggacgacgagtggcgccaatatcgcgttccctcgtcgcggggcccgggccgtggcgacggcccgccgcctgacctttcacggatggatccggccgccctccaggccgagctcctccgcgggcaaaccggcccgtcgttcggcttcgtgaagctccgccccggcaccacccgctcacgggagcatgtggtggggatcgcgaggaggtggagcaatgtgctgcggacgggatcggtggacgccagattcacggcggttaatttcgtaacgctcatgttcaccatggagagagggcgagacattctagagctgaaggagtttgtcctgagtcaggctgaggcctacgagttgaggatcggcgatcaagttttccgcaggcctggagacccacccttggaccaagttctccgtaagccacggaagaagaagcgccgcaagtctagagacgagctgtagattcatttgctaatcttgttctacatctcatgttcgttcgttcgttctttctctttcgtctacttcagttttgctctcatagcagtttttaccttgcgctgtgtgtcagaatcacagggagtagtggtcctccttgcctaatgggggggaagagttaataaggcctaggccaaaatgttaaagaaaaacaagtgtacgcgcatcaggcgcgcggaaagacagtaattgccaaacgtgttgcctcctgctacgcacaaacatcgtgtttcttctttgattttcgccattgctgaggttggtagccgatggctgacgtcatttggaacacccgctgtccccttgccgtccgttctgatgaatgcaatgcaagaaggcagccgtccgtgatcagggtcgtcttcacctgatggtagcccgttgctgcttgtcggcccgtttcctgcagtccgctgtgtggcctttcgtagagggctaggctagaggctgtcaggatctccggaccaacagcaacgtcattgcccgtcactcaaagagcggcgccgcgaggaccctgggcaacaaccattcatgttcattgaccagattgggttcacgtgttcagttctcgacacgtgcctctagctagctacaacgattgaggttggaggagcacaatatagtgttgcagggaagctcacttgccccatttacacatataaacacgtactccag

SEQ ID NO: 221302 - DNA, 1306 bp, Zea Mays
ctctaatcccctttaatcccgaagtggattcgagtttccatactagcccggaaggtttctggtttggttagccacgcttggttcgttgggggtgcccagggcaagcaaaccgtctcctcactcacatggcaagaatggcgtgccgagtggcgctcttcgccaccgtcctcctgtgcgcggccgcgggggtggccctgggggcgaagcgggcgcccatcccggacgacctgcgcgacgtgatagacgaggaggaggacgacgagtggcgccaatatcgcgttccctcgtcgcggggcccgggccgtggcgacggcccgccgcctgacctttcacggatggatccggccgccctccaggccgagctcctccgcgggcaaaccggcccgtcgttcggcttcgtgaagctccgccccggcaccacccgctcacgggagcatgtggtggggatcgcgaggaggtggagcaatgtgctgcggacgggatcggtggacgccagattcacggcggttaatttcgtaacgctcatgttcaccatggagagagggcgagacattctagagctgaaggagtttgtcctgagtcaggctgaggcctacgagttgaggatcggcgatcaagttttccgcaggcctggagacccacccttggaccaagttctccgtaagccacggaagaagaagcgccgcaagtctagagacgagctgtagattcatttgctaatcttgttctacatctcatggggggaagagttaataaggcctaggccaaaatgttaaagaaaaacaagtgtacgcgcatcaggcgcgcggaaagacagtaattgccaaacgtgttgcctcctgctacgcacaaacatcgtgtttcttctttgattttcgccattgctgaggttggtagccgatggctgacgtcatttggaacacccgctgtccccttgccgtccgttctgatgaatgcaatgcaagaaggcagccgtccgtgatcagggtcgtcttcacctgatggtagcccgttgctgcttgtcggcccgtttcctgcagtccgctgtgtggcctttcgtagagggctaggctagaggctgtcaggatctccggaccaacagcaacgtcattgcccgtcactcaaagagcggcgccgcgaggaccctgggcaacaaccattcatgttcattgaccagattgggttcacgtgttcagttctcgacacgtgcctctagctagctacaacgattgaggttggaggagcacaatatagtgttgcagggaagctcacttgccccatttacacatataaacacgtactccag

SEQ ID NO: 221303 - DNA, 1729 bp, Zea Mays
ccaccgaccaccgtctccgccgtcttcgcttcgccccccaccccgcgaccgaccagcgccatgcgcatccgccgctacgccgcgcgcctcctctccgccaccaccgccgccccctcctcgccgccgcggccgcccgccgcgtcctggctccacaccgacgacgacgacgactgctgcgccttctgcgagctcagccgcccggccccgcaggagggccaggacgccgtcaagcacaaggggcacattgccggccgggtgccggaatccgatgtcagagccgatgagcgcgtcggcctacaccagcgaccgcctgctcccgaagttaaaaaatgcaagattgatcatgtacctcctgtggataaatcttctgtcgggctgcaagttgtgaaatgtgcttctgaggtcagtggagctgtggcgaaaccagaaggtggtactcctgctagcgaagctgctgctggtcctgcagcgaaagctggtgcttttgttgtcaacgatgctgctagtgaacagggagttcaatgtatagcttctccactgggtggtgcctccaagctggaggaggttacagcagggaattcttttgcgaatgggccaaccactgaattaggagttttcaagggtgcatcccttgctaatgaattggctgatgtgccaggggttacgagcattatgccagaagttataggcaaacctagtactgacccaggggctataaccaccgtggtggaagttagtgatataggttctgtcgttcatgaaaccactgaactggaatctgcaggggaggattatattgccagtgaagctgctgctgaaccagaagatgctggcagagcttcttgcaatacagatgatactgctgctttagatgagccactgccgcctagttgtgatccgaacataggcaatgcgcaggttggaaatgcgatggacaccgttgccagtacagtgcggccttctcgatgtgatgctgcagaagaaggtgcttctgtgaattctacagccaatggtcctgttagagccagaggaccaaccgttaagggaggagtgcccaaggataaatctgttgcacccagtgttttacgtgtattggacgtagtgactagaagcattggtaaatcagggagaacagatgttatttgttatgctaggcggacaggtaagaggaagccagagctgcaggaagtgaagacggaaaatattgacttggaagatggtgttctatgcgagaaagaggaggcactgttgagaactgattgttgtgaaagtgtcttgtcaacagccgggtccatagatgttaaacttgccgacataaagaaagaccttatggataattcagctgcaagcaaggttacaaagatgaagagaaatatatttgaatgtaaaattgattactgccacatgacattcaagacaaaagctgagcttgctgcccacaagaagaacatgtgcacagtcaactcatgcagcaagcatttcagatcccacagttacctgaggcgccacgagagcgcacacaacgatgatatgccttacaagtgcccatgggatggttgtaatatggctttcaagtggtcatgggaccgggctgagcatttcaaggtccatgctggggccaagccttacaaatgcatgacgcctggatgcagcaaaatgtttaagtttgtttcagatttcacccggcataggaggaggtgcaaacctcagaggtgtcgcctcgccttac

SEQ ID NO: 221304 - DNA, 1391 bp, Zea Mays
tcagtttcatgcaataaataatactatagtgtgtcatatacaattataaactatagtatttcaaaactaccgcatttcaaaattgaattaccaaacttgtccttagtctctcttttaactttactctataaacatttttactgcgaactctacttttcttgcggagtaagaagagtggcggcggcgggccggcggcgtgtataggcgtgttcccgagcagaggcccccccaaacgcgcagcgcacacaaacacacaccagcccagctccgagagatcatccggcggccggcgagatgagccgcggcacgggcgcgggttatgaccgccacatcaccattttctcccctgagggacgcctgtaccaagtcgagtacgcgttcaaggcggtgaagtcggcgggtgtcacgtcgatcggcgtccgcggcgcggactccgtctgcgtcgtcacccagaagaaagtcccggacaagttgctggatcagacgagcgtgacacacttgttcccgatcaccaagtacgtcggattgcttgccactggcctcacagctgatgcaaggtcattggtttcccaagcaaggaacgaagcagctgagtttcgtttcaaatggggctatgagatgccagttgatgtgttagcaaaatggattgctgacaaagctcaagtttacacgcaacatgcatacatgagaccccttggagtagttgctatggtcttgggctacgacgaagagaaaaatgcacaactattcaaatgcgaccctgcgggtcacttctttggacataaggcaactagtgccgggctcaaggagcaggaagcaataaatttttggagaagaaaatgaaggatgacccgaaattctcctatgatgaatactgttcagattgcaatatctgcattgcaatcagttctccaggaagatttcaaggccactgagatcgaagttggtgttgtgagaaaagaagaacgtcttttcagagttctcacaacagaggagattgaccagcacctgacggcaattagtgaacgggactgagctgccatatgttggacatttgatccctccacactgcgccgtgccattgtgcttcagcactgccatttagtttgacatcaaatgaactgagtgtaccatttcatgtctaacactgaaaacaagctcgttgattgaatttggcacagtttggttttgcattgctaactatatttgcagggctgagcgattggtagttcatttcaccaatacgcgtaaccatttttaacggtgtttgttgtgagttgccataagatttagctccacctacccatagttaagattgggagcaagaatagcagcgtttagcatgttggaaatagagtgggttgggtgttgtgtattgatgctgaatgagg

SEQ ID NO: 221305 - DNA, 1351 bp, Zea Mays
cttgttctacctcccaaagtcgggttcccacccagcgtgcccgccgccgaccgcctgcacaagcctgcggcgagatccggcgtcgccggcgagcttcagcaccggcacgtgctccggaaggaaatagcttccggtgacgtacgctaccctctccgcggcgtcccggggagcggggacggggagcgctttttgctgtcacccgcacacgagcgacgagctccaccacctgcccagctaaccatcaggaggtctggaggatcacaagtgccttggagaaccacaagtatgaaattgctgactgggaccttggtgccggaatatacatagacttctacgttctgaagaactcaatgcaagaaagaaatgccatggatgattcggattcactcgaggagatgagtgaatcatgcagaagtttctttggtcgattaaacgaatcgttgttagtctggggaagcaaattacctgttgagtcaaggtaacactcttctacagtatgtgactgatccacatccactatctgaaaccatgtccttctgtaccatgttttgatggagttggcccactggattataatgagctggtgcaaatagcaaacctgaactacatgaggaacttcgctgttatgttaaattgttcaaatcccagctgattagcaccatttggaattctgaagcattcttgtttaggtttatattcggagtattctctcactgggcttgctgacagggcatgctactcgaagatggcagaggagctatgcgcgcttctggtggacaccccaagcgagacgctgaacctacccatggggtgtcttctgacgatgctcaacgctccagttccagacgagagcaggtcgtcgtacctgcaggatgcactctccgtcttcaccgaaatcctttgcagcgatccgtaggtgaaggggagtgaagcctacaggcaacacgccgaagagtttgtacgtctcatgtttgatacttgtagaaaattaggaatgtataactatgacctgatgttgctccggtgaatttgtaacgccatctgaagacatgtgtcgggatcttcgttgtatgtgagtaccaggtcttatgaaacgttgacttgcgagctgtaccaatggggagtgatttcctgggcttcattttctctgtgtgtgtgtgtgtgtttattacagggaagggcagcgtcacggcgacccgtgcttcggtgtacattggagattactgaggccttcgtttcagccgtaaatcacatggatcgaagagtactttaacttggaaatgatttagtctccctcaatcccactcattatgatcttaattccgacccccagaccagagtagagagagtg

SEQ ID NO: 221306 - DNA, 1365 bp, Zea Mays
cttgttctacctcccaaagtcgggttcccacccagcgtgcccgccgccgaccgcctgcacaagcctgcggcgagatccggcgtcgccggcgagcttcagcaccggcacgtgctccggaaggaaatagcttccggtgacgtacgctaccctctccgcggcgtcccggggagcggggacggggagcgctttttgctgtcacccgcacacgagcgacgagctccaccacctgcccagtattgtgagtcatggagtagagatgatgctcaaaggcaatacattgtagaacttggtataccagaagaatggatgcatgaagctctgtgcatgaaaattattacacatgaagcatgtgtagctaatgagctctatatacaggctctttatcacgaatactatggagataaacagggtgcactggagaatttgattcagtgtggcaactggaagaaagctcacactattttcgtgacttctgttgctcattctatgtttctgtcatctaaccatcaggaggtctggaggatcacaagtgccttggagaaccacaagtatgaaattgctgactgggaccttggtgccggaatatacatagacttctacgttctgaagaactcaatgcaagaaagaaatgccatggatgattcggattcactcgaggagatgagtgaatcatgcagaagtttctttggtcgattaaacgaatcgttgttagtctggggaagcaaattacctgttgagtcaagggcatgctactcgaagatggcagaggagctatgcgcgcttctggtggacaccccaagcgagacgctgaacctacccatggggtgtcttctgacgatgctcaacgctccagttccagacgagagcaggtcgtcgtacctgcaggatgcactctccgtcttcaccgaaatcctttgcagcgatccgtaggtgaaggggagtgaagcctacaggcaacacgccgaagagtttgtacgtctcatgtttgatacttgtagaaaattaggaatgtataactatgacctgatgttgctccggtgaatttgtaacgccatctgaagacatgtgtcgggatcttcgttgtatgtgagtaccaggtcttatgaaacgttgacttgcgagctgtaccaatggggagtgatttcctgggcttcattttctctgtgtgtgtgtgtgtgtttattacagggaagggcagcgtcacggcgacccgtgcttcggtgtacattggagattactgaggccttcgtttcagccgtaaatcacatggatcgaagagtactttaacttggaaatgatttagtctccctcaatcccactcattatgatcttaattccgacccccagaccagagtagagagagtg

SEQ ID NO: 221307 - DNA, 4090 bp, Zea Mays
cttgttctacctcccaaagtcgggttcccacccagcgtgcccgccgccgaccgcctgcacaagcctgcggcgagatccggcgtcgccggcgagcttcagcaccggcacgtgctccggaaggaaatagcttccggtgacgtacgctaccctctccgcggcgtcccggggagcggggacggggagcgctttttgctgtcacccgcacacgagcgacgagctccaccacctgcccagggttagttgtgtatggaacaatgacgaacatggcaccacggcagggacccgtcactcagtgctgttgattctggaacatcgcctcgctaccacccatggcaggtagcactgtgttccctgtgctgcgctcctccgagtacttcacaagtccgtcaattgatgagctggtagagagggaggtggctgatcctggctactgcagcagggttccaaacttcatcatagggagggctggatatgggcaggttaggttcttgggcaacaccgatgtgaggggcattgacctgaatgaaattgtcaggtttgaaaaacactatgtggtggtttatgaggatgagacttgtaagccacctgtagggcatggtcttaacaaagcagcagaagtatccttgctgctgaatccgaaggatcatccggagcccagtatccttgttgaagtgctaaggtgtcgtgcaagaaagcaaggttctaggtttctttcattcaatccagtgaatggaagatggaaatttgaggttgatcattttagtagatttgggcttgtggatgaggacgaagaggatgctgtgatggacgaggcagctgttcggcagccaattactgaagtaagagaaagagatccaccttcaaatagttatgagattgagctctcacattcattgcctgctcatctcgggcttgaccctgcaaaggtgcaagaaatgaggatggtgatgttttccaatgaggaagaagatgaatacatggaggatgggttcccttctgacaagaggtaccttagcagagaaaggatgaatgtggattcacctacctcaagcagtaaaggttcgaggttaaggtctctctctcccttgcacatgtcttctcagaaggctggcaggagatctggtatgcctgttcggaaagaacgtcaggcacttttggaatacaatttgaattcttcagagcttggttcatcgaatcagggtattcttatgtctgggcaaaacagaggatttccagtgagtatgaccaaggtggaaggctttaagctgccgcctgagcaagaaactcctgttgctggaaacacgtatactgtctgtgtagtggatgctgctttattcatgggtagatcatttcgtgttggttggggaccaaatggtttacttgtacattcaggtagtctggtcaatagtcctggaactggcctatcttctgttattcacatagagaaagttgcaagtgacaaagttgtgcgtgatgataaggataagattaaggatgacctaacagaactatgtttttctgctccaatggacctccataagagtcttgatcatgactttctagagactgagtctgactcgttcagattgaagcttcaaaaagtcatgacaaatcgtttggttttgcctgacatctgcaggtcatatattgatatcatcgaaaggcagcttgaagtcaatgatttatccatgtcttcacgtgtgctgttgatgcatcaagttacagtctgggagttaattagggtcttgttctcagagagagcaactggtagccagttggactctgttggtgatgatgatcaggaaggcatggttttagacaaaaaagaaggctctgtcgacatagaccctgaagcactccctttgtttaggagagcagattttagcaattggttacaggacagtgtttgccatcgggtccaaggagaggtgggttccttaaatgatgccaggtacttggaaaatatcctcgtccttttgactggtcgacaattggacacggccactgaaattgctgcctcaaggggtgatgttcggttggcaatcttgctaagtcaggcaggtgggtcaatgtcaaatcgatctgaccttgcgcaaacactggatcagtggaaaatgaatggtctagattttgattatattgaggaagactggttaaaggtatatatgttacttgctggtaacgtacaggccgcttttctagatttaccaattgactggaagaggtaccttggtttgattatgtggtatcaattatcacctgatacaccactcgatattatcattcgttcttacgatcaactccttggtgagggcaaagttccctatcctgttcctgtatatatagatgaaggacctcttgatgaagcacctcagtggtccccgggtgaccattttgatatctccttctacctaatgcttcttcatgccaataaagacgagaagtttgggctgctaaagactatgttcagtgcattctcatcttcattcgaccccttggattatcatttcatatggcatcagcgttcaattttggaggctgttggagctttcagttcaaaagatcttcacttgctagatttaagttttgtttatcaattgctttgtcttgggaggtgccattgggctatctatgtcattctgcacatgccgtatcttgacgatgccccatacattcatgagaaattaatcagggaagttttatcacagtattgtgagtcatggagtagagatgatgctcaaaggcaatacattgtagaacttggtataccagaagaatggatgcatgaagctctgtgcatgaaaattattacacatgaagcatgtgtagctaatgagctctatatacaggctctttatcacgaatactatggagataaacagggtgcactggagaatttgattcagtgtggcaactggaagaaagctcacactattttcgtgacttctgttgctcattctatgtttctgtcatctaaccatcaggaggtctggaggatcacaagtgccttggagaaccacaagtatgaaattgctgactgggaccttggtgccggaatatacatagacttctacgttctgaagaactcaatgcaagaaagaaatgccatggatgattcggattcactcgaggagatgagtgaatcatgcagaagtttctttggtcgattaaacgaatcgttgttagtctggggaagcaaattacctgttgagtcaaggtaacactcttctacagtatgtgactgatccacatccactatctgaaaccatgtccttctgtaccatgttttgatggagttggcccactggattataatgagctggtgcaaatagcaaacctgaactacatgaggaacttcgctgttatgttaaattgttcaaatcccagctgattagcaccatttggaattctgaagcattcttgtttaggtttatattcggagtattctctcactgggcttgctgacagggcatgctactcgaagatggcagaggagctatgcgcgcttctggtggacaccccaagcgagacgctgaacctacccatggggtgtcttctgacgatgctcaacgctccagttccagacgagagcaggtcgtcgtacctgcaggatgcactctccgtcttcaccgaaatcctttgcagcgatccgtaggtgaaggggagtgaagcctacaggcaacacgccgaagagtttgtacgtctcatgtttgatacttgtagaaaattaggaatgtataactatgacctgatgttgctccggtgaatttgtaacgccatctgaagacatgtgtcgggatcttcgttgtatgtgagtaccaggtcttatgaaacgttgacttgcgagctgtaccaatggggagtgatttcctgggcttcattttctctgtgtgtgtgtgtgtgtttattacagggaagggcagcgtcacggcgacccgtgcttcggtgtacattggagattactgaggccttcgtttcagccgtaaatcacatggatcgaagagtactttaacttggaaatgatttagtctccctcaatcccactcattatgatcttaattccgacccccagaccagagtagagagagtg

SEQ ID NO: 221308 - DNA, 3861 bp, Zea Mays
tattacaacaccgatgagaacccttgttctacctcccaaagtcgggttcccacccagcgtgcccgccgccgaccgcctgcacaagcctgcggcgagatccggcgtcgccggcgagcttcagcaccggcacgtgctccggaaggaaatagcttccggtgacgtacgctaccctctccgcggcgtcccggggagcggggacggggagcgctttttgctgtcacccgcacacgagcgacgagctccaccacctgcccagggttagttgtgtatggaacaatgacgaacatggcaccacggcagggacccgtcactcagtgctgttgattctggaacatcgcctcgctaccacccatggcaggtagcactgtgttccctgtgctgcgctcctccgagtacttcacaagtccgtcaattgatgagctggtagagagggaggtggctgatcctggctactgcagcagggttccaaacttcatcatagggagggctggatatgggcaggttaggttcttgggcaacaccgatgtgaggggcattgacctgaatgaaattgtcaggtttgaaaaacactatgtggtggtttatgaggatgagacttgtaagccacctgtagggcatggtcttaacaaagcagcagaagtatccttgctgctgaatccgaaggatcatccggagcccagtatccttgttgaagtgctaaggtgtcgtgcaagaaagcaaggttctaggtttctttcattcaatccagtgaatggaagatggaaatttgaggttgatcattttagtagatttgggcttgtggatgaggacgaagaggatgctgtgatggacgaggcagctgttcggcagccaattactgaagtaagagaaagagatccaccttcaaatagttatgagattgagctctcacattcattgcctgctcatctcgggcttgaccctgcaaaggtgcaagaaatgaggatggtgatgttttccaatgaggaagaagatgaatacatggaggatgggttcccttctgacaagaggtaccttagcagagaaaggatgaatgtggattcacctacctcaagcagtaaaggttcgaggttaaggtctctctctcccttgcacatgtcttctcagaaggctggcaggagatctggtatgcctgttcggaaagaacgtcaggcacttttggaatacaatttgaattcttcagagcttggttcatcgaatcagggtattcttatgtctgggcaaaacagaggatttccagtgagtatgaccaaggtggaaggctttaagctgccgcctgagcaagaaactcctgttgctggaaacacgtatactgtctgtgtagtggatgctgctttattcatgggtagatcatttcgtgttggttggggaccaaatggtttacttgtacattcaggtagtctggtcaatagtcctggaactggcctatcttctgttattcacatagagaaagttgcaagtgacaaagttgtgcgtgatgataaggataagattaaggatgacctaacagaactatgtttttctgctccaatggacctccataagagtcttgatcatgactttctagagactgagtctgactcgttcagattgaagcttcaaaaagtcatgacaaatcgtttggttttgcctgacatctgcaggtcatatattgatatcatcgaaaggcagcttgaagtcaatgatttatccatgtcttcacgtgtgctgttgatgcatcaagttacagtctgggagttaattagggtcttgttctcagagagagcaactggtagccagttggactctgttggtgatgatgatcaggaaggcatggttttagacaaaaaagaaggctctgtcgacatagaccctgaagcactccctttgtttaggagagcagattttagcaattggttacaggacagtgtttgccatcgggtccaaggagaggtgggttccttaaatgatgccaggtacttggaaaatatcctcgtccttttgactggtcgacaattggacacggccactgaaattgctgcctcaaggggtgatgttcggttggcaatcttgctaagtcaggcaggtgggtcaatgtcaaatcgatctgaccttgcgcaaacactggatcagtggaaaatgaatggtctagattttgattatattgaggaagactggttaaaggtatatatgttacttgctggtaacgtacaggccgcttttctagatttaccaattgactggaagaggtaccttggtttgattatgtggtatcaattatcacctgatacaccactcgatattatcattcgttcttacgatcaactccttggtgagggcaaagttccctatcctgttcctgtatatatagatgaaggacctcttgatgaagcacctcagtggtccccgggtgaccattttgatatctccttctacctaatgcttcttcatgccaataaagacgagaagtttgggctgctaaagactatgttcagtgcattctcatcttcattcgaccccttggattatcatttcatatggcatcagcgttcaattttggaggctgttggagctttcagttcaaaagatcttcacttgctagatttaagttttgtttatcaattgctttgtcttgggaggtgccattgggctatctatgtcattctgcacatgccgtatcttgacgatgccccatacattcatgagaaattaatcagggaagttttatcacagtattgtgagtcatggagtagagatgatgctcaaaggcaatacattgtagaacttggtataccagaagaatggatgcatgaagctctgtgcatgaaaattattacacatgaagcatgtgtagctaatgagctctatatacaggctctttatcacgaatactatggagataaacagggtgcactggagaatttgattcagtgtggcaactggaagaaagctcacactattttcgtgacttctgttgctcattctatgtttctgtcatctaaccatcaggaggtctggaggatcacaagtgccttggagaaccacaagtatgaaattgctgactgggaccttggtgccggaatatacatagacttctacgttctgaagaactcaatgcaagaaagaaatgccatggatgattcggattcactcgaggagatgagtgaatcatgcagaagtttctttggtcgattaaacgaatcgttgttagtctggggaagcaaattacctgttgagtcaagggcatgctactcgaagatggcagaggagctatgcgcgcttctggtggacaccccaagcgagacgctgaacctacccatggggtgtcttctgacgatgctcaacgctccagttccagacgagagcaggtcgtcgtacctgcaggatgcactctccgtcttcaccgaaatcctttgcagcgatccgtaggtgaaggggagtgaagcctacaggcaacacgccgaagagtttgtacgtctcatgtttgatacttgtagaaaattaggaatgtataactatgacctgatgttgctccggtgaatttgtaacgccatctgaagacatgtgtcgggatcttcgttgtatgtgagtaccaggtcttatgaaacgttgacttgcgagctgtaccaatggggagtgatttcctgggcttcattttctctgtgtgtgtgtgtgtgtttattacagggaagggcagcgtcacggcgacccgtgcttcggtgtacattggagattactgaggccttcgtttcagccgtaaatcacatggatcgaagagtactttaacttggaaatgatttagtctccctcaatcccactcattatgatcttaattccgacccccagaccagagtagagagagtg

SEQ ID NO: 221309 - DNA, 2991 bp, Zea Mays
atggacgaaggcaggtgccaagtcctctacaatggcatcatcatatgcatccacggttacgagcatgttagcaaccgatcgggagaaccggagagctagagggacgaggtggatttgggaagaagaacaggagaactgctcttgctctctccggttctcccgatcagttgctaacatttggtatcagattcaatcatcctggatccacttgctgttttgccgcggctaccccgatcttccgcgatggagcaccaagacgccgccatctgcaagctgctcgatgaaatgcgactcatggaggcgcgtctgtccgagcgcatcagcggacgctgcgacgacgtcgagcaccacctggacgagcaccgtgaagagccctgtgacgagacgtctcgcttcgacaagggtcccatcttcgacgagaagccctgtttccaccgccacttccttgattcggatccgaactctccctgcaactgggtcgatctgctctcggtcatccgtgcagtggccccgagctcccgggatttgcttcctccaccgggcatctctgccgtgccgagcagctacgtcgcaagcaggcatccgcagaccgcaggaggacagagaacttgtccagcccccgcgacgagtcgagtcggctacttgcgtcgagtcaagcgttcccagggcctccagcaccgagctggacagggagttcatcgccgcctccgccttcgtcacagcatcagttgcctccagcaccagtgccctcgaggcaggcgcacacgtggacgtggctggcgaaccggagtttccgcctcgtgtcaccctcgatggccaccccgacgacgaactcctccatgtcgaaggggcggtggtccggccacttctcgaagagcgtgagcagcagcacggcacggcccagagggtcatcgttgcgcggggacaatcggtcctccaccgtcagtaccagctggactcgtccccgctcgactcctgcaacatcttcgctcctgaaagaccggccgaccgggagatggtcgaggcgtcagccgtcatggtggtgtgggcgtacgacgccgcgtgcgaccgcgtcggcgtgcaggaggtgaagcacgcgtgcgaggtcggatgcagcggtggcgagatgtgccttttcacggacctcctcggcgacttgctctgccgcattcaccgctcgccggactccctcatgttggtcgtggagacaacaatcggcaccaacagcacggagatcgccggaatcgttcgcggctgcgccaagaccgccgtctctgttggcaccacccagcaggccaaagacgaccccatctacaccaaggttggctccatccttggcctccgcgtctcgcccagccactggaggaagggcatggggaagaagctagcggatcgggaggaggacgaggttgtccaagcctcatacacgtacaacatctacaacaactgggctccattggaggatgcactcagactgtttgatagaatgtgcatggagcatgactcgcccaggacaagtgctgtgaaccttgggagctttaatgtgatggttgatgcatactgtcatgctggaagaggtcaatatgcgattaaggtgtttgggaagatgccgagaagaggcctgtgccagatgtactcctccaataatctgattgactggctagggaagaataaacttgttgggaagtctgaaggatggtacatggaggaagctgcaagagctgtattggaattgttgggagttcaggcatcggttcaccagatgacagtcaaagtgaccattggacagactatttcatgctcacatctgttgcgcagcggaaagatagctacgatttgccatgatgcaagtattgcccactctgagcatcagtacgttgctactgggatgcctacagaagttgttctggaggttttggttgagaacatgggacttcctggtggttataccccatctttcgattcatctgatttgcgaaggagttgtcagtggtggaataatctggccaagagagtagcaactctggaatttgatcgcactcgaaagtcaatgggagttattgtgaaagcaaactctgggaagaactcactgcttgttaagggagctgtagagaatctgctagagagatgtacctacattcagttgctcgatggatctgttgtgctattggatgatggtgccaaggcactcatattatttacactccatgacatgtctgccagtgccttgagttgtttgggttttgcttacaagtatgaattgtcagctccccgagaagaagtccacaaatcaattgacacatgttatggttgcaacaagagacaacaaagaaacaacagaggccatttgccgtaagattggggttttcagccctatgaaggtcaaactggcatggtccggcatggatcctgccttgcccacctaggaggatgctacagctttgaaggaacgctccctgcacgcgtcggcttggggacaagccgcatttgaagacccggggaatgtcagcactgatgatccacaagagaaggagacgatggagctgaagactgacaaaggcgacgtggcgtgactccagcgtttgaggcgcgacaatatttgtgtgtctgggccagaccgccagagtgggttgtctgatggccgggttgggccgggttgtaagcgctggtttgtaagcgtcgcatataagcgaactcttgggagagggtgaatcatggaacaacagaaagcttacaacaattaccttcgtcgcgtccacttctcctgttcttcttcccaaatccacctcgtccctctagctctctctggttctcccgattggttgctaacagagcatattctcctcgccaagataaagtgctccaagaaccgcctgtacctggttgatctgaacatcgtgcagctagtgtgcttggtggcgtggcacaacgaggagccgtggttgcggcatgcccactttgagcacctgagcttcgacgtgctcgggtgga

SEQ ID NO: 221310 - DNA, 268 bp, Zea Mays
gggaagttgccattcaccgggagtaatgcttttcaggaaatgctatgaatcctgtcatgctgtagaattaagagataactgccagacaatcacctctcctgttgtcctaaaaacaaagtctggaagtattgaatcaaaaaatccgaaagtttttgattcatgggagtggattgaacgagaatatgtgcttgttccggaaaactgtacttctatggaaatgtcttcactcaacatcaagtccacaaaggatgatatggatacaagaacg

SEQ ID NO: 221311 - DNA, 384 bp, Zea Mays
cacagggaagttgccattcaccgggagtaatgcttttcagctgcaccaaaatgtcatggctaccgatgatcttaacttcccttcagaaattgaagctgatttatgtcctgattgcattgatttgtgcagaagactcctgcaccgtgatccaagaaatgctatgaatcctgtcatgctgtagaattaagagataactgccagacaatcacctctcctgttgtcctaaaaacaaagtctggaagtattgaatcaaaaaatccgaaagtttttgattcatgggagtggattgaacgagaatatgtgcttgttccggaaaactgtacttctatggaaatgtcttcactcaacatcaagtccacaaaggatgatatggatacaagaacg

SEQ ID NO: 221312 - DNA, 1880 bp, Zea Mays
ctgagtttcgaattggtgtgtggattccactgtttgatcgagggagcgagaagagagggaggcaaaggagacaacatatgggatgtatttacagatgacaaagaacgtgtcttagacagaagcaatgcagaaattgcagttgaccactaccatcgatacaaggaagacattgagctcatggcaagtctaggttttagcgcatacagattttctatatcttgggcacgtatatttcctgatggcttgggggaaaaggtcaatgagcaaggagtcgccttctataatgacctcatcaactttatgatttcgaaaggtattgagccttacgcaacactgtatcattgggatcttccaaacaatcttcaaaaaactctggggggctggatttctgacaagattgtgtaagccactgcaggcatcttaagcgtgtagtatgaatgtatgattaccgaagttttcttaacacgcaaatgaatggttacatatgagattcttctcgactcaacctttttgtttcaaaagtgtttgcagcttgatttgctgtttttacgagtttctcaccataaaaatatcctagggagtactttgcattgtatgcagaagcttgctttgcaaatttcggagatagagtaaagcgttggataacaatcaatgaacctctccaaaccgcaatcaacggttatgggattggaatttttgcgcctggaggatgccaaggtgaaactgcaagatgttacttggccgcccatcaccaaatcttggctcatgctgctgctgttgatgtttatagaagaaaattcaaggctgcacaaagtggtgaagtaggcttggttgttgactgtgaatgggcagagccattttctgaaaaactcgaagaccaaattgctgcgcaacggaggattgactttcaacttggatggtacctagatccaatatattttggtgattacccagaaagcatgcgtcagcgactgggcagtgatcttccaaccttctcagagaaagataaaaaattcatcaagaacaaaattgattttattggactaaatcattatacttcgaggctcattgctcatcaccaaaatcctgatgatgtttatttctacaaagtgcaacaaatggagagagtagaaaaatggagtagtggtgaaagcattggtgaaagggctgcatctgaatggcttgtcatagttccttggggccttcacaaattgcttaactatatagtgaagaaatacaacaacccagtaatttatgttactgagaatggcatggatgatgaagacgatcagtccgcgacgattgaccaggtcctaaacgacacgaagagagtcggctacttcaaaggatacctcaattcggttgcacaggcgatcaaggacggggctgatgtccgtgggtacttcgcgtggtcattcctggacaacttcgagtgggctatgggctacaccaagaggttcggcatagtctacgtcgattacaaggacgggctctccaggcaccccaaggcatcggccctctggttctcgcgcctcctcaagggcgaggctgccgaaaacagctatagctagagctgccacagactgagggaacagtccgcggcaagtacagaaacattacacacatttctcctgttgttgtgtcttgttgttgtgtcttaaaggtgagtgcacctatgtatgtatgtatgtatgtatgtatgtatgtatgtatgtatgtatgtatatatgtattcatcctaataatctcaggatgtgctagtctgtcgttgatgcgacgctggctgagatgtgttctccaagaacaagaacaaccagaacctcagcaccaaataagctttgaatccatgtgttggacaccaaaatgagcggacggtccga

SEQ ID NO: 221313 - DNA, 1742 bp, Zea Mays
cggagtggacgtcaggcgcgctcgccagccccccacaccaccaccaccaccacaaccccaccaagctcacgtttccgaattcaccaactcctgcacgccgcgtcgagatcgttcacgccttagcttcgggaactccaccaataagcccaccggctggagcaatggggagcacggggcgcgagccggaggtgacccgcgccaacttccccgacggcttcgtcttcggcgtcgccacctccgcgtaccagatcgagggagcgagaagagagggaggcaaaggagacaacatatgggatgtatttacagatgacaaagaacgtgtcttagacagaagcaatgcagaaattgcagttgaccactaccatcgatacaaggaagacattgagctcatggcaagtctaggttttagcgcatacagattttctatatcttgggcacgtatatttcctgatggcttgggggaaaaggtcaatgagcaaggagtcgccttctataatgacctcatcaactttatgatttcgaaaggtattgagccttacgcaacactgtatcattgggatcttccaaacaatcttcaaaaaactctggggggctggatttctgacaagattgtgtaagccactgcaggcatcttaagcgtgtagtatgaatgtatgattaccgaagttttcttaacacgcaaatgaatggttacatatgagattcttctcgactcaacctttttgtttcaaaagtgtttgcagcttgatttgctgtttttacgagtttctcaccataaaaatatcctagggagtactttgcattgtatgcagaagcttgctttgcaaatttcggagatagagtaaagcgttggataacaatcaatgaacctctccaaaccgcaatcaacggttatgggattggaatttttgcgcctggaggatgccaaggtgaaactgcaagatgttacttggccgcccatcaccaaatcttggctcatgctgctgctgttgatgtttatagaagaaaattcaaggctgcacaaagtggtgaagtaggcttggttgttgactgtgaatgggcagagccattttctgaaaaactcgaagaccaaattgctgcgcaacggaggattgactttcaacttggatggcatggatgatgaagacgatcagtccgcgacgattgaccaggtcctaaacgacacgaagagagtcggctacttcaaaggatacctcaattcggttgcacaggcgatcaaggacggggctgatgtccgtgggtacttcgcgtggtcattcctggacaacttcgagtgggctatgggctacaccaagaggttcggcatagtctacgtcgattacaaggacgggctctccaggcaccccaaggcatcggccctctggttctcgcgcctcctcaagggcgaggctgccgaaaacagctatagctagagctgccacagactgagggaacagtccgcggcaagtacagaaacattacacacatttctcctgttgttgtgtcttgttgttgtgtcttaaaggtgagtgcacctatgtatgtatgtatgtatgtatgtatgtatgtatgtatgtatgtatgtatatatgtattcatcctaataatctcaggatgtgctagtctgtcgttgatgcgacgctggctgagatgtgttctccaagaacaagaacaaccagaacctcagcaccaaataagctttgaatccatgtgttggacaccaaaatgagcggacggtccga

SEQ ID NO: 221314 - DNA, 1838 bp, Zea Mays
gcccacgcttcggagtggacgtcaggcgcgctcgccagccccccacaccaccaccaccaccacaaccccaccaagctcacgtttccgaattcaccaactcctgcacgccgcgtcgagatcgttcacgccttagcttcgggaactccaccaataagcccaccggctggagcaatggggagcacggggcgcgagccggaggtgacccgcgccaacttccccgacggcttcgtcttcggcgtcgccacctccgcgtaccagatcgagggagcgagaagagagggaggcaaaggagacaacatatgggatgtatttacagatgacaaagaacgtgtcttagacagaagcaatgcagaaattgcagttgaccactaccatcgatacaaggaagacattgagctcatggcaagtctaggttttagcgcatacagattttctatatcttgggcacgtatatttcctgatggcttgggggaaaaggtcaatgagcaaggagtcgccttctataatgacctcatcaactttatgatttcgaaagggagtactttgcattgtatgcagaagcttgctttgcaaatttcggagatagagtaaagcgttggataacaatcaatgaacctctccaaaccgcaatcaacggttatgggattggaatttttgcgcctggaggatgccaaggtgaaactgcaagatgttacttggccgcccatcaccaaatcttggctcatgctgctgctgttgatgtttatagaagaaaattcaaggctgcacaaagtggtgaagtaggcttggttgttgactgtgaatgggcagagccattttctgaaaaactcgaagaccaaattgctgcgcaacggaggattgactttcaacttggatggtacctagatccaatatattttggtgattacccagaaagcatgcgtcagcgactgggcagtgatcttccaaccttctcagagaaagataaaaaattcatcaagaacaaaattgattttattggactaaatcattatacttcgaggctcattgctcatcaccaaaatcctgatgatgtttatttctacaaagtgcaacaaatggagagagtagaaaaatggagtagtggtgaaagcattggtgaaagggctgcatctgaatggcttgtcatagttccttggggccttcacaaattgcttaactatatagtgaagaaatacaacaacccagtaatttatgttactgagaatggcatggatgatgaagacgatcagtccgcgacgattgaccaggtcctaaacgacacgaagagagtcggctacttcaaaggatacctcaattcggttgcacaggcgatcaaggacggggctgatgtccgtgggtacttcgcgtggtcattcctggacaacttcgagtgggctatgggctacaccaagaggttcggcatagtctacgtcgattacaaggacgggctctccaggcaccccaaggcatcggccctctggttctcgcgcctcctcaagggcgaggctgccgaaaacagctatagctagagctgccacagactgagggaacagtccgcggcaagtacagaaacattacacacatttctcctgttgttgtgtcttgttgttgtgtcttaaaggtgagtgcacctatgtatgtatgtatgtatgtatgtatgtatgtatgtatgtatgtatgtatatatgtattcatcctaataatctcaggatgtgctagtctgtcgttgatgcgacgctggctgagatgtgttctccaagaacaagaacaaccagaacctcagcaccaaataagctttgaatccatgtgttggacaccaaaatgagcggacggtccga

SEQ ID NO: 221315 - DNA, 2110 bp, Zea Mays
ggatctgccgcgcccccgctctcctctggctcgctcgcgttctcgcgtacaccactccagacagtgacacagggacacacgccggcgtggctgctcacgtgttctcagttctcaccctgcgctctcgccggccggggctataagtggtcagcgaatatctctgcggcaagcccacgcttcggagtggacgtcaggcgcgctcgccagccccccacaccaccaccaccaccacaaccccaccaagctcacgtttccgaattcaccaactcctgcacgccgcgtcgagatcgttcacgccttagcttcgggaactccaccaataagcccaccggctggagcaatggggagcacggggcgcgagccggaggtgacccgcgccaacttccccgacggcttcgtcttcggcgtcgccacctccgcgtaccagatcgagggagcgagaagagagggaggcaaaggagacaacatatgggatgtatttacagatgacaaagaacgtgtcttagacagaagcaatgcagaaattgcagttgaccactaccatcgatacaaggaagacattgagctcatggcaagtctaggttttagcgcatacagattttctatatcttgggcacgtatatttcctgatggcttgggggaaaaggtcaatgagcaaggagtcgccttctataatgacctcatcaactttatgatttcgaaaggtattgagccttacgcaacactgtatcattgggatcttccaaacaatcttcaaaaaactctggggggctggatttctgacaagattgtgtaagccactgcaggcatcttaagcgtgtagtatgaataagcttgctttgcaaatttcggagatagagtaaagcgttggataacaatcaatgaacctctccaaaccgcaatcaacggttatgggattggaatttttgcgcctggaggatgccaaggtgaaactgcaagatgttacttggccgcccatcaccaaatcttggctcatgctgctgctgttgatgtttatagaagaaaattcaaggctgcacaaagtggtgaagtaggcttggttgttgactgtgaatgggcagagccattttctgaaaaactcgaagaccaaattgctgcgcaacggaggattgactttcaacttggatggtacctagatccaatatattttggtgattacccagaaagcatgcgtcagcgactgggcagtgatcttccaaccttctcagagaaagataaaaaattcatcaagaacaaaattgattttattggactaaatcattatacttcgaggctcattgctcatcaccaaaatcctgatgatgtttatttctacaaagtgcaacaaatggagagagtagaaaaatggagtagtggtgaaagcattggtgaaagggctgcatctgaatggcttgtcatagttccttggggccttcacaaattgcttaactatatagtgaagaaatacaacaacccagtaatttatgttactgagaatggcatggatgatgaagacgatcagtccgcgacgattgaccaggtcctaaacgacacgaagagagtcggctacttcaaaggatacctcaattcggttgcacaggcgatcaaggacggggctgatgtccgtgggtacttcgcgtggtcattcctggacaacttcgagtgggctatgggctacaccaagaggttcggcatagtctacgtcgattacaaggacgggctctccaggcaccccaaggcatcggccctctggttctcgcgcctcctcaagggcgaggctgccgaaaacagctatagctagagctgccacagactgagggaacagtccgcggcaagtacagaaacattacacacatttctcctgttgttgtgtcttgttgttgtgtcttaaaggtgagtgcacctatgtatgtatgtatgtatgtatgtatgtatgtatgtatgtatgtatgtatatatgtattcatcctaataatctcaggatgtgctagtctgtcgttgatgcgacgctggctgagatgtgttctccaagaacaagaacaaccagaacctcagcaccaaataagctttgaatccatgtgttggacaccaaaatgagcggacggtccga

SEQ ID NO: 221316 - DNA, 2072 bp, Zea Mays
ggatctgccgcgcccccgctctcctctggctcgctcgcgttctcgcgtacaccactccagacagtgacacagggacacacgccggcgtggctgctcacgtgttctcagttctcaccctgcgctctcgccggccggggctataagtggtcagcgaatatctctgcggcaagcccacgcttcggagtggacgtcaggcgcgctcgccagccccccacaccaccaccaccaccacaaccccaccaagctcacgtttccgaattcaccaactcctgcacgccgcgtcgagatcgttcacgccttagcttcgggaactccaccaataagcccaccggctggagcaatggggagcacggggcgcgagccggaggtgacccgcgccaacttccccgacggcttcgtcttcggcgtcgccacctccgcgtaccagatcgagggagcgagaagagagggaggcaaaggagacaacatatgggatgtatttacagatgacaaagaacgtgtcttagacagaagcaatgcagaaattgcagttgaccactaccatcgatacaaggaagacattgagctcatggcaagtctaggttttagcgcatacagattttctatatcttgggcacgtatatttcctgatggcttgggggaaaaggtcaatgagcaaggagtcgccttctataatgacctcatcaactttatgatttcgaaaggtattgagccttacgcaacactgtatcattgggatcttccaaacaatcttcaaaaaactctggggggctggatttctgacaagattgtaagcttgctttgcaaatttcggagatagagtaaagcgttggataacaatcaatgaacctctccaaaccgcaatcaacggttatgggattggaatttttgcgcctggaggatgccaaggtgaaactgcaagatgttacttggccgcccatcaccaaatcttggctcatgctgctgctgttgatgtttatagaagaaaattcaaggctgcacaaagtggtgaagtaggcttggttgttgactgtgaatgggcagagccattttctgaaaaactcgaagaccaaattgctgcgcaacggaggattgactttcaacttggatggtacctagatccaatatattttggtgattacccagaaagcatgcgtcagcgactgggcagtgatcttccaaccttctcagagaaagataaaaaattcatcaagaacaaaattgattttattggactaaatcattatacttcgaggctcattgctcatcaccaaaatcctgatgatgtttatttctacaaagtgcaacaaatggagagagtagaaaaatggagtagtggtgaaagcattggtgaaagggctgcatctgaatggcttgtcatagttccttggggccttcacaaattgcttaactatatagtgaagaaatacaacaacccagtaatttatgttactgagaatggcatggatgatgaagacgatcagtccgcgacgattgaccaggtcctaaacgacacgaagagagtcggctacttcaaaggatacctcaattcggttgcacaggcgatcaaggacggggctgatgtccgtgggtacttcgcgtggtcattcctggacaacttcgagtgggctatgggctacaccaagaggttcggcatagtctacgtcgattacaaggacgggctctccaggcaccccaaggcatcggccctctggttctcgcgcctcctcaagggcgaggctgccgaaaacagctatagctagagctgccacagactgagggaacagtccgcggcaagtacagaaacattacacacatttctcctgttgttgtgtcttgttgttgtgtcttaaaggtgagtgcacctatgtatgtatgtatgtatgtatgtatgtatgtatgtatgtatgtatgtatatatgtattcatcctaataatctcaggatgtgctagtctgtcgttgatgcgacgctggctgagatgtgttctccaagaacaagaacaaccagaacctcagcaccaaataagctttgaatccatgtgttggacaccaaaatgagcggacggtccga

SEQ ID NO: 221317 - DNA, 3237 bp, Zea Mays
ctttaccctttttgattttttttggttttacctttgcttcaacttcaatccctcatggaaactttgagctctaccgaaccccactatattagatgtgtgaagccaaataatctccttaagccagctatttttgagaatacaaatgttatacaacaactaagatgtggaggtgttctcgaagctatcaggatcagctgtgctggatatcccacaagaaaaacattttatgaatttgtcaatcgttttggtgtccttgctcctgaagttttagaagggagcaatgatgataagattgcgtgccaaaagattttggaaaaaatgggtctggagaattaccagattggaaaaacaaaggtgtttctaagagctggacagatggctgatttggatgctcgtagagctgaagtattaggaagagcagcaagaatcatacagaggcaaatacgtacatatattgcaaggaaacagtttgctgagcttaaaagatcagcaacacagctgcaatcttttgtcagaggaaccttggctcgtaagttgtatgagtgcatgaggcaggaagcagcagcagtgaaaatacaaaagaatatgcgacgccacaaagcacgggaatcttatttacaattgcaagcagctgcaatcacattgcagacaggtttaagggcaatgtctgctcgcaaagaattcaggttcagaaaggaaacaaaagctgctgtccacatccaagctcaatggcgccgccacagagactactcacattacaagaatctgcaaggagcagctcttacttaccagtgtgcctggaggcaaaggcttgccagaagggagctcaggaagctcaagatggcggcaagagaaacaggagccctaaaagaggccaaggataaacttgagaagcgtgttgaagaactcacctggcgcttaggattggagaagcgattaaggactgaccttgaggaagcaaaagcccaggaaattgctaagctgcaagagacgttgcatgatatgcagcttcaagttgaagagtcaaaggccatggtagttaaggagagggaagctgctagaaaggcaattgaagaagcacctccagtaattaaagagactcctgtgctagtcgaagacacagaaaagattaactcactgacgaccgaagttgaacaactgaaggctttgctgctaactgaaagacaagcaacagaagctgcaaaaagagaacacgctgaatctgaactgagaaatgaagaactaattaagaaatttgagagcgcagagaaaaagattgagcaacttcaggaaactgtccataggctggaggagaaagcaaccaacatggagtctgagaacaaagtgctccgtcaacaagctgttgcaatttctcctacgtcaaaatcattagctgcatatcctaagtctcctttccagctgaaaactccggagaatgggaatgctctaaatggagaagtgaagtcatcaccagatatcacccctatcttaccaaaccccaaggagcttgaggctgaagagaagccacaaaaatcacttaatgaaaagcagcaggaaaatcaagacctactgatcaagtgtgtatcacaagatctgggattctccagtggcaaacctattgcagcttgccttatctacaggtgtcttctacactggagatcattcgaagttgaaagaactggtgtttttgaccgtattattcaaacaattggctctgctattgagtcccaggacaacaatgacaagttggcatattggctctcgaattcatccacactgctgctgctgctgcaacgaacactgaaaacaactggagcagctggattcactcctcaaaggcgcaggtcatctgctgcatcttttgggagggtgttttcggggatgcgagcctcaccacaaagtgctgggcgtgcttttatgggaagtcgcttgattggaggtctaggtgaccttcgtcaagttgaagccaagtaccctgccctgcttttcaagcaacagctcacagctttccttgagaagatctatggaatgataagagacaatttgaaaaaggagatatctcctttgcttggcctttgcatccaggcaccaagaacatcccgtgcaagcctaattaaagggtcacgttcccaagcaaatgccttagctcagcaaactctgattgcacattggcagagcattgtgaaaatattgacaaattacttgaatgttttaaaagcaaattatgtcccttcagtcttaatcagcaaagtgttcactcaaatcttttcatttattaatgttcagttatttaatagtcttcttcttcgacgggagtgctgttcatttagcaacggagaatatgtgaaagctggattggcagaattagagcagtggtgcatttatgcaacagaagagtatgcaggttcttcctgggaagaattaaaacatattaggcaggctgttggattccttgtgattcatcaaaagccaaagaaaacattgaaagaaattaccaacgatctgtgccctgtccttagcatacaacagctatatcgaatcagtacaatgtactgggatgataagtacggtacccacactgtttcatcagatgtcatctcaagtatgagagtaatgatgacagaagattctaataacgcggtcagcagttcgttcctgttggatgatgattccagcattccgttttcggtggacgacatctcgaagtcgatgacagaaatcgaggtaacagatgtcgacatgccacctctgatccgggagaattctggcttcaccttcctacaccaaagaaaggactaacagggtggtccttccagctgcatgtccctttttgcacattctttttctccgctcaacctgtgcataactcatgtacatacgctcgtgccttttgctctctggtcagggcttgttagatgtattgtctttggtttgattggttggttggttctttcctcgatcctctcccaattttgttgggcgaagggtccacaatctatgtttctccatactgtagtgaaaaggggccggatgcccctggtctccccgagctgcttttggaaaagctcgtggtcattaagcagttaagcttgtggaaaaggttctccacatctaccgagtcgttcgttgtgtcgccttcttcatatggatcatcgccatattgtaaattgcaaatacgattatagttgaaaaaagagatattacagtgatagcagtgttctggagtttggatctcat

SEQ ID NO: 221318 - DNA, 4921 bp, Zea Mays
taaagaattccataccatccaggaggttaccacagacaggtcaaaagtatttcccaaggatatggaagctccaccaggaggagttgatgatatgacaagactttcatacttacatgaacctggtgttctacagaatcttgctacccgctatgaactgaatgaaatatatacttacacaggcagcattttgattgctgtaaatccatttcaaagattgccacatctttatgatacccacatgatggaacagtacaagggtgcagattttggggaattgagtccccatgtctttgctatcgcggatgttgcttacagggcaatgataaatgaagggaaaagcaactctatattggtcagtggtgaaagtggtgctgggaagactgagacaacgaagatgcttatgagatatttagcacatttaggtgggcgatctggagtagaaggacgtacagtggaacaacaagttttagagtccaacccagttcttgaagcttttggtaatgctaaaactgtgcgaaataacaactcaagtcgctttggcaagtttgttgagatccaatttgacaagactggacggatctcaggagctgctatcagaacttacttgctggaaagatcacgtgtgtgccaaattaattctccagaaagaaattaccattgcttttattttctttgtgccgcaccacctgagtacactcagaggtacaagctgtctgatcctagatctttccattacctcaatcagtcgagctgtattgaggtggatggaatcaatgatgctgaagagtatttagcaacacgaagagctatggatatagttggaatcaatgaggaagagcaggaaggtatattccgggttgtagctgctgtacttcatcttggaaatataaattttgccaagggaacagaaatcgattcttctgtaatcaaggatgataaatccaggttccaccttaatatcgcagcagaacttttgaaatgtgattgccagaatttagagaaggcgctgataacacgagttatagtcacgcctgaagaagttatcactagaacacttgatcctgcttctgcagttgctagcagagacgcattagctaaaataatatactcccgattgtttgattggattgtggaaaaaattaatgtctcaattggacaggacccaaactcaaaacagttaattggagttcttgatatctatggttttgagagcttcaaagttaacagttttgaacagctatgtatcaattatacaaatgaaaagctgcaacaacattttaaccagcacgtgttcaaaatggaacaagaagagtataccagagaagagataaactggagttacatcgagtttgttgataatcaagatgtgctagacttgatagagaagaaaggtggattgattgcacttctggatgaagcatgtatgtttcctagatctacacatgagacgtttgcgcagaagctatatacaacatttaagaataacaagcggtttgccaagccaaagctttcacgcactgattttacagtagtccattatgctggcgatgtgacataccaggctgattatttcttagacaagaacaaagattatgtagtggctgaacatcaggatctgctgaatgcttcttcatgcctattcgtagctggtttattccctcctctcccacaggagacagcaaagtcttcaaaattttcatccattggatcacgttttaagcttcaacttcaatccctcatggaaactttgagctctaccgaaccccactatattagatgtgtgaagccaaataatctccttaagccagctatttttgagaatacaaatgttatacaacaactaagatgtggaggtgttctcgaagctatcaggatcagctgtgctggatatcccacaagaaaaacattttatgaatttgtcaatcgttttggtgtccttgctcctgaagttttagaagggagcaatgatgataagattgcgtgccaaaagattttggaaaaaatgggtctggagaattaccagattggaaaaacaaaggtgtttctaagagctggacagatggctgatttggatgctcgtagagctgaagtattaggaagagcagcaagaatcatacagaggcaaatacgtacatatattgcaaggaaacagtttgctgagcttaaaagatcagcaacacagctgcaatcttttgtcagaggaaccttggctcgtaagttgtatgagtgcatgaggcaggaagcagcagcagtgaaaatacaaaagaatatgcgacgccacaaagcacgggaatcttatttacaattgcaagcagctgcaatcacattgcagacaggtttaagggcaatgtctgctcgcaaagaattcaggttcagaaaggaaacaaaagctgctgtccacatccaagctcaatggcgccgccacagagactactcacattacaagaatctgcaaggagcagctcttacttaccagtgtgcctggaggcaaaggcttgccagaagggagctcaggaagctcaagatggcggcaagagaaacaggagccctaaaagaggccaaggataaacttgagaagcgtgttgaagaactcacctggcgcttaggattggagaagcgattaaggactgaccttgaggaagcaaaagcccaggaaattgctaagctgcaagagacgttgcatgatatgcagcttcaagttgaagagtcaaaggccatggtagttaaggagagggaagctgctagaaaggcaattgaagaagcacctccagtaattaaagagactcctgtgctagtcgaagacacagaaaagattaactcactgacgaccgaagttgaacaactgaaggctttgctgctaactgaaagacaagcaacagaagctgcaaaaagagaacacgctgaatctgaactgagaaatgaagaactaattaagaaatttgagagcgcagagaaaaagattgagcaacttcaggaaactgtccataggctggaggagaaagcaaccaacatggagtctgagaacaaagtgctccgtcaacaagctgttgcaatttctcctacgtcaaaatcattagctgcatatcctaagtctcctttccagctgaaaactccggagaatgggaatgctctaaatggagaagtgaagtcatcaccagatatcacccctatcttaccaaaccccaaggagcttgaggctgaagagaagccacaaaaatcacttaatgaaaagcagcaggaaaatcaagacctactgatcaagtgtgtatcacaagatctgggattctccagtggcaaacctattgcagcttgccttatctacaggtgtcttctacactggagatcattcgaagttgaaagaactggtgtttttgaccgtattattcaaacaattggctctgctattgagtcccaggacaacaatgacaagttggcatattggctctcgaattcatccacactgctgctgctgctgcaacgaacactgaaaacaactggagcagctggattcactcctcaaaggcgcaggtcatctgctgcatcttttgggagggtgttttcggggatgcgagcctcaccacaaagtgctgggcgtgcttttatgggaagtcgcttgattggaggtctaggtgaccttcgtcaagttgaagccaagtaccctgccctgcttttcaagcaacagctcacagctttccttgagaagatctatggaatgataagagacaatttgaaaaaggagatatctcctttgcttggcctttgcatccaggcaccaagaacatcccgtgcaagcctaattaaagggtcacgttcccaagcaaatgccttagctcagcaaactctgattgcacattggcagagcattgtgaaaatattgacaaattacttgaatgttttaaaagcaaattatgtcccttcagtcttaatcagcaaagtgttcactcaaatcttttcatttattaatgttcagttatttaatagtcttcttcttcgacgggagtgctgttcatttagcaacggagaatatgtgaaagctggattggcagaattagagcagtggtgcatttatgcaacagaagagtatgcaggttcttcctgggaagaattaaaacatattaggcaggctgttggattccttgtgattcatcaaaagccaaagaaaacattgaaagaaattaccaacgatctgtgccctgtccttagcatacaacagctatatcgaatcagtacaatgtactgggatgataagtacggtacccacactgtttcatcagatgtcatctcaagtatgagagtaatgatgacagaagattctaataacgcggtcagcagttcgttcctgttggatgatgattccagcattccgttttcggtggacgacatctcgaagtcgatgacagaaatcgaggtaacagatgtcgacatgccacctctgatccgggagaattctggcttcaccttcctacaccaaagaaaggactaacagggtggtccttccagctgcatgtccctttttgcacattctttttctccgctcaacctgtgcataactcatgtacatacgctcgtgccttttgctctctggtcagggcttgttagatgtattgtctttggtttgattggttggttggttctttcctcgatcctctcccaattttgttgggcgaagggtccacaatctatgtttctccatactgtagtgaaaaggggccggatgcccctggtctccccgagctgcttttggaaaagctcgtggtcattaagcagttaagcttgtggaaaaggttctccacatctaccgagtcgttcgttgtgtcgccttcttcatatggatcatcgccatattgtaaattgcaaatacgattatagttgaaaaaagagatattacagtgatagcagtgttctggagtttggatctcat

SEQ ID NO: 221319 - DNA, 5050 bp, Zea Mays
agaattcagatggcttaattgagatggaactccagttaatatcatcgttggttctcatgtttgggtggaagacccaaatctagcttggatagatggagaagttattagcataaaaaacaatgaagtacatgtgcagacatcgaatgggaaaaaggttaccacagacaggtcaaaagtatttcccaaggatatggaagctccaccaggaggagttgatgatatgacaagactttcatacttacatgaacctggtgttctacagaatcttgctacccgctatgaactgaatgaaatatatacttacacaggcagcattttgattgctgtaaatccatttcaaagattgccacatctttatgatacccacatgatggaacagtacaagggtgcagattttggggaattgagtccccatgtctttgctatcgcggatgttgcttacagggcaatgataaatgaagggaaaagcaactctatattggtcagtggtgaaagtggtgctgggaagactgagacaacgaagatgcttatgagatatttagcacatttaggtgggcgatctggagtagaaggacgtacagtggaacaacaagttttagagtccaacccagttcttgaagcttttggtaatgctaaaactgtgcgaaataacaactcaagtcgctttggcaagtttgttgagatccaatttgacaagactggacggatctcaggagctgctatcagaacttacttgctggaaagatcacgtgtgtgccaaattaattctccagaaagaaattaccattgcttttattttctttgtgccgcaccacctgagtacactcagaggtacaagctgtctgatcctagatctttccattacctcaatcagtcgagctgtattgaggtggatggaatcaatgatgctgaagagtatttagcaacacgaagagctatggatatagttggaatcaatgaggaagagcaggaaggtatattccgggttgtagctgctgtacttcatcttggaaatataaattttgccaagggaacagaaatcgattcttctgtaatcaaggatgataaatccaggttccaccttaatatcgcagcagaacttttgaaatgtgattgccagaatttagagaaggcgctgataacacgagttatagtcacgcctgaagaagttatcactagaacacttgatcctgcttctgcagttgctagcagagacgcattagctaaaataatatactcccgattgtttgattggattgtggaaaaaattaatgtctcaattggacaggacccaaactcaaaacagttaattggagttcttgatatctatggttttgagagcttcaaagttaacagttttgaacagctatgtatcaattatacaaatgaaaagctgcaacaacattttaaccagcacgtgttcaaaatggaacaagaagagtataccagagaagagataaactggagttacatcgagtttgttgataatcaagatgtgctagacttgatagagaagaaaggtggattgattgcacttctggatgaagcatgtatgtttcctagatctacacatgagacgtttgcgcagaagctatatacaacatttaagaataacaagcggtttgccaagccaaagctttcacgcactgattttacagtagtccattatgctggcgatgtgacataccaggctgattatttcttagacaagaacaaagattatgtagtggctgaacatcaggatctgctgaatgcttcttcatgcctattcgtagctggtttattccctcctctcccacaggagacagcaaagtcttcaaaattttcatccattggatcacgttttaagcttcaacttcaatccctcatggaaactttgagctctaccgaaccccactatattagatgtgtgaagccaaataatctccttaagccagctatttttgagaatacaaatgttatacaacaactaagatgtggaggtgttctcgaagctatcaggatcagctgtgctggatatcccacaagaaaaacattttatgaatttgtcaatcgttttggtgtccttgctcctgaagttttagaagggagcaatgatgataagattgcgtgccaaaagattttggaaaaaatgggtctggagaattaccagattggaaaaacaaaggtgtttctaagagctggacagatggctgatttggatgctcgtagagctgaagtattaggaagagcagcaagaatcatacagaggcaaatacgtacatatattgcaaggaaacagtttgctgagcttaaaagatcagcaacacagctgcaatcttttgtcagaggaaccttggctcgtaagttgtatgagtgcatgaggcaggaagcagcagcagtgaaaatacaaaagaatatgcgacgccacaaagcacgggaatcttatttacaattgcaagcagctgcaatcacattgcagacaggtttaagggcaatgtctgctcgcaaagaattcaggttcagaaaggaaacaaaagctgctgtccacatccaagctcaatggcgccgccacagagactactcacattacaagaatctgcaaggagcagctcttacttaccagtgtgcctggaggcaaaggcttgccagaagggagctcaggaagctcaagatggcggcaagagaaacaggagccctaaaagaggccaaggataaacttgagaagcgtgttgaagaactcacctggcgcttaggattggagaagcgattaaggactgaccttgaggaagcaaaagcccaggaaattgctaagctgcaagagacgttgcatgatatgcagcttcaagttgaagagtcaaaggccatggtagttaaggagagggaagctgctagaaaggcaattgaagaagcacctccagtaattaaagagactcctgtgctagtcgaagacacagaaaagattaactcactgacgaccgaagttgaacaactgaaggctttgctgctaactgaaagacaagcaacagaagctgcaaaaagagaacacgctgaatctgaactgagaaatgaagaactaattaagaaatttgagagcgcagagaaaaagattgagcaacttcaggaaactgtccataggctggaggagaaagcaaccaacatggagtctgagaacaaagtgctccgtcaacaagctgttgcaatttctcctacgtcaaaatcattagctgcatatcctaagtctcctttccagctgaaaactccggagaatgggaatgctctaaatggagaagtgaagtcatcaccagatatcacccctatcttaccaaaccccaaggagcttgaggctgaagagaagccacaaaaatcacttaatgaaaagcagcaggaaaatcaagacctactgatcaagtgtgtatcacaagatctgggattctccagtggcaaacctattgcagcttgccttatctacaggtgtcttctacactggagatcattcgaagttgaaagaactggtgtttttgaccgtattattcaaacaattggctctgctattgagtcccaggacaacaatgacaagttggcatattggctctcgaattcatccacactgctgctgctgctgcaacgaacactgaaaacaactggagcagctggattcactcctcaaaggcgcaggtcatctgctgcatcttttgggagggtgttttcggggatgcgagcctcaccacaaagtgctgggcgtgcttttatgggaagtcgcttgattggaggtctaggtgaccttcgtcaagttgaagccaagtaccctgccctgcttttcaagcaacagctcacagctttccttgagaagatctatggaatgataagagacaatttgaaaaaggagatatctcctttgcttggcctttgcatccaggcaccaagaacatcccgtgcaagcctaattaaagggtcacgttcccaagcaaatgccttagctcagcaaactctgattgcacattggcagagcattgtgaaaatattgacaaattacttgaatgttttaaaagcaaattatgtcccttcagtcttaatcagcaaagtgttcactcaaatcttttcatttattaatgttcagttatttaatagtcttcttcttcgacgggagtgctgttcatttagcaacggagaatatgtgaaagctggattggcagaattagagcagtggtgcatttatgcaacagaagagtatgcaggttcttcctgggaagaattaaaacatattaggcaggctgttggattccttgtgattcatcaaaagccaaagaaaacattgaaagaaattaccaacgatctgtgccctgtccttagcatacaacagctatatcgaatcagtacaatgtactgggatgataagtacggtacccacactgtttcatcagatgtcatctcaagtatgagagtaatgatgacagaagattctaataacgcggtcagcagttcgttcctgttggatgatgattccagcattccgttttcggtggacgacatctcgaagtcgatgacagaaatcgaggtaacagatgtcgacatgccacctctgatccgggagaattctggcttcaccttcctacaccaaagaaaggactaacagggtggtccttccagctgcatgtccctttttgcacattctttttctccgctcaacctgtgcataactcatgtacatacgctcgtgccttttgctctctggtcagggcttgttagatgtattgtctttggtttgattggttggttggttctttcctcgatcctctcccaattttgttgggcgaagggtccacaatctatgtttctccatactgtagtgaaaaggggccggatgcccctggtctccccgagctgcttttggaaaagctcgtggtcattaagcagttaagcttgtggaaaaggttctccacatctaccgagtcgttcgttgtgtcgccttcttcatatggatcatcgccatattgtaaattgcaaatacgattatagttgaaaaaagagatattacagtgatagcagtgttctggagtttggatctcat

SEQ ID NO: 221320 - DNA, 1747 bp, Zea Mays
tgcctttggctcccggtcccggcgtttgcttgcggcttccgtcgtccgcgcacaccgacgacgtggagcaacggccagcgcacgtaagtgcccgctcttccagccccacatttgcatccgcttgccttctggcaccacgccaccacctaccatgccgacgttcccgcgcgccggccggtggtccacctccagcacatggccacggaaaaccgccggcgcggcgtccacggcgctggccgccgtcgtcttcgcggtcctggacgtcgccgacgtgatcctctgcttcgcgtacgccctcctcgacggcgtgctcgaggacagccccgtgcgctgctactgccacaggagctacgacgacggcatccgcgaggcggccgcgggggcatcagtggatggcggcggccacgaggaggtctccgacacgctgtacgcgtgcggccggaggagcaccgtcagggacgcgctgctggggctcgtgcgacgcgtcgtgccgaggactaggaggacacgggcgccgccagatgagacggtggcgccgtgcaagtggcgcagccccaggtggtctgactgcgcgtgtaagtcgtgcgtcgcgtggcggtgcggcgaagaaggcggcggccggctgcacgtcgtcgtcaaagagccgggcccgaaagatgcagcggcagcaggaacaacaacacgcgcccctgatcccgagaacgccatcttcgtgcacggtttcgcgtcgtcgtcgtccttctggtcggagacggtgttccgggagtcctcgtgcatcctcgacggttgcaggttgttcgcggtggatctcctcggcttcggccggagccccaagcctgccaactgcatgtacagggtgagagaccacgtggaggcgatcgagagaaccctcatcctcgccggcgacggtgaatcgcagagtctgatgagctccttccacctggtcagccactccatgggctgcaccatcgccctcgccttggctgccaagcacccgacgcgagtcaaatccatcacgctggttgcaccgccgtacttcctgccgtgcgagcagagagcgagccaggtggcgctcaacaggctggccgagaagaagctgtggccaccgctgctgttcggttccgcggtgatgtcgtggtacgagcacgtcgggaggaccgtctgcttcctcgtctgcaagaaccacctgctctgggagtggctcttcagcctcctcaacctcaacaggggcgtggatttcagggtgagggatctgacgaagcacactcaccactcggcgtggcacaccatgcacaacgtcatctgcggcggggcggcgctgcaggacgcgaacctggaggccgtcgcggcggccggcatcccggtgcaggtgctccacggcgccgacgaccaggtggttccggtcgagtgcggccgccatgtcaaggcgaagatcccgcgcgccaagctccgtgtcatggagaggcgcgaccactctacggtggttctcggcagggagagaggcttcgccgaggagctcaaggcgttctggtgcgcttcaaggtccccggttcacgtccaggatgcggagcaacaggaaacactagacatcagcagcccctcaaaagattcaaagatcatccaacatgacaacacctcagtgcccaccatcctcgctcggcgtctgcggattgatctttgcattagcagccttcaacaggagcttcgcgccatcatgcagcaagtcctggagttcccttttgcttaa

SEQ ID NO: 221321 - DNA, 5772 bp, Zea Mays
ggtcactctgcttacacaccacgccgagccacccactaaagcgtcgccgtgaaaaactaccaaaccccttcactgctccctcccatccaaaaccctaaccctacagccaccgcagtggctggccatgggggcgccgcgcgagctcgagctctccgacgaggtggagggcgaggaggacggcaccaccgactttgttttccgccttgccggtgaccccatcccgctcctcccgaccgactccaacccgctcccgctcttcgacctgctgtcccctcccgcgcgcccgctcgccgtctccgaccgacacgccaccgtcttcctcgcccaccccagcgggtttatagctgtgaggaccaaggagttaatcgaagccagcaaggaggcgcgcgagaagggcaagtcgagcactcgctgcgcgcaggactgctgcgtcgccgacgtgcccctccccggtgtatcccttatcgcgctctcccatgatgagtccgtgttagccgcctgcacacatactgagatccagttcttctcgctggcgtctctgctcacacataaggacgtggtaccatcctcatcatgtagcctggaacgagctgtcactgtgaaagatttcaagtggttaaatcatgcctctgcagcatatattgtactctcaaatgttgactgttgcaaagaaggaaatcatattgctgttgcaagagggaacaaacttaccatattatcaccagattttacggaaacatgctccatgtccctcttgttccagttgtggtctgacggaagtgattcaaagggcactaccatcaaagtggattctattggctgggtacatggtgatagtattgttattgggtgtgttcgattaaacgaagatgacaatgaagaaggataccttgttcaagttataaggactgaagaaagcacattttgtgagagcccaggcaagacagatgtttatacctataacgattttttccatggcattatggatgatgttttaccacccggagctggacctaatcttcttttgggttatctgcatcgctggggtctcatggtggcttccaataaaaagagcgtcgatgaacacattgcccttcttaagtggccatctgcacatgatgatgaaaaaactgtaacatatcttgaaatgttggaggataaatacagtcctaggattgacttgcaagagaatggcgatgacaatgtcatactagggtttggtgttgagaatgtttcattatttcaaaagatcactgtaccagttggacctgaacaaaaggaggttgcccctcaacatattctcctatgtttgactggtgagggcaaagtagctgtatattacctcgccaggatttcggacccttctgatttacctcatgctactgtgtctaccaatgaggactatggtgaaaaacatatttcacctgcaactgtatctgaaaaggagttgactccaagtgttgcaggctcagtatataagagtactctcacagaacatggtgctgagccatctagtgcgcaaacaggtagcaaccagcaggaatcaataaatgtgaaaaacagtagctcagcttcaaaagaacaggaaacaactgacaattcattgtttatctcttccaataagaagcccttagacaccaagcaagtgaatgtgactggtccacctgcagccttgcgtagcttagcgttaacaggaaacacaaaacctacaatattttccagcttttctactgaaggcatgaatccaacaggaggcaatgcacctaatgaattagcttcttccttgcaaccaagcagcagaagttttggaaacaaccaaactggtaaagaaggcctggattcagttcaatcagtgggaatatttggtggatctcaaaactccaataaagatggcaatgtctatggtttcaagtcttcattattcacctctagtggatctgtccctgccaagatcggagaaaggaatgaggttggttttggagttccttcgctgcaaaccagttacaccgctgatagaaaagtttttggtgctccagttgccttaagctctgtaccttcatcatctatatctccggctaaaccttccccaattggatattcatcaagtggatttcggacagcaaactctgaagcacctcaatcattgcgtggatcacctccgtcacagcaatctatgggcaaatcacataacagcaggacacaagcaccggcagaatattctagaaactccaagaagggcacaggattcgattctgaacaagacttgtctaaaaaattttacagtataaatgaaatgacgaaggagttagatgccctactagcatatatagaaaaggatggtggttttagagatgcctgcataaccatccaacagcgtcctctttctatgtttgaggatggcttacaaaactttttgcagctgttgcaggtcttcaagggcaaagtagaggagcaatgttcaaaaattgaagatctgaggaacaacatgtttcaagtttctgctaggcaaacttacatgaaaggaattgttagccagtcttcagataatcagtactgggatatatggaaccgtcagaaattgagtccagaattcgaagtgaagagacaaaatattctcagagctaaccaggatttgacaaatcagctggttgagctggagaggcacttcaataatctggagatgaacagatccagtgaaacaggaagagtggcttctaatcgaagagctgtttattctaacaagacaagttcgaggcagcactcctaagccagttaagcggtttccatcagtgaatgagcattcaaagggaatattagggtcttccaagggtggtgagcctgagactgctcgaaggaggagggaatcactggatatgagcctggctagtttggaacctcagaaaacaactgttaaaagaataacacagcaacaacgcctcaagatcagcagtgatctaccattcaggtcaaacaagaaaatatttgattctcaaatggcagcaatatcacaggaaaagtcaagcgatagctccaattcatctatagtagaatcatatgtaagcagactgcgttctctgagtgaagatgtaaacgataaactgtcaggaccccaacagaaccctttgttcaaatgggtaaaggaatcaactgggtcatctcaaacctcagagcaaaagcatttcgagttaccagggcaaatgaaaagtactgcacagtcttcaaaactgacaccatcttcaccaccatcattcagttacacacgtatgggtgcacaagatagtatcaacccatccagtgttccatcctttggaacaaaacatactgtgtctaagccaaatactctaaccttcaaaaccactataagccctaaaagtaatgccaacacagagccaaatatattaccttctataacagctccaaaaacttctctaagtccactgtctgtaaaaactgctggggagtctggagatttgcctacattaactatgaagaacagacaggatggtcagtcaatgccatctttggggaacataaaaggaccgggtgcttctctgcagaacaagggtggcatatttagagatctcgacaaatcgtcttttaattctgaacattccaagcctgctgcattacatgagaagactgaccagctaagtggggttggcgatgctgtgcagaacactgtgaaagatacctccaaaatggcacctcaaccttctgctttcttgccagctcctgttactcagaccaattcatactccttaaggccgactgtttcttcttcagccacatcaggtgcgaaaacttcagatgttttatctagctcaatgcagaaagtttctccaatagtacctgggggtactgtgtctagctcagtccctactcctgctaaggattcatcaactggattgagtcaaaatgcttccaaacctgaaacgctaatatcaaaggtaactagtaccatagtttctgcaagttcgacttctgtcatatcagtcactgaaagcaaaccttcagtgcctccaacaactggcgccagcttgccttctactcatgtctctgctcctcaaacagcaccaacaacatcggaatcagttttcacttccacaggaaaaaatgtaggaccaaacactgacaccatctcaaccgatgaagatgacatggaagaggaggcaccttctgcaagtgccgaactgaacttgggagcccttggtggattcggccttgggtcccagccttcttcaagtcctcaaaagtctaatccttttggtgcctcctttggtacatctggcaataaaagttcaggcacaccatttactttgacaaccagtccaggacagcttttccggccagcgtcgctaagcattccttcagctcagccagcccaaccatctcaatcaactagttctagttctttttctaattcgttctcaagtgggcttactggatttggacagcctgcacaaattggatctggccagcagtcagcttttgggaagcctgcacagattggagctggccagcatgcaggatttgggcagactgcccaaattcaatctggttttggccagcctgcccaaattcaatctggttttggccagtcagcacaaatcggaactgggcaacagtcaggatttgggaagcctgcacaaattggggctgtccagtcaggatttgggcagcctgcacagtttgctgctcaacagacacttggatcagtgctgggttcttttggacaacctccccagttaggaggcataggttctggaggatttggtggattttcaagtgcttctacatctgctggttttagttctttatcttcaggtaatgctggatttgctggtgctgcatcaggtgggggcttttcagcaccaactgcttctgcaggtggtggttttgctgctgctgctactggtggaggttttgctgctcttgcttccaaaagtggtggttttgttggtgcagcttcatctggtggtggttttggaggtgcctcccagggaggtggctttggcagtggtggtggtggattcggatcctttggtggtaatcaaggagctgggttctcggcatttggagcaagtggggctggaagaccggcagctgatttcttgacgcagatgagaaagtaggctccaggcaaatccccagacaggtttacgcattagctatagcatacacatgaggcgagttacttttatgttccactcttaagcgttgtttcggcacaggagctgtagcataaacatgaccgcagtataccctggactggatgagccctcgcttcgctccatctattgatgatggaggggggctaccatttgggagccttattgttttctcttcttttacaagacacagcaggtgtcaacagcagcatcgacggttccatggctgcatgaaatgtagaagaaaaaaaaagaggtcgtgtaaaggtcattgcttggacgtgattcccctccagctttgtcaatacaattcccagcctctttcccacaatattccctgtcacgagcctgcccgcgcatcaagatgaaacccgccaccacaccaaagagcttgctgcgatttgcaaaggcatggagaagaaagggatcgagagaaacaaaagcataagatacccagacacttaaacaagtaacaaccgaacacaatctttcgccaaatatatatatatacacgatataatataagaacggaacaaagaaaaagggatcgatgagcttgtattaatcccattgcaagctctacggcggcatcaatcaaactgag

SEQ ID NO: 221322 - DNA, 5077 bp, Zea Mays
attgttttcgcgaatgaaatcaatcaataaaaactgatgaaccaggccatcaccatggccggcggcggtcactctgcttacacaccacgccgagccacccactaaagcgtcgccgtgaaaaactaccaaaccccttcactgctccctcccatccaaaaccctaaccctacagccaccgcagtggctggccatgggggcgccgcgcgagctcgagctctccgacgaggtggagggcgaggaggacggcaccaccgactttgttttccgccttgccggtgaccccatcccgctcctcccgaccgactccaacccgctcccgctcttcgacctgctgtcccctcccgcgcgcccgctcgccgtctccgaccgacacgccaccgtcttcctcgcccaccccagcgggtttatagctgtgaggaccaaggagttaatcgaagccagcaaggaggcgcgcgagaagggcaagtcgagcactcgctgcgcgcaggactgctgcgtcgccgacgtgcccctccccggtgtatcccttatcgcgctctcccatgatgagtccgtgttagccgcctgcacacatactgagatccagttcttctcgctggcgtctctgctcacacataaggacgtggtaccatcctcatcatgtagcctggaacgagctgtcactgtgaaagatttcaagtggttaaatcatgcctctgcagcatatattgtactctcaaatggtgggttgctgtgtcatgggaatttgggtgaaggcctgaaagatgtgatggaaaacgtcgatgcagttgactgttgcaaagaaggaaatcatattgctgttgcaagagggaacaaacttaccatattatcaccagattttacggaaacatgctccatgtccctcttgttccagttgtggtctgacggaagtgattcaaagggcactaccatcaaagtggattctattggctgggtacatggtgatagtattgttattgggtgtgttcgattaaacgaagatgacaatgaagaaggataccttgttcaagttataaggactgaagaaagcacattttgtgagagcccaggcaagacagatgtttatacctataacgattttttccatggcattatggatgatgttttaccacccggagctggacctaatcttcttttgggttatctgcatcgctggggtctcatggtggcttccaataaaaagagcgtcgatgaacacattgcccttcttaagtggccatctgcacatgatgatgaaaaaactgtaacatatcttgaaatgttggaggataaatacagtcctaggattgacttgcaagagaatggcgatgacaatgtcatactagggtttggtgttgagaatgtttcattatttcaaaagatcactgtaccagttggacctgaacaaaaggaggttgcccctcaacatattctcctatgtttgactggtgagggcaaagtagctgtatattacctcgccaggatttcggacccttctgatttacctcatgctactgtgtctaccaatgaggactatggtgaaaaacatatttcacctgcaactgtatctgaaaaggagttgactccaagtgttgcaggctcagtatataagagtactctcacagaacatggtgctgagccatctagtgcgcaaacaggtagcaaccagcaggaatcaataaatgtgaaaaacagtagctcagcttcaaaagaacaggaaacaactgacaattcattgtttatctcttccaataagaagcccttagacaccaagcaagtgaatgtgactggtccacctgcagccttgcgtagcttagcgttaacaggaaacacaaaacctacaatattttccagcttttctactgaaggcatgaatccaacaggaggcaatgcacctaatgaattagcttcttccttgcaaccaagcagcagaagttttggaaacaaccaaactggtaaagaaggcctggattcagttcaatcagtgggaatatttggtggatctcaaaactccaataaagatggcaatgtctatggtttcaagtcttcattattcacctctagtggatctgtccctgccaagatcggagaaaggaatgaggttggttttggagttccttcgctgcaaaccagttacaccgctgatagaaaagtttttggtgctccagttgccttaagctctgtaccttcatcatctatatctccggctaaaccttccccaattggatattcatcaagtggatttcggacagcaaactctgaagcacctcaatcattgcgtggatcacctccgtcacagcaatctatgggcaaatcacataacagcaggacacaagcaccggcagaatattctagaaactccaagaagggcacaggattcgattctgaacaagacttgtctaaaaaattttacagtataaatgaaatgacgaaggagttagatgccctactagcatatatagaaaaggatggtggttttagagatgcctgcataaccatccaacagcgtcctctttctatgtttgaggatggcttacaaaactttttgcagctgttgcaggtcttcaagggcaaagtagaggagcaatgttcaaaaattgaagatctgaggaacaacatgtttcaagtttctgctaggcaaacttacatgaaaggaattgttagccagtcttcagataatcagtactgggatatatggaaccgtcagaaattgagtccagaattcgaagtgaagagacaaaatattctcagagctaaccaggatttgacaaatcagctggttgagctggagaggcacttcaataatctggagatgaacagatccagtgaaacaggaagagtggcttctaatcgaagagctgtttattctaacaagacaagttcgagtcagacacaattatccagtgtatatagtgcactgaactcgcagttggcagctgctgagcagctatctgaatgcctttcaaagcagatatctgtgttaaatattggttctcctagtaggaagcaggggatggtgaccaaaaagttgtttgagtcaattggtttagcccacacaactgatgcaaccaaattttcaggcagcactcctaagccagttaagcggtttccatcagtgaatgagcattcaaagggaatattagggtcttccaagggtggtgagcctgagactgctcgaaggaggagggaatcactggatatgagcctggctagtttggaacctcagaaaacaactgttaaaagaataacacagcaacaacgcctcaagatcagcagtgatctaccattcaggtcaaacaagaaaatatttgattctcaaatggcagcaatatcacaggaaaagtcaagcgatagctccaattcatctatagtagaatcatatgtaagcagactgcgttctctgagtgaagatgtaaacgataaactgtcaggaccccaacagaaccctttgttcaaatgggtaaaggaatcaactgggtcatctcaaacctcagagcaaaagcatttcgagttaccagggcaaatgaaaagtactgcacagtcttcaaaactgacaccatcttcaccaccatcattcagttacacacgtatgggtgcacaagatagtatcaacccatccagtgttccatcctttggaacaaaacatactgtgtctaagccaaatactctaaccttcaaaaccactataagccctaaaagtaatgccaacacagagccaaatatattaccttctataacagctccaaaaacttctctaagtccactgtctgtaaaaactgctggggagtctggagatttgcctacattaactatgaagaacagacaggatggtcagtcaatgccatctttggggaacataaaaggaccgggtgcttctctgcagaacaagggtggcatatttagagatctcgacaaatcgtcttttaattctgaacattccaagcctgctgcattacatgagaagactgaccagctaagtggggttggcgatgctgtgcagaacactgtgaaagatacctccaaaatggcacctcaaccttctgctttcttgccagctcctgttactcagaccaattcatactccttaaggccgactgtttcttcttcagccacatcaggtggtggttttgctgctgctgctactggtggaggttttgctgctcttgcttccaaaagtggtggttttgttggtgcagcttcatctggtggtggttttggaggtgcctcccagggaggtggctttggcagtggtggtggtggattcggatcctttggtggtaatcaaggagctgggttctcggcatttggagcaagtggggctggaagaccggcagctgatttcttgacgcagatgagaaagtaggctccaggcaaatccccagacaggtttacgcattagctatagcatacacatgaggcgagttacttttatgttccactcttaagcgttgtttcggcacaggagctgtagcataaacatgaccgcagtataccctggactggatgagccctcgcttcgctccatctattgatgatggaggggggctaccatttgggagccttattgttttctcttcttttacaagacacagcaggtgtcaacagcagcatcgacggttggtcttggattccctactggtttctctccagggcgaccaacttgctaaggctttcatggctctctcttcaggttccatggctgcatgaaatgtagaagaaaaaaaaagaggtcgtgtaaaggtcattgcttggacgtgattcccctccagctttgtcaatacaattcccagcctctttcccacaatattccctgtcacgagcctgcccgcgcatcaagatgaaacccgccaccacaccaaagagcttgctgcgatttgcaaaggcatggagaagaaagggatcgagagaaacaaaagcataagatacccagacacttaaacaagtaacaaccgaacacaatctttcgccaaatatatatatatacacgatataatataagaacggaacaaagaaaaagggatcgatgagcttgtattaatcccattgcaagctctacggcggcatcaatcaaactgag

SEQ ID NO: 221323 - DNA, 5998 bp, Zea Mays
gaaagctcaactcaaaagtccattgttttcgcgaatgaaatcaatcaataaaaactgatgaaccaggccatcaccatggccggcggcggtcactctgcttacacaccacgccgagccacccactaaagcgtcgccgtgaaaaactaccaaaccccttcactgctccctcccatccaaaaccctaaccctacagccaccgcagtggctggccatgggggcgccgcgcgagctcgagctctccgacgaggtggagggcgaggaggacggcaccaccgactttgttttccgccttgccggtgaccccatcccgctcctcccgaccgactccaacccgctcccgctcttcgacctgctgtcccctcccgcgcgcccgctcgccgtctccgaccgacacgccaccgtcttcctcgcccaccccagcgggtttatagctgtgaggaccaaggagttaatcgaagccagcaaggaggcgcgcgagaagggcaagtcgagcactcgctgcgcgcaggactgctgcgtcgccgacgtgcccctccccggtgtatcccttatcgcgctctcccatgatgagtccgtgttagccgcctgcacacatactgagatccagttcttctcgctggcgtctctgctcacacataaggacgtggtaccatcctcatcatgtagcctggaacgagctgtcactgtgaaagatttcaagtggttaaatcatgcctctgcagcatatattgtactctcaaatggtgggttgctgtgtcatgggaatttgggtgaaggcctgaaagatgtgatggaaaacgtcgatgcagttgactgttgcaaagaaggaaatcatattgctgttgcaagagggaacaaacttaccatattatcaccagattttacggaaacatgctccatgtccctcttgttccagttgtggtctgacggaagtgattcaaagggcactaccatcaaagtggattctattggctgggtacatggtgatagtattgttattgggtgtgttcgattaaacgaagatgacaatgaagaaggataccttgttcaagttataaggactgaagaaagcacattttgtgagagcccaggcaagacagatgtttatacctataacgattttttccatggcattatggatgatgttttaccacccggagctggacctaatcttcttttgggttatctgcatcgctggggtctcatggtggcttccaataaaaagagcgtcgatgaacacattgcccttcttaagtggccatctgcacatgatgatgaaaaaactgtaacatatcttgaaatgttggaggataaatacagtcctaggattgacttgcaagagaatggcgatgacaatgtcatactagggtttggtgttgagaatgtttcattatttcaaaagatcactgtaccagttggacctgaacaaaaggaggttgcccctcaacatattctcctatgtttgactggtgagggcaaagtagctgtatattacctcgccaggatttcggacccttctgatttacctcatgctactgtgtctaccaatgaggactatggtgaaaaacatatttcacctgcaactgtatctgaaaaggagttgactccaagtgttgcaggctcagtatataagagtactctcacagaacatggtgctgagccatctagtgcgcaaacaggtagcaaccagcaggaatcaataaatgtgaaaaacagtagctcagcttcaaaagaacaggaaacaactgacaattcattgtttatctcttccaataagaagcccttagacaccaagcaagtgaatgtgactggtccacctgcagccttgcgtagcttagcgttaacaggaaacacaaaacctacaatattttccagcttttctactgaaggcatgaatccaacaggaggcaatgcacctaatgaattagcttcttccttgcaaccaagcagcagaagttttggaaacaaccaaactggtaaagaaggcctggattcagttcaatcagtgggaatatttggtggatctcaaaactccaataaagatggcaatgtctatggtttcaagtcttcattattcacctctagtggatctgtccctgccaagatcggagaaaggaatgaggttggttttggagttccttcgctgcaaaccagttacaccgctgatagaaaagtttttggtgctccagttgccttaagctctgtaccttcatcatctatatctccggctaaaccttccccaattggatattcatcaagtggatttcggacagcaaactctgaagcacctcaatcattgcgtggatcacctccgtcacagcaatctatgggcaaatcacataacagcaggacacaagcaccggcagaatattctagaaactccaagaagggcacaggattcgattctgaacaagacttgtctaaaaaattttacagtataaatgaaatgacgaaggagttagatgccctactagcatatatagaaaaggatggtggttttagagatgcctgcataaccatccaacagcgtcctctttctatgtttgaggatggcttacaaaactttttgcagctgttgcaggtcttcaagggcaaagtagaggagcaatgttcaaaaattgaagatctgaggaacaacatgtttcaagtttctgctaggcaaacttacatgaaaggaattgttagccagtcttcagataatcagtactgggatatatggaaccgtcagaaattgagtccagaattcgaagtgaagagacaaaatattctcagagctaaccaggatttgacaaatcagctggttgagctggagaggcacttcaataatctggagatgaacagatccagtgaaacaggaagagtggcttctaatcgaagagctgtttattctaacaagacaagttcgagtcagacacaattatccagtgtatatagtgcactgaactcgcagttggcagctgctgagcagctatctgaatgcctttcaaagcagatatctgtgttaaatattggttctcctagtaggaagcaggggatggtgaccaaaaagttgtttgagtcaattggtttagcccacacaactgatgcaaccaaattttcaggcagcactcctaagccagttaagcggtttccatcagtgaatgagcattcaaagggaatattagggtcttccaagggtggtgagcctgagactgctcgaaggaggagggaatcactggatatgagcctggctagtttggaacctcagaaaacaactgttaaaagaataacacagcaacaacgcctcaagatcagcagtgatctaccattcaggtcaaacaagaaaatatttgattctcaaatggcagcaatatcacaggaaaagtcaagcgatagctccaattcatctatagtagaatcatatgtaagcagactgcgttctctgagtgaagatgtaaacgataaactgtcaggaccccaacagaaccctttgttcaaatgggtaaaggaatcaactgggtcatctcaaacctcagagcaaaagcatttcgagttaccagggcaaatgaaaagtactgcacagtcttcaaaactgacaccatcttcaccaccatcattcagttacacacgtatgggtgcacaagatagtatcaacccatccagtgttccatcctttggaacaaaacatactgtgtctaagccaaatactctaaccttcaaaaccactataagccctaaaagtaatgccaacacagagccaaatatattaccttctataacagctccaaaaacttctctaagtccactgtctgtaaaaactgctggggagtctggagatttgcctacattaactatgaagaacagacaggatggtcagtcaatgccatctttggggaacataaaaggaccgggtgcttctctgcagaacaagggtggcatatttagagatctcgacaaatcgtcttttaattctgaacattccaagcctgctgcattacatgagaagactgaccagctaagtggggttggcgatgctgtgcagaacactgtgaaagatacctccaaaatggcacctcaaccttctgctttcttgccagctcctgttactcagaccaattcatactccttaaggccgactgtttcttcttcagccacatcaggtgcgaaaacttcagatgttttatctagctcaatgcagaaagtttctccaatagtacctgggggtactgtgtctagctcagtccctactcctgctaaggattcatcaactggattgagtcaaaatgcttccaaacctgaaacgctaatatcaaaggtaactagtaccatagtttctgcaagttcgacttctgtcatatcagtcactgaaagcaaaccttcagtgcctccaacaactggcgccagcttgccttctactcatgtctctgctcctcaaacagcaccaacaacatcggaatcagttttcacttccacaggaaaaaatgtaggaccaaacactgacaccatctcaaccgatgaagatgacatggaagaggaggcaccttctgcaagtgccgaactgaacttgggagcccttggtggattcggccttgggtcccagccttcttcaagtcctcaaaagtctaatccttttggtgcctcctttggtacatctggcaataaaagttcaggcacaccatttactttgacaaccagtccaggacagcttttccggccagcgtcgctaagcattccttcagctcagccagcccaaccatctcaatcaactagttctagttctttttctaattcgttctcaagtgggcttactggatttggacagcctgcacaaattggatctggccagcagtcagcttttgggaagcctgcacagattggagctggccagcatgcaggatttgggcagactgcccaaattcaatctggttttggccagcctgcccaaattcaatctggttttggccagtcagcacaaatcggaactgggcaacagtcaggatttgggaagcctgcacaaattggggctgtccagtcaggatttgggcagcctgcacagtttgctgctcaacagacacttggatcagtgctgggttcttttggacaacctccccagttaggaggcataggttctggaggatttggtggattttcaagtgcttctacatctgctggttttagttctttatcttcaggtggtggtggattcggatcctttggtggtaatcaaggagctgggttctcggcatttggagcaagtggggctggaagaccggcagctgatttcttgacgcagatgagaaagtaggctccaggcaaatccccagacaggtttacgcattagctatagcatacacatgaggcgagttacttttatgttccactcttaagcgttgtttcggcacaggagctgtagcataaacatgaccgcagtataccctggactggatgagccctcgcttcgctccatctattgatgatggaggggggctaccatttgggagccttattgttttctcttcttttacaagacacagcaggtgtcaacagcagcatcgacggttggtcttggattccctactggtttctctccagggcgaccaacttgctaaggctttcatggctctctcttcaggttccatggctgcatgaaatgtagaagaaaaaaaaagaggtcgtgtaaaggtcattgcttggacgtgattcccctccagctttgtcaatacaattcccagcctctttcccacaatattccctgtcacgagcctgcccgcgcatcaagatgaaacccgccaccacaccaaagagcttgctgcgatttgcaaaggcatggagaagaaagggatcgagagaaacaaaagcataagatacccagacacttaaacaagtaacaaccgaacacaatctttcgccaaatatatatatatacacgatataatataagaacggaacaaagaaaaagggatcgatgagcttgtattaatcccattgcaagctctacggcggcatcaatcaaactgag

SEQ ID NO: 221324 - DNA, 6055 bp, Zea Mays
ccgaaagctcaactcaaaagtccattgttttcgcgaatgaaatcaatcaataaaaactgatgaaccaggccatcaccatggccggcggcggtcactctgcttacacaccacgccgagccacccactaaagcgtcgccgtgaaaaactaccaaaccccttcactgctccctcccatccaaaaccctaaccctacagccaccgcagtggctggccatgggggcgccgcgcgagctcgagctctccgacgaggtggagggcgaggaggacggcaccaccgactttgttttccgccttgccggtgaccccatcccgctcctcccgaccgactccaacccgctcccgctcttcgacctgctgtcccctcccgcgcgcccgctcgccgtctccgaccgacacgccaccgtcttcctcgcccaccccagcgggtttatagctgtgaggaccaaggagttaatcgaagccagcaaggaggcgcgcgagaagggcaagtcgagcactcgctgcgcgcaggactgctgcgtcgccgacgtgcccctccccggtgtatcccttatcgcgctctcccatgatgagtccgtgttagccgcctgcacacatactgagatccagttcttctcgctggcgtctctgctcacacataaggacgtggtaccatcctcatcatgtagcctggaacgagctgtcactgtgaaagatttcaagtggttaaatcatgcctctgcagcatatattgtactctcaaatgttgactgttgcaaagaaggaaatcatattgctgttgcaagagggaacaaacttaccatattatcaccagattttacggaaacatgctccatgtccctcttgttccagttgtggtctgacggaagtgattcaaagggcactaccatcaaagtggattctattggctgggtacatggtgatagtattgttattgggtgtgttcgattaaacgaagatgacaatgaagaaggataccttgttcaagttataaggactgaagaaagcacattttgtgagagcccaggcaagacagatgtttatacctataacgattttttccatggcattatggatgatgttttaccacccggagctggacctaatcttcttttgggttatctgcatcgctggggtctcatggtggcttccaataaaaagagcgtcgatgaacacattgcccttcttaagtggccatctgcacatgatgatgaaaaaactgtaacatatcttgaaatgttggaggataaatacagtcctaggattgacttgcaagagaatggcgatgacaatgtcatactagggtttggtgttgagaatgtttcattatttcaaaagatcactgtaccagttggacctgaacaaaaggaggttgcccctcaacatattctcctatgtttgactggtgagggcaaagtagctgtatattacctcgccaggatttcggacccttctgatttacctcatgctactgtgtctaccaatgaggactatggtgaaaaacatatttcacctgcaactgtatctgaaaaggagttgactccaagtgttgcaggctcagtatataagagtactctcacagaacatggtgctgagccatctagtgcgcaaacaggtagcaaccagcaggaatcaataaatgtgaaaaacagtagctcagcttcaaaagaacaggaaacaactgacaattcattgtttatctcttccaataagaagcccttagacaccaagcaagtgaatgtgactggtccacctgcagccttgcgtagcttagcgttaacaggaaacacaaaacctacaatattttccagcttttctactgaaggcatgaatccaacaggaggcaatgcacctaatgaattagcttcttccttgcaaccaagcagcagaagttttggaaacaaccaaactggtaaagaaggcctggattcagttcaatcagtgggaatatttggtggatctcaaaactccaataaagatggcaatgtctatggtttcaagtcttcattattcacctctagtggatctgtccctgccaagatcggagaaaggaatgaggttggttttggagttccttcgctgcaaaccagttacaccgctgatagaaaagtttttggtgctccagttgccttaagctctgtaccttcatcatctatatctccggctaaaccttccccaattggatattcatcaagtggatttcggacagcaaactctgaagcacctcaatcattgcgtggatcacctccgtcacagcaatctatgggcaaatcacataacagcaggacacaagcaccggcagaatattctagaaactccaagaagggcacaggattcgattctgaacaagacttgtctaaaaaattttacagtataaatgaaatgacgaaggagttagatgccctactagcatatatagaaaaggatggtggttttagagatgcctgcataaccatccaacagcgtcctctttctatgtttgaggatggcttacaaaactttttgcagctgttgcaggtcttcaagggcaaagtagaggagcaatgttcaaaaattgaagatctgaggaacaacatgtttcaagtttctgctaggcaaacttacatgaaaggaattgttagccagtcttcagataatcagtactgggatatatggaaccgtcagaaattgagtccagaattcgaagtgaagagacaaaatattctcagagctaaccaggatttgacaaatcagctggttgagctggagaggcacttcaataatctggagatgaacagatccagtgaaacaggaagagtggcttctaatcgaagagctgtttattctaacaagacaagttcgagtcagacacaattatccagtgtatatagtgcactgaactcgcagttggcagctgctgagcagctatctgaatgcctttcaaagcagatatctgtgttaaatattggttctcctagtaggaagcaggggatggtgaccaaaaagttgtttgagtcaattggtttagcccacacaactgatgcaaccaaattttcaggcagcactcctaagccagttaagcggtttccatcagtgaatgagcattcaaagggaatattagggtcttccaagggtggtgagcctgagactgctcgaaggaggagggaatcactggatatgagcctggctagtttggaacctcagaaaacaactgttaaaagaataacacagcaacaacgcctcaagatcagcagtgatctaccattcaggtcaaacaagaaaatatttgattctcaaatggcagcaatatcacaggaaaagtcaagcgatagctccaattcatctatagtagaatcatatgtaagcagactgcgttctctgagtgaagatgtaaacgataaactgtcaggaccccaacagaaccctttgttcaaatgggtaaaggaatcaactgggtcatctcaaacctcagagcaaaagcatttcgagttaccagggcaaatgaaaagtactgcacagtcttcaaaactgacaccatcttcaccaccatcattcagttacacacgtatgggtgcacaagatagtatcaacccatccagtgttccatcctttggaacaaaacatactgtgtctaagccaaatactctaaccttcaaaaccactataagccctaaaagtaatgccaacacagagccaaatatattaccttctataacagctccaaaaacttctctaagtccactgtctgtaaaaactgctggggagtctggagatttgcctacattaactatgaagaacagacaggatggtcagtcaatgccatctttggggaacataaaaggaccgggtgcttctctgcagaacaagggtggcatatttagagatctcgacaaatcgtcttttaattctgaacattccaagcctgctgcattacatgagaagactgaccagctaagtggggttggcgatgctgtgcagaacactgtgaaagatacctccaaaatggcacctcaaccttctgctttcttgccagctcctgttactcagaccaattcatactccttaaggccgactgtttcttcttcagccacatcaggtgcgaaaacttcagatgttttatctagctcaatgcagaaagtttctccaatagtacctgggggtactgtgtctagctcagtccctactcctgctaaggattcatcaactggattgagtcaaaatgcttccaaacctgaaacgctaatatcaaaggtaactagtaccatagtttctgcaagttcgacttctgtcatatcagtcactgaaagcaaaccttcagtgcctccaacaactggcgccagcttgccttctactcatgtctctgctcctcaaacagcaccaacaacatcggaatcagttttcacttccacaggaaaaaatgtaggaccaaacactgacaccatctcaaccgatgaagatgacatggaagaggaggcaccttctgcaagtgccgaactgaacttgggagcccttggtggattcggccttgggtcccagccttcttcaagtcctcaaaagtctaatccttttggtgcctcctttggtacatctggcaataaaagttcaggcacaccatttactttgacaaccagtccaggacagcttttccggccagcgtcgctaagcattccttcagctcagccagcccaaccatctcaatcaactagttctagttctttttctaattcgttctcaagtgggcttactggatttggacagcctgcacaaattggatctggccagcagtcagcttttgggaagcctgcacagattggagctggccagcatgcaggatttgggcagactgcccaaattcaatctggttttggccagcctgcccaaattcaatctggttttggccagtcagcacaaatcggaactgggcaacagtcaggatttgggaagcctgcacaaattggggctgtccagtcaggatttgggcagcctgcacagtttgctgctcaacagacacttggatcagtgctgggttcttttggacaacctccccagttaggaggcataggttctggaggatttggtggattttcaagtgcttctacatctgctggttttagttctttatcttcaggtaatgctggatttgctggtgctgcatcaggtgggggcttttcagcaccaactgcttctgcaggtggtggttttgctgctgctgctactggtggaggttttgctgctcttgcttccaaaagtggtggttttgttggtgcagcttcatctggtggtggttttggaggtgcctcccagggaggtggctttggcagtggtggtggtggattcggatcctttggtggtaatcaaggagctgggttctcggcatttggagcaagtggggctggaagaccggcagctgatttcttgacgcagatgagaaagtaggctccaggcaaatccccagacaggtttacgcattagctatagcatacacatgaggcgagttacttttatgttccactcttaagcgttgtttcggcacaggagctgtagcataaacatgaccgcagtataccctggactggatgagccctcgcttcgctccatctattgatgatggaggggggctaccatttgggagccttattgttttctcttcttttacaagacacagcaggtgtcaacagcagcatcgacggttccatggctgcatgaaatgtagaagaaaaaaaaagaggtcgtgtaaaggtcattgcttggacgtgattcccctccagctttgtcaatacaattcccagcctctttcccacaatattccctgtcacgagcctgcccgcgcatcaagatgaaacccgccaccacaccaaagagcttgctgcgatttgcaaaggcatggagaagaaagggatcgagagaaacaaaagcataagatacccagacacttaaacaagtaacaaccgaacacaatctttcgccaaatatatatatatacacgatataatataagaacggaacaaagaaaaagggatcgatgagcttgtattaatcccattgcaagctctacggcggcatcaatcaaactgag

SEQ ID NO: 221325 - DNA, 6122 bp, Zea Mays
ctcactccgcggaccttccttgatccgaaagctcaactcaaaagtccattgttttcgcgaatgaaatcaatcaataaaaactgatgaaccaggccatcaccatggccggcggcggtcactctgcttacacaccacgccgagccacccactaaagcgtcgccgtgaaaaactaccaaaccccttcactgctccctcccatccaaaaccctaaccctacagccaccgcagtggctggccatgggggcgccgcgcgagctcgagctctccgacgaggtggagggcgaggaggacggcaccaccgactttgttttccgccttgccggtgaccccatcccgctcctcccgaccgactccaacccgctcccgctcttcgacctgctgtcccctcccgcgcgcccgctcgccgtctccgaccgacacgccaccgtcttcctcgcccaccccagcgggtttatagctgtgaggaccaaggagttaatcgaagccagcaaggaggcgcgcgagaagggcaagtcgagcactcgctgcgcgcaggactgctgcgtcgccgacgtgcccctccccggtgtatcccttatcgcgctctcccatgatgagtccgtgttagccgcctgcacacatactgagatccagttcttctcgctggcgtctctgctcacacataaggacgtggtaccatcctcatcatgtagcctggaacgagctgtcactgtgaaagatttcaagtggttaaatcatgcctctgcagcatatattgtactctcaaatggtgggttgctgtgtcatgggaatttgggtgaaggcctgaaagatgtgatggaaaacgtcgatgcagttgactgttgcaaagaaggaaatcatattgctgttgcaagagggaacaaacttaccatattatcaccagattttacggaaacatgctccatgtccctcttgttccagttgtggtctgacggaagtgattcaaagggcactaccatcaaagtggattctattggctgggtacatggtgatagtattgttattgggtgtgttcgattaaacgaagatgacaatgaagaaggataccttgttcaagttataaggactgaagaaagcacattttgtgagagcccaggcaagacagatgtttatacctataacgattttttccatggcattatggatgatgttttaccacccggagctggacctaatcttcttttgggttatctgcatcgctggggtctcatggtggcttccaataaaaagagcgtcgatgaacacattgcccttcttaagtggccatctgcacatgatgatgaaaaaactgtaacatatcttgaaatgttggaggataaatacagtcctaggattgacttgcaagagaatggcgatgacaatgtcatactagggtttggtgttgagaatgtttcattatttcaaaagatcactgtaccagttggacctgaacaaaaggaggttgcccctcaacatattctcctatgtttgactggatttcggacccttctgatttacctcatgctactgtgtctaccaatgaggactatggtgaaaaacatatttcacctgcaactgtatctgaaaaggagttgactccaagtgttgcaggctcagtatataagagtactctcacagaacatggtgctgagccatctagtgcgcaaacaggtagcaaccagcaggaatcaataaatgtgaaaaacagtagctcagcttcaaaagaacaggaaacaactgacaattcattgtttatctcttccaataagaagcccttagacaccaagcaagtgaatgtgactggtccacctgcagccttgcgtagcttagcgttaacaggaaacacaaaacctacaatattttccagcttttctactgaaggcatgaatccaacaggaggcaatgcacctaatgaattagcttcttccttgcaaccaagcagcagaagttttggaaacaaccaaactggtaaagaaggcctggattcagttcaatcagtgggaatatttggtggatctcaaaactccaataaagatggcaatgtctatggtttcaagtcttcattattcacctctagtggatctgtccctgccaagatcggagaaaggaatgaggttggttttggagttccttcgctgcaaaccagttacaccgctgatagaaaagtttttggtgctccagttgccttaagctctgtaccttcatcatctatatctccggctaaaccttccccaattggatattcatcaagtggatttcggacagcaaactctgaagcacctcaatcattgcgtggatcacctccgtcacagcaatctatgggcaaatcacataacagcaggacacaagcaccggcagaatattctagaaactccaagaagggcacaggattcgattctgaacaagacttgtctaaaaaattttacagtataaatgaaatgacgaaggagttagatgccctactagcatatatagaaaaggatggtggttttagagatgcctgcataaccatccaacagcgtcctctttctatgtttgaggatggcttacaaaactttttgcagctgttgcaggtcttcaagggcaaagtagaggagcaatgttcaaaaattgaagatctgaggaacaacatgtttcaagtttctgctaggcaaacttacatgaaaggaattgttagccagtcttcagataatcagtactgggatatatggaaccgtcagaaattgagtccagaattcgaagtgaagagacaaaatattctcagagctaaccaggatttgacaaatcagctggttgagctggagaggcacttcaataatctggagatgaacagatccagtgaaacaggaagagtggcttctaatcgaagagctgtttattctaacaagacaagttcgagtcagacacaattatccagtgtatatagtgcactgaactcgcagttggcagctgctgagcagctatctgaatgcctttcaaagcagatatctgtgttaaatattggttctcctagtaggaagcaggggatggtgaccaaaaagttgtttgagtcaattggtttagcccacacaactgatgcaaccaaattttcaggcagcactcctaagccagttaagcggtttccatcagtgaatgagcattcaaagggaatattagggtcttccaagggtggtgagcctgagactgctcgaaggaggagggaatcactggatatgagcctggctagtttggaacctcagaaaacaactgttaaaagaataacacagcaacaacgcctcaagatcagcagtgatctaccattcaggtcaaacaagaaaatatttgattctcaaatggcagcaatatcacaggaaaagtcaagcgatagctccaattcatctatagtagaatcatatgtaagcagactgcgttctctgagtgaagatgtaaacgataaactgtcaggaccccaacagaaccctttgttcaaatgggtaaaggaatcaactgggtcatctcaaacctcagagcaaaagcatttcgagttaccagggcaaatgaaaagtactgcacagtcttcaaaactgacaccatcttcaccaccatcattcagttacacacgtatgggtgcacaagatagtatcaacccatccagtgttccatcctttggaacaaaacatactgtgtctaagccaaatactctaaccttcaaaaccactataagccctaaaagtaatgccaacacagagccaaatatattaccttctataacagctccaaaaacttctctaagtccactgtctgtaaaaactgctggggagtctggagatttgcctacattaactatgaagaacagacaggatggtcagtcaatgccatctttggggaacataaaaggaccgggtgcttctctgcagaacaagggtggcatatttagagatctcgacaaatcgtcttttaattctgaacattccaagcctgctgcattacatgagaagactgaccagctaagtggggttggcgatgctgtgcagaacactgtgaaagatacctccaaaatggcacctcaaccttctgctttcttgccagctcctgttactcagaccaattcatactccttaaggccgactgtttcttcttcagccacatcaggtgcgaaaacttcagatgttttatctagctcaatgcagaaagtttctccaatagtacctgggggtactgtgtctagctcagtccctactcctgctaaggattcatcaactggattgagtcaaaatgcttccaaacctgaaacgctaatatcaaaggtaactagtaccatagtttctgcaagttcgacttctgtcatatcagtcactgaaagcaaaccttcagtgcctccaacaactggcgccagcttgccttctactcatgtctctgctcctcaaacagcaccaacaacatcggaatcagttttcacttccacaggaaaaaatgtaggaccaaacactgacaccatctcaaccgatgaagatgacatggaagaggaggcaccttctgcaagtgccgaactgaacttgggagcccttggtggattcggccttgggtcccagccttcttcaagtcctcaaaagtctaatccttttggtgcctcctttggtacatctggcaataaaagttcaggcacaccatttactttgacaaccagtccaggacagcttttccggccagcgtcgctaagcattccttcagctcagccagcccaaccatctcaatcaactagttctagttctttttctaattcgttctcaagtgggcttactggatttggacagcctgcacaaattggatctggccagcagtcagcttttgggaagcctgcacagattggagctggccagcatgcaggatttgggcagactgcccaaattcaatctggttttggccagcctgcccaaattcaatctggttttggccagtcagcacaaatcggaactgggcaacagtcaggatttgggaagcctgcacaaattggggctgtccagtcaggatttgggcagcctgcacagtttgctgctcaacagacacttggatcagtgctgggttcttttggacaacctccccagttaggaggcataggttctggaggatttggtggattttcaagtgcttctacatctgctggttttagttctttatcttcaggtggtggttttgctgctgctgctactggtggaggttttgctgctcttgcttccaaaagtggtggttttgttggtgcagcttcatctggtggtggttttggaggtgcctcccagggaggtggctttggcagtggtggtggtggattcggatcctttggtggtaatcaaggagctgggttctcggcatttggagcaagtggggctggaagaccggcagctgatttcttgacgcagatgagaaagtaggctccaggcaaatccccagacaggtttacgcattagctatagcatacacatgaggcgagttacttttatgttccactcttaagcgttgtttcggcacaggagctgtagcataaacatgaccgcagtataccctggactggatgagccctcgcttcgctccatctattgatgatggaggggggctaccatttgggagccttattgttttctcttcttttacaagacacagcaggtgtcaacagcagcatcgacggttggtcttggattccctactggtttctctccagggcgaccaacttgctaaggctttcatggctctctcttcaggttccatggctgcatgaaatgtagaagaaaaaaaaagaggtcgtgtaaaggtcattgcttggacgtgattcccctccagctttgtcaatacaattcccagcctctttcccacaatattccctgtcacgagcctgcccgcgcatcaagatgaaacccgccaccacaccaaagagcttgctgcgatttgcaaaggcatggagaagaaagggatcgagagaaacaaaagcataagatacccagacacttaaacaagtaacaaccgaacacaatctttcgccaaatatatatatatacacgatataatataagaacggaacaaagaaaaagggatcgatgagcttgtattaatcccattgcaagctctacggcggcatcaatcaaactgag

SEQ ID NO: 221326 - DNA, 6348 bp, Zea Mays
ctcactccgcggaccttccttgatccgaaagctcaactcaaaagtccattgttttcgcgaatgaaatcaatcaataaaaactgatgaaccaggccatcaccatggccggcggcggtcactctgcttacacaccacgccgagccacccactaaagcgtcgccgtgaaaaactaccaaaccccttcactgctccctcccatccaaaaccctaaccctacagccaccgcagtggctggccatgggggcgccgcgcgagctcgagctctccgacgaggtggagggcgaggaggacggcaccaccgactttgttttccgccttgccggtgaccccatcccgctcctcccgaccgactccaacccgctcccgctcttcgacctgctgtcccctcccgcgcgcccgctcgccgtctccgaccgacacgccaccgtcttcctcgcccaccccagcgggtttatagctgtgaggaccaaggagttaatcgaagccagcaaggaggcgcgcgagaagggcaagtcgagcactcgctgcgcgcaggactgctgcgtcgccgacgtgcccctccccggtgtatcccttatcgcgctctcccatgatgagtccgtgttagccgcctgcacacatactgagatccagttcttctcgctggcgtctctgctcacacataaggacgtggtaccatcctcatcatgtagcctggaacgagctgtcactgtgaaagatttcaagtggttaaatcatgcctctgcagcatatattgtactctcaaatggtgggttgctgtgtcatgggaatttgggtgaaggcctgaaagatgtgatggaaaacgtcgatgcagttgactgttgcaaagaaggaaatcatattgctgttgcaagagggaacaaacttaccatattatcaccagattttacggaaacatgctccatgtccctcttgttccagttgtggtctgacggaagtgattcaaagggcactaccatcaaagtggattctattggctgggtacatggtgatagtattgttattgggtgtgttcgattaaacgaagatgacaatgaagaaggataccttgttcaagttataaggactgaagaaagcacattttgtgagagcccaggcaagacagatgtttatacctataacgattttttccatggcattatggatgatgttttaccacccggagctggacctaatcttcttttgggttatctgcatcgctggggtctcatggtggcttccaataaaaagagcgtcgatgaacacattgcccttcttaagtggccatctgcacatgatgatgaaaaaactgtaacatatcttgaaatgttggaggataaatacagtcctaggattgacttgcaagagaatggcgatgacaatgtcatactagggtttggtgttgagaatgtttcattatttcaaaagatcactgtaccagttggacctgaacaaaaggaggttgcccctcaacatattctcctatgtttgactggtgagggcaaagtagctgtatattacctcgccaggatttcggacccttctgatttacctcatgctactgtgtctaccaatgaggactatggtgaaaaacatatttcacctgcaactgtatctgaaaaggagttgactccaagtgttgcaggctcagtatataagagtactctcacagaacatggtgctgagccatctagtgcgcaaacaggtagcaaccagcaggaatcaataaatgtgaaaaacagtagctcagcttcaaaagaacaggaaacaactgacaattcattgtttatctcttccaataagaagcccttagacaccaagcaagtgaatgtgactggtccacctgcagccttgcgtagcttagcgttaacaggaaacacaaaacctacaatattttccagcttttctactgaaggcatgaatccaacaggaggcaatgcacctaatgaattagcttcttccttgcaaccaagcagcagaagttttggaaacaaccaaactggtaaagaaggcctggattcagttcaatcagtgggaatatttggtggatctcaaaactccaataaagatggcaatgtctatggtttcaagtcttcattattcacctctagtggatctgtccctgccaagatcggagaaaggaatgaggttggttttggagttccttcgctgcaaaccagttacaccgctgatagaaaagtttttggtgctccagttgccttaagctctgtaccttcatcatctatatctccggctaaaccttccccaattggatattcatcaagtggatttcggacagcaaactctgaagcacctcaatcattgcgtggatcacctccgtcacagcaatctatgggcaaatcacataacagcaggacacaagcaccggcagaatattctagaaactccaagaagggcacaggattcgattctgaacaagacttgtctaaaaaattttacagtataaatgaaatgacgaaggagttagatgccctactagcatatatagaaaaggatggtggttttagagatgcctgcataaccatccaacagcgtcctctttctatgtttgaggatggcttacaaaactttttgcagctgttgcaggtcttcaagggcaaagtagaggagcaatgttcaaaaattgaagatctgaggaacaacatgtttcaagtttctgctaggcaaacttacatgaaaggaattgttagccagtcttcagataatcagtactgggatatatggaaccgtcagaaattgagtccagaattcgaagtgaagagacaaaatattctcagagctaaccaggatttgacaaatcagctggttgagctggagaggcacttcaataatctggagatgaacagatccagtgaaacaggaagagtggcttctaatcgaagagctgtttattctaacaagacaagttcgagtcagacacaattatccagtgtatatagtgcactgaactcgcagttggcagctgctgagcagctatctgaatgcctttcaaagcagatatctgtgttaaatattggttctcctagtaggaagcaggggatggtgaccaaaaagttgtttgagtcaattggtttagcccacacaactgatgcaaccaaattttcaggcagcactcctaagccagttaagcggtttccatcagtgaatgagcattcaaagggaatattagggtcttccaagggtggtgagcctgagactgctcgaaggaggagggaatcactggatatgagcctggctagtttggaacctcagaaaacaactgttaaaagaataacacagcaacaacgcctcaagatcagcagtgatctaccattcaggtcaaacaagaaaatatttgattctcaaatggcagcaatatcacaggaaaagtcaagcgatagctccaattcatctatagtagaatcatatgtaagcagactgcgttctctgagtgaagatgtaaacgataaactgtcaggaccccaacagaaccctttgttcaaatgggtaaaggaatcaactgggtcatctcaaacctcagagcaaaagcatttcgagttaccagggcaaatgaaaagtactgcacagtcttcaaaactgacaccatcttcaccaccatcattcagttacacacgtatgggtgcacaagatagtatcaacccatccagtgttccatcctttggaacaaaacatactgtgtctaagccaaatactctaaccttcaaaaccactataagccctaaaagtaatgccaacacagagccaaatatattaccttctataacagctccaaaaacttctctaagtccactgtctgtaaaaactgctggggagtctggagatttgcctacattaactatgaagaacagacaggatggtcagtcaatgccatctttggggaacataaaaggaccgggtgcttctctgcagaacaagggtggcatatttagagatctcgacaaatcgtcttttaattctgaacattccaagcctgctgcattacatgagaagactgaccagctaagtggggttggcgatgctgtgcagaacactgtgaaagatacctccaaaatggcacctcaaccttctgctttcttgccagctcctgttactcagaccaattcatactccttaaggccgactgtttcttcttcagccacatcaggtgcgaaaacttcagatgttttatctagctcaatgcagaaagtttctccaatagtacctgggggtactgtgtctagctcagtccctactcctgctaaggattcatcaactggattgagtcaaaatgcttccaaacctgaaacgctaatatcaaaggtaactagtaccatagtttctgcaagttcgacttctgtcatatcagtcactgaaagcaaaccttcagtgcctccaacaactggcgccagcttgccttctactcatgtctctgctcctcaaacagcaccaacaacatcggaatcagttttcacttccacaggaaaaaatgtaggaccaaacactgacaccatctcaaccgatgaagatgacatggaagaggaggcaccttctgcaagtgccgaactgaacttgggagcccttggtggattcggccttgggtcccagccttcttcaagtcctcaaaagtctaatccttttggtgcctcctttggtacatctggcaataaaagttcaggcacaccatttactttgacaaccagtccaggacagcttttccggccagcgtcgctaagcattccttcagctcagccagcccaaccatctcaatcaactagttctagttctttttctaattcgttctcaagtgggcttactggatttggacagcctgcacaaattggatctggccagcagtcagcttttgggaagcctgcacagattggagctggccagcatgcaggatttgggcagactgcccaaattcaatctggttttggccagcctgcccaaattcaatctggttttggccagtcagcacaaatcggaactgggcaacagtcaggatttgggaagcctgcacaaattggggctgtccagtcaggatttgggcagcctgcacagtttgctgctcaacagacacttggatcagtgctgggttcttttggacaacctccccagttaggaggcataggttctggaggatttggtggattttcaagtgcttctacatctgctggttttagttctttatcttcaggtaatgctggatttgctggtgctgcatcaggtgggggcttttcagcaccaactgcttctgcaggtggtggttttgctgctgctgctactggtggaggttttgctgctcttgcttccaaaagtggtggttttgttggtgcagcttcatctggtggtggttttggaggtgcctcccagggaggtggctttggcagtgattcatcgcctttgccatctcggtgtaaagcaaaagcaatgtgcctagaaaatccaaaatgacttataatttgcaatcggcggagtacaatctttggtgctttggagccgaattttaatttcggatggagtggtggtggattcggatcctttggtggtaatcaaggagctgggttctcggcatttggagcaagtggggctggaagaccggcagctgatttcttgacgcagatgagaaagtaggctccaggcaaatccccagacaggtttacgcattagctatagcatacacatgaggcgagttacttttatgttccactcttaagcgttgtttcggcacaggagctgtagcataaacatgaccgcagtataccctggactggatgagccctcgcttcgctccatctattgatgatggaggggggctaccatttgggagccttattgttttctcttcttttacaagacacagcaggtgtcaacagcagcatcgacggttggtcttggattccctactggtttctctccagggcgaccaacttgctaaggctttcatggctctctcttcaggttccatggctgcatgaaatgtagaagaaaaaaaaagaggtcgtgtaaaggtcattgcttggacgtgattcccctccagctttgtcaatacaattcccagcctctttcccacaatattccctgtcacgagcctgcccgcgcatcaagatgaaacccgccaccacaccaaagagcttgctgcgatttgcaaaggcatggagaagaaagggatcgagagaaacaaaagcataagatacccagacacttaaacaagtaacaaccgaacacaatctttcgccaaatatatatatatacacgatataatataagaacggaacaaagaaaaagggatcgatgagcttgtattaatcccattgcaagctctacggcggcatcaatcaaactgag

SEQ ID NO: 221327 - DNA, 6152 bp, Zea Mays
caacttttactcaacttttattttaaagtctaccttgtcaacagtgcattctaggatacaacatacaagcctcactccgcggaccttccttgatccgaaagctcaactcaaaagtccattgttttcgcgaatgaaatcaatcaataaaaactgatgaaccaggccatcaccatggccggcggcggtcactctgcttacacaccacgccgagccacccactaaagcgtcgccgtgaaaaactaccaaaccccttcactgctccctcccatccaaaaccctaaccctacagccaccgcagtggctggccatgggggcgccgcgcgagctcgagctctccgacgaggtggagggcgaggaggacggcaccaccgactttgttttccgccttgccggtgaccccatcccgctcctcccgaccgactccaacccgctcccgctcttcgacctgctgtcccctcccgcgcgcccgctcgccgtctccgaccgacacgccaccgtcttcctcgcccaccccagcgggtttatagctgtgaggaccaaggagttaatcgaagccagcaaggaggcgcgcgagaagggcaagtcgagcactcgctgcgcgcaggactgctgcgtcgccgacgtgcccctccccggtgtatcccttatcgcgctctcccatgatgagtccgtgttagccgcctgcacacatactgagatccagttcttctcgctggcgtctctgctcacacataaggacgtggtaccatcctcatcatgtagcctggaacgagctgtcactgtgaaagatttcaagtggttaaatcatgcctctgcagcatatattgtactctcaaatggtgggttgctgtgtcatgggaatttgggtgaaggcctgaaagatgtgatggaaaacgtcgatgcagttgactgttgcaaagaaggaaatcatattgctgttgcaagagggaacaaacttaccatattatcaccagattttacggaaacatgctccatgtccctcttgttccagttgtggtctgacggaagtgattcaaagggcactaccatcaaagtggattctattggctgggtacatggtgatagtattgttattgggtgtgttcgattaaacgaagatgacaatgaagaaggataccttgttcaagttataaggactgaagaaagcacattttgtgagagcccaggcaagacagatgtttatacctataacgattttttccatggcattatggatgatgttttaccacccggagctggacctaatcttcttttgggttatctgcatcgctggggtctcatggtggcttccaataaaaagagcgtcgatgaacacattgcccttcttaagtggccatctgcacatgatgatgaaaaaactgtaacatatcttgaaatgttggaggataaatacagtcctaggattgacttgcaagagaatggcgatgacaatgtcatactagggtttggtgttgagaatgtttcattatttcaaaagatcactgtaccagttggacctgaacaaaaggaggttgcccctcaacatattctcctatgtttgactggtgagggcaaagtagctgtatattacctcgccaggatttcggacccttctgatttacctcatgctactgtgtctaccaatgaggactatggtgaaaaacatatttcacctgcaactgtatctgaaaaggagttgactccaagtgttgcaggctcagtatataagagtactctcacagaacatggtgctgagccatctagtgcgcaaacaggtagcaaccagcaggaatcaataaatgtgaaaaacagtagctcagcttcaaaagaacaggaaacaactgacaattcattgtttatctcttccaataagaagcccttagacaccaagcaagtgaatgtgactggtccacctgcagccttgcgtagcttagcgttaacaggaaacacaaaacctacaatattttccagcttttctactgaaggcatgaatccaacaggaggcaatgcacctaatgaattagcttcttccttgcaaccaagcagcagaagttttggaaacaaccaaactggtaaagaaggcctggattcagttcaatcagtgggaatatttggtggatctcaaaactccaataaagatggcaatgtctatggtttcaagtcttcattattcacctctagtggatctgtccctgccaagatcggagaaaggaatgaggttggttttggagttccttcgctgcaaaccagttacaccgctgatagaaaagtttttggtgctccagttgccttaagctctgtaccttcatcatctatatctccggctaaaccttccccaattggatattcatcaagtggatttcggacagcaaactctgaagcacctcaatcattgcgtggatcacctccgtcacagcaatctatgggcaaatcacataacagcaggacacaagcaccggcagaatattctagaaactccaagaagggcacaggattcgattctgaacaagacttgtctaaaaaattttacagtataaatgaaatgacgaaggagttagatgccctactagcatatatagaaaaggatggtggttttagagatgcctgcataaccatccaacagcgtcctctttctatgtttgaggatggcttacaaaactttttgcagctgttgcaggtcttcaagggcaaagtagaggagcaatgttcaaaaattgaagatctgaggaacaacatgtttcaagtttctgctaggcaaacttacatgaaaggaattgttagccagtcttcagataatcagtactgggatatatggaaccgtcagaaattgagtccagaattcgaagtgaagagacaaaatattctcagagctaaccaggatttgacaaatcagctggttgagctggagaggcacttcaataatctggagatgaacagatccagtgaaacaggaagagtggcttctaatcgaagagctgtttattctaacaagacaagttcgagtcagacacaattatccagtgtatatagtgcactgaactcgcagttggcagctgctgagcagctatctgaatgcctttcaaagcagatatctgtgttaaatattggttctcctagtaggaagcaggggatggtgaccaaaaagttgtttgagtcaattggtttagcccacacaactgatgcaaccaaattttcaggcagcactcctaagccagttaagcggtttccatcagtgaatgagcattcaaagggaatattagggtcttccaagggtggtgagcctgagactgctcgaaggaggagggaatcactggatatgagcctggctagtttggaacctcagaaaacaactgttaaaagaataacacagcaacaacgcctcaagatcagcagtgatctaccattcaggtcaaacaagaaaatatttgattctcaaatggcagcaatatcacaggaaaagtcaagcgatagctccaattcatctatagtagaatcatatgtaagcagactgcgttctctgagtgaagatgtaaacgataaactgtcaggaccccaacagaaccctttgttcaaatgggtaaaggaatcaactgggtcatctcaaacctcagagcaaaagcatttcgagttaccagggcaaatgaaaagtactgcacagtcttcaaaactgacaccatcttcaccaccatcattcagttacacacgtatgggtgcacaagatagtatcaacccatccagtgttccatcctttggaacaaaacatactgtgtctaagccaaatactctaaccttcaaaaccactataagccctaaaagtaatgccaacacagagccaaatatattaccttctataacagctccaaaaacttctctaagtccactgtctgtaaaaactgctggggagtctggagatttgcctacattaactatgaagaacagacaggatggtcagtcaatgccatctttggggaacataaaaggaccgggtgcttctctgcagaacaagggtggcatatttagagatctcgacaaatcgtcttttaattctgaacattccaagcctgctgcattacatgagaagactgaccagctaagtggggttggcgatgctgtgcagaacactgtgaaagatacctccaaaatggcacctcaaccttctgctttcttgccagctcctgttactcagaccaattcatactccttaaggccgactgtttcttcttcagccacatcaggtgcgaaaacttcagatgttttatctagctcaatgcagaaagtttctccaatagtacctgggggtactgtgtctagctcagtccctactcctgctaaggattcatcaactggattgagtcaaaatgcttccaaacctgaaacgctaatatcaaaggtaactagtaccatagtttctgcaagttcgacttctgtcatatcagtcactgaaagcaaaccttcagtgcctccaacaactggcgccagcttgccttctactcatgtctctgctcctcaaacagcaccaacaacatcggaatcagttttcacttccacaggaaaaaatgtaggaccaaacactgacaccatctcaaccgatgaagatgacatggaagaggaggcaccttctgcaagtgccgaactgaacttgggagcccttggtggattcggccttgggtcccagccttcttcaagtcctcaaaagtctaatccttttggtgcctcctttggtacatctggcaataaaagttcaggcacaccatttactttgacaaccagtccaggacagcttttccggccagcgtcgctaagcattccttcagctcagccagcccaaccatctcaatcaactagttctagttctttttctaattcgttctcaagtgggcttactggatttggacagcctgcacaaattggatctggccagcagtcagcttttgggaagcctgcacagattggagctggccagcatgcaggatttgggcagactgcccaaattcaatctggttttggccagcctgcccaaattcaatctggttttggccagtcagcacaaatcggaactgggcaacagtcaggatttgggaagcctgcacaaattggggctgtccagtcaggatttgggcagcctgcacagtttgctgctcaacagacacttggatcagtgctgggttcttttggacaacctccccagttaggaggcataggttctggaggatttggtggattttcaagtgcttctacatctgctggttttagttctttatcttcaggtggtggttttgctgctgctgctactggtggaggttttgctgctcttgcttccaaaagtggtggttttgttggtgcagcttcatctggtggtggttttggaggtgcctcccagggaggtggctttggcagtggtggtggtggattcggatcctttggtggtaatcaaggagctgggttctcggcatttggagcaagtggggctggaagaccggcagctgatttcttgacgcagatgagaaagtaggctccaggcaaatccccagacaggtttacgcattagctatagcatacacatgaggcgagttacttttatgttccactcttaagcgttgtttcggcacaggagctgtagcataaacatgaccgcagtataccctggactggatgagccctcgcttcgctccatctattgatgatggaggggggctaccatttgggagccttattgttttctcttcttttacaagacacagcaggtgtcaacagcagcatcgacggttccatggctgcatgaaatgtagaagaaaaaaaaagaggtcgtgtaaaggtcattgcttggacgtgattcccctccagctttgtcaatacaattcccagcctctttcccacaatattccctgtcacgagcctgcccgcgcatcaagatgaaacccgccaccacaccaaagagcttgctgcgatttgcaaaggcatggagaagaaagggatcgagagaaacaaaagcataagatacccagacacttaaacaagtaacaaccgaacacaatctttcgccaaatatatatatatacacgatataatataagaacggaacaaagaaaaagggatcgatgagcttgtattaatcccattgcaagctctacggcggcatcaatcaaactgag

SEQ ID NO: 221328 - DNA, 1959 bp, Zea Mays
taacatctcggcaagaggagacaggaggtcggtagtttagttttcagaagccaaattaaattaaaggctgtctgtctcactcactcactcactcccagaagagagaagaccacaccacacaaacaaacacctctttggtttctacaaatagaggacgcactgccactgactgagctacaccggtaaaagctgccaaggatatatatcccaccagtcaggaatgcccgcaaccagacatttcagtacataacaggagctgaacaactaacgtacaggctgacagcagcagatgtatcatcagcaacagctccacacccataaccagcacctgtcctcgtcaaggccaggcttacctcctgagaagcagttcctcctgcacggagcaggcggcggcggcggcggcggagatgcagggctcgtcctctccaccgatgctaagcctcgcctgaaatggacacccgagctgcacgagcgttttgttgaggcggtgcatcagctcggaggcccagacaaggccacgccgaaaaccatcatgaggctcatggggatccctggactcaccctgtaccatctcaagagccatctccagactcagcaagaacctccaggcccaagctcatactgccagcgcaaagaatgcgttggtaggctgccggacgggagcagacaacgccctatgccaagggagtgcttcaccgccgccaccaccgccgccgccgcacctgaacctagaaccgccgcagataaacaggtcaatgcacataagtgaagccctccagatgcagatcgaagtccagagacggctgcatgagcagctagaggttcagagacacctgcagctgcggatcgaagcgcagggcaagtacttgcagtccgtgctggagaaggcgcaggaggcgctggccaagcagagcggcggcgctgacgagacgacgacgacgacgcagcagcagcagcagttgctgctgccggatctcatctcgagagccacggcgacgaggcgcggcaatgtccagcaggagcacctccaccagcagcaccacctcggaggcgacgggtcggtggacagctgcctgaccgcgtgcgaggggtctcggtgccagagggagagggaccaggacctgctgtccatcggcctctcgtccgctccgcctcccactcccactcccagcagaggctacaacgacagaggaggcggcggcagcgccagctgcgaggagttcctgcagtttcttgacgagcccagcagaagaggagcaggaggaggagggtcctcggatgagcagcaggagcttgacctcagcatcagcggcggcaggagcaatccaaggcctcgcggcagccaaagccaaaggatcgacctcaacggatccagctggaactgaatggtcgtccttttagcaatggtctccttcctcgtagctttagctgcagtagggaaaatggccagggtcacagcaggtgccctgtgtgtgggtgcacttccatgccctgcagccatttgcagcaaataactaagcagtgactgatgatgatggtgaattggcatgcgagaaagagaacccagatgcacgttctcctttgacgtctgattagttaactctatagatctgtattccagacatggaaaagtacactgctgagatcctctcatcagtttcaggaatgtacagaactcgcagcggatgcacacgaatccatgctgctgcttctgccttggcccaccagtcagtaagctattcctcgctcggccaagccaacacaagcgatggaaatatccagctcggagctcgctattccactgtagcatgcttcttgtttcgtttgtctgtgcgtggccatcttcgtcccactagtcgctttctgtattcttttcttcctcttttcaactgcccattgctggtttgacacacaacgttgctctgtatttctggaataataaatggtactcaatcagtt

SEQ ID NO: 221329 - DNA, 1938 bp, Zea Mays
gtgcaagctgtggtaattgcatgcttggtgaagcaatagataggacattacttagtcatcttctgaagatgcttactgctcttggaatgtattctgagagttttgaaaaaccctttcttgaatgtacttctgaattttatgctacggaaggtgttagatatatgcaacaatctgatattccagattacctgaagcatgtggagtcgaggttgcaagaagaacacgaaaggtgtattctatatttggaagctaacacgaggaagccactgattgcaactactgaaaagcaattgctagaacgtcatacatctgccattattgagaaggggttcactatgctcatggatgccaatcgtataaatgacctctcgaggatgtacaaccttttccagagggtgaatgctgttgagctgctaaaactagcgcttagttcatatatccgggctacaggccagggcattattatggatgaagaaaaggacagagaattggttccatttcttcttgattttaaggcatccctcgacaaaatattggaagaaagttttgccaagaacgaggctttctccaataccataaaagattcatttgagcaccttatcaatctacgacagaaccgacctgcggaattgattgcaaagtttcttgatgagaaacttcgagctggcaataaagggacatcggaagaagagctggagggtatacttgataaagttctggtcctgtttcggtttatacaaggtaaagatgtatttgaggcattctacaagaaggatctagctaagaggttgctgcttgggaagagtgcatcaatagatgctgaaaaatcgatgatcacaaaactcaaaactgagtgtggaagtcagtttaccaacaagctggagggaatgttcaaggacattgaattatccaaagaaataaatgattcattcagacaatcatctcaagctaggacaaagcttccctctggcattgaaatgagtgtccatgtgcttacaacaggctattggcctacatatccgccaatggacgtgaaactcccacacgaactgaatgtgtatcaggatatatttaaagagttctatttaagcaagtacagtggaaggcgtttaatgtggcagaattctttgggacactgtgtcttgaaagcagactttcccaaaggcaaaaaggaacttgcagtatcattgttccagagcgtggttttgatgttgttcaatgacgcacaaaagttaagcttcattgacatcaaagattccactggtatcgaggataaagaattgagacgaacattgcaatctcttgcatgtggtaaagttcgggttctccaaaagataccaaaagggagagatgtagaagataaggatgaatttgtattcaatgaagattttagtgctcctctctaccgcataaaggtaaatgcaattcaaatgaaagagacggtagaagaaaacacgagcaccactgagagagtgttccaggatcggcagtatcaggttgacgcggccatagttcgaataatgaagacgcggaaggtcctcagccacacccttctaataactgagctttaccagcagctcaagttccctgttaagccagctgatatcaagaaaagaatagagagcttgatcgaccgggagtacctggagcgcgacaggagtaacccccagatctacaactatctggcttgacaacgttttggtggatcgttcccatttcattactatcagaaaaaggcactgtaaattaatttattttccggtttcttgttctttcatgcttttcttctctgggaggaagttgtagttgtagctgctgcaacgtgtttatatagaacaattttttcggcatcagtataaaatcaggttccttaaagctattccacgtccgtcgttgtttttgcacaaaccgcaccgttgtttgcagcctatccagcca

SEQ ID NO: 221330 - DNA, 4340 bp, Zea Mays
ccgggatctcaattctcatctgggagagggcgggcgagatccattccagtcgcccccattcactccccttcctcgtccgtcctcttcctccctccgatccaccgctccccctacccgccgggccgccgctacctcgagcgagcggagatctctctcctcgaacggggggggaggaagatgctcaccaagttcgagaccaagagcaaccgggtcaagggcctcgccttccacccgcgccgcccatggatcctgtccagcctccatagcggagtcgttcagatgtgggactaccgcatgggcaccctcctcaaccgcttcgacgagcacgacgggcccgtcaggggcgtccactttcacgccacgcagccgctcttcgtgtccggaggtgacgattacaagattaaggtctggaattacaagactcaacgctgcctattcacacttcatgggcacctcgactacattcgcactgtgcaattccaccatgagtgcccatggatcgtaagtgctagcgacgatcagacaatccggatctggaattggcagtcacgcacatgtgtggccgtgctaactgggcataaccactatgtcatgtgtgcctccttccatcccaaagaggatctggttgtatcggcatcacttgatcagaccgtgcgtgtctgggatattggggctctgagaaagaagtcagcatcacctgccgatgacatcctccgcctcactcagatgaacacagatctatttggaggtattgatgctgtagtcaaatatgtcttggaaggccatgaccgcggggtcaactgggcctcatttcatcccactttgcctctcattgtttccggggcagatgaccggcaggtgaagatatggagaatgaacggtaatagtcctattactaaatggtctgcacttcacatgcttttgataccaaggcttgggaagttgatacgttgaggggccacatgaataatgtgtcttgtgtgatgtttcatgcgaagcaagacatcatcgtgtctaactcagaagacaaaagcattcgtgtttgggatgccacaaagagaactggcattcaaacatttaggcgggaacatgaccgtttctggattcttgctgctcaccctgaaatgaaccttcttgctgctggtcatgacagtggcatgattgttttcaaattagagagggaacgcccggccttctgtgtcagtggtgacacagttttttatgtgaaggaccggtttctaaagttctttgaatactccacacagaaggaagttcagttggctccaataagaagacctgggtcagtcagcttgaaccagtcacccaggacactatcgtatagtccaactgaaaatgctgtcttgatttgctttgatgctgatgggggttcatatgaactctacattgctcccaaggattctgctggcaaggctgattacttgcaagaggcaaagaagggagctggtggttctgctgtatttgtggcacgcaacaggtttgcagtccttgagaggagtagcaatcaagttttggtgaagaatctgaagaatgaaatcatgaagaaaagcccccttcctattgcgacagatgcaatatattatgctgggacaggtaacttgctgtgcaaggctgaagaccgggtggccatctttgatcttcagcaaaggctagttcttggtgagctacagacacctgctgtcaaatatattgtttggtccagtgatatggaatctgttgcattcctgagcaagcatgttgtggttatagccagcaagaagcttgtccatcaatgcacactgcatgaaaccacccgtgtgaaaagtggtgcttgggatgagaatggcgtgttcatctacaccacactgaaccatatgaagtactgccttcccaatggcgacagtgggatcataaaaacccttgatgttcctatttacataacaagggttatcgggaataacattttctgcctagaccgtgatggaaagaacaagctgattgcagttgatgcaacagagtacattttcaagctcgctcttctcagaaaacgctatgatcatgttatgagtatgatcaagaactcccagttgtgtgggcaggctgtgatttcttatttacaacagaaaggttttccagaagttgctcttcactttgtgaaggatgagaagaccagatttaacttggcccttgagagtggtaacattcaaattgcagttgcttctgcaaaggagattgatgacaaggatcactggtacaggttgggaattgaggccctgaggcaaggaaatgttggtatcgtggaatatgcataccaacgaacaaaaagttttgagaggcttgcttttctgtatctcattactggttacttggacaaggtgggcttcatgtacaaaattgctggacagaataataatttgatgggacaatttcacaatgcattgtatcttgggcatgttaataagagagttgagatcttggaaaatgctgggcagctgcctcttgcttatgttcttgctgtcacacatgggctcactgaaattgctgagaggattgctgctgaattaggcgagcatgttcctttgctgcctgaaggaaaatcacactcgttactgatcccccctgcacctctcacagcctgtggtgattggccattgctgagggtagtgcgtggtatttttgaaggtggactggattctactggaagggcagagcttgaggaagatgatgaagcttctggtgctgactggggtgatgaggacttggatattgttgatgcaagtgaggtggtggcaaatggtggcgattattttgatgcagagggtgaaccaaacgaggaggagggtgaggaaggtggctgggacctggaagatctggaacttccacctgatacagagactccaaaatctgctggcaatgctcgctctcctgtatttgtcactccaacagcaggcatccctgtcagccaaatttggactcaaaaatcttctctggctggggagcatgcggctgcagggaactttgatacagcaatgaggttgcttagccgacaattgggcatcaagaactttgctccgctgaagcccttgtttcttgatctgcatatgggcagtcattcatatctgcgtgcccttgctgctgctccagttatatcagttgctgtagagaaaggttggaatgagtccgcaagtcctaatgtaagaggccctcctgcacttattttcagcttctcacaaatggaagacagactcaaggctgcctacaaagccacaactgagggcaggttcccagaagcactgaggcagttccttagcatcttacatacgattcctgtaatcgttgtagactcacggagagaagttgatgaagtgaaggaattaattgagatagtgagggagtatattcttggtctgaagatggaactcaagagaaaggaattgagggatgatgtgacccgccaacaggagttggccgcttacttcacaaattgcaagcttcagagaattcatatgaggcttgtgctttctagcgccatggctctttgcttcaagcagaaaaactatgctactgcagcacactttgcaaggatgcttcttgagaacagccctcaagaggctcaagcaaggaaggctcgacaggtgctgcaagcttgtcaggataaggatgattctcaccaactgaactatgactttagaaatccatttattgtttgcggtgctacatatgttccaatctaccgtggccaaaaggatatttcttgcccatactgtggatcccggtttgctccttccatcgaagggcagctttgtaccatatgtgagcttgccatagttggggcagacgcctcaggcctggtctgctcccctacgcagatgaagtagacgatgttatcttacctcctgctgtccgcatcttcagcagcaccatctcgcaatgatgcctggatgtcttgatttggaggggatgaaacaattcaccgaacaccaaacttatcaacgccctccatgtcattccaaattttcgtctggaggggattcatcttggtcttgtctcaattatcgcagctgcgttttcagctctattttgtaaacatattgatgtacgatagctgatgtgagtgctggttcactgaaacgattttctgttatggcatatgccattttaatctctacagtttcagtatattgcacagtagattgtactcaaacatttaaaatttgattgtaccaaggattgagaccagtgttttaacactgaaaaattatgattgatacacaaccttttgtcactgaattgatgggtagtaattgcaatatcaatatattttttgtccactttatatgatg

SEQ ID NO: 221331 - DNA, 1357 bp, Zea Mays
ctgcagtttccttctccgggatctcaattctcatctgggagagggcgggcgagatccattccagtcgcccccattcactccccttcctcgtccgtcctcttcctccctccgatccaccgctccccctacccgccgggccgccgctacctcgagcgagcggagatctctctcctcgaacggggggggaggaagatgctcaccaagttcgagaccaagagcaaccgggtcaagggcctcgccttccacccgcgccgcccatggatcctgtccagcctccatagcggagtcgttcagatgtgggactaccgcatgggcaccctcctcaaccgcttcgacgagcacgacgggcccgtcaggggcgtccactttcacgccacgcagccgctcttcgtgtccggaggtgacgattacaagattaaggtctggaattacaagactcaacgctgcctattcacacttcatgggcacctcgactacattcgcactgtgcaattccaccatgagtgcccatggatcgtaagtgctagcgacgatcagacaatccggatctggaattggcagtcacgcacatgtgtggccgtgctaactgggcataaccactatgtcatgtgtgcctccttccatcccaaagaggatctggttgtatcggcatcacttgatcagaccgtgcgtgtctgggatattggggctctgagaaagaagtcagcatcacctgccgatgacatcctccgcctcactcagatgaacacagatctatttggaggtattgatgctgtagtcaaatatgtcttggaaggccatgaccgcggggtcaactgggcctcatttcatcccactttgcctctcattgtttccggggcagatgaccggcaggtgaagatatggagaatgaacgatgttatcttacctcctgctgtccgcatcttcagcagcaccatctcgcaatgatgcctggatgtcttgatttggaggggatgaaacaattcaccgaacaccaaacttatcaacgccctccatgtcattccaaattttcgtctggaggggattcatcttggtcttgtctcaattatcgcagctgcgttttcagctctattttgtaaacatattgatgtacgatagctgatgtgagtgctggttcactgaaacgattttctgttatggcatatgccattttaatctctacagtttcagtatattgcacagtagattgtactcaaacatttaaaatttgattgtaccaaggattgagaccagtgttttaacactgaaaaattatgattgatacacaaccttttgtcactgaattgatgggtagtaattgcaatatcaatatattttttgtccactttatatgatg

SEQ ID NO: 221332 - DNA, 4454 bp, Zea Mays
agcaaatgaacctcactcagatcggaggggagaaactaggctagttggtctggtgcccctggcactcgctgcacctgcagtttccttctccgggatctcaattctcatctgggagagggcgggcgagatccattccagtcgcccccattcactccccttcctcgtccgtcctcttcctccctccgatccaccgctccccctacccgccgggccgccgctacctcgagcgagcggagatctctctcctcgaacggggggggaggaagatgctcaccaagttcgagaccaagagcaaccgggtcaagggcctcgccttccacccgcgccgcccatggatcctgtccagcctccatagcggagtcgttcagatgtgggactaccgcatgggcaccctcctcaaccgcttcgacgagcacgacgggcccgtcaggggcgtccactttcacgccacgcagccgctcttcgtgtccggaggtgacgattacaagattaaggtctggaattacaagactcaacgctgcctattcacacttcatgggcacctcgactacattcgcactgtgcaattccaccatgagtgcccatggatcgtaagtgctagcgacgatcagacaatccggatctggaattggcagtcacgcacatgtgtggccgtgctaactgggcataaccactatgtcatgtgtgcctccttccatcccaaagaggatctggttgtatcggcatcacttgatcagaccgtgcgtgtctgggatattggggctctgagaaagaagtcagcatcacctgccgatgacatcctccgcctcactcagatgaacacagatctatttggaggtattgatgctgtagtcaaatatgtcttggaaggccatgaccgcggggtcaactgggcctcatttcatcccactttgcctctcattgtttccggggcagatgaccggcaggtgaagatatggagaatgaacgataccaaggcttgggaagttgatacgttgaggggccacatgaataatgtgtcttgtgtgatgtttcatgcgaagcaagacatcatcgtgtctaactcagaagacaaaagcattcgtgtttgggatgccacaaagagaactggcattcaaacatttaggcgggaacatgaccgtttctggattcttgctgctcaccctgaaatgaaccttcttgctgctggtcatgacagtggcatgattgttttcaaattagagagggaacgcccggccttctgtgtcagtggtgacacagttttttatgtgaaggaccggtttctaaagttctttgaatactccacacagaaggaagttcagttggctccaataagaagacctgggtcagtcagcttgaaccagtcacccaggacactatcgtatagtccaactgaaaatgctgtcttgatttgctttgatgctgatgggggttcatatgaactctacattgctcccaaggattctgctggcaaggctgattacttgcaagaggcaaagaagggagctggtggttctgctgtatttgtggcacgcaacaggtttgcagtccttgagaggagtagcaatcaagttttggtgaagaatctgaagaatgaaatcatgaagaaaagcccccttcctattgcgacagatgcaatatattatgctgggacaggtaacttgctgtgcaaggctgaagaccgggtggccatctttgatcttcagcaaaggctagttcttggtgagctacagacacctgctgtcaaatatattgtttggtccagtgatatggaatctgttgcattcctgagcaagcatgttgtggttatagccagcaagaagcttgtccatcaatgcacactgcatgaaaccacccgtgtgaaaagtggtgcttgggatgagaatggcgtgttcatctacaccacactgaaccatatgaagtactgccttcccaatggcgacagtgggatcataaaaacccttgatgttcctatttacataacaagggttatcgggaataacattttctgcctagaccgtgatggaaagaacaagctgattgcagttgatgcaacagagtacattttcaagctcgctcttctcagaaaacgctatgatcatgttatgagtatgatcaagaactcccagttgtgtgggcaggctgtgatttcttatttacaacagaaaggttttccagaagttgctcttcactttgtgaaggatgagaagaccagatttaacttggcccttgagagtggtaacattcaaattgcagttgcttctgcaaaggagattgatgacaaggatcactggtacaggttgggaattgaggccctgaggcaaggaaatgttggtatcgtggaatatgcataccaacgaacaaaaagttttgagaggcttgcttttctgtatctcattactggttacttggacaaggtgggcttcatgtacaaaattgctggacagaataataatttgatgggacaatttcacaatgcattgtatcttgggcatgttaataagagagttgagatcttggaaaatgctgggcagctgcctcttgcttatgttcttgctgtcacacatgggctcactgaaattgctgagaggattgctgctgaattaggcgagcatgttcctttgctgcctgaaggaaaatcacactcgttactgatcccccctgcacctctcacagcctgtggtgattggccattgctgagggtagtgcgtggtatttttgaaggtggactggattctactggaagggcagagcttgaggaagatgatgaagcttctggtgctgactggggtgatgaggacttggatattgttgatgcaagtgaggtggtggcaaatggtggcgattattttgatgcagagggtgaaccaaacgaggaggagggtgaggaaggtggctgggacctggaagatctggaacttccacctgatacagagactccaaaatctgctggcaatgctcgctctcctgtatttgtcactccaacagcaggcatccctgtcagccaaatttggactcaaaaatcttctctggctggggagcatgcggctgcagggaactttgatacagcaatgaggttgcttagccgacaattgggcatcaagaactttgctccgctgaagcccttgtttcttgatctgcatatgggcagtcattcatatctgcgtgcccttgctgctgctccagttatatcagttgctgtagagaaaggttggaatgagtccgcaagtcctaatgtaagaggccctcctgcacttattttcagcttctcacaaatggaagacagactcaaggctgcctacaaagccacaactgagggcaggttcccagaagcactgaggcagttccttagcatcttacatacgattcctgtaatcgttgtagactcacggagagaagttgatgaagtgaaggaattaattgagatagtgagggagtatattcttggtctgaagatggaactcaagagaaaggaattgagggatgatgtgacccgccaacaggagttggccgcttacttcacaaattgcaagcttcagagaattcatatgaggcttgtgctttctagcgccatggctctttgcttcaagcagaaaaactatgctactgcagcacactttgcaaggatgcttcttgagaacagccctcaagaggctcaagcaaggaaggctcgacaggtgctgcaagcttgtcaggataaggatgattctcaccaactgaactatgactttagaaatccatttattgtttgcggtgctacatatgttccaatctaccgtggccaaaaggatatttcttgcccatactgtggatcccggtttgctccttccatcgaagggcagctttgtaccatatgtgagcttgccatagttggggcagacgcctcaggcctggtctgctcccctacgcagatgaagtagacgtctgctgttatcacttgctatatgctccaggagtcaggactgttgagtgacccatggaagctatgctgcatgttatcttacctcctgctgtccgcatcttcagcagcaccatctcgcaatgatgcctggatgtcttgatttggaggggatgaaacaattcaccgaacaccaaacttatcaacgccctccatgtcattccaaattttcgtctggaggggattcatcttggtcttgtctcaattatcgcagctgcgttttcagctctattttgtaaacatattgatgtacgatagctgatgtgagtgctggttcactgaaacgattttctgttatggcatatgccattttaatctctacagtttcagtatattgcacagtagattgtactcaaacatttaaaatttgattgtaccaaggattgagaccagtgttttaacactgaaaaattatgattgatacacaaccttttgtcactgaattgatgggtagtaattgcaatatcaatatattttttgtccactttatatgatg

SEQ ID NO: 221333 - DNA, 2287 bp, Zea Mays
tgttcctcccccttcttttattaggttttttttgtctcattggatttgcgcctgtgctgctcacctgagcgcatactagtctctgcatcagctgcatcagagagtagagacctccgagctgctcttcaacacgcagattgggcagagccgcaaggtgcctgccgggagagagtgaaaagtgagagagcgcgcgctcaagggggccaaaaggaatttttttttatccagcttcttagcttgattctatctgatccgggagagcagccgccagtccaactaatccttgctgttggtgtgccggggctttgattgctctccagatctgaggcacctgctgggtggattccaggaatcctagcacgaagttgacagtggagttctcaggtaaaagggaggaaggaagaggctgaaagggcggcggagagagaaaggctataagagcgagctgggtccctcgaggatgccatcaagaaaccgcgtggaggggagggcgatgagatgagggatgctggccgcggtgatggactactttagctcctgctggggcccgcgatcgggtgccgggcaccgggaaaagggctccgacgccgctggccggcaggacggtctcctctggtacaaggacgtcgggcagctcgtcactggggagttctccatggccgtggtgcaggccaaccagctgctcgaggaccagagccaagtggagtccggatcgctctccctggctgacacgggcccgcagggcaccttcgtcggcgtctatgatggccatggcggcccggagacgtcccggttcatcaatgaccacctcttcaaccatctcagaaggtttgcaactgagcacaagtttatgtcagcggacgtgatccggaaagctttccaagcaactgaggagggctttctttctctagtcagcaaggaatggtctttgaagcctcagattgcttcagtgggctcctgctgccttgttggtgtaatctgtgctgggactctctatgttgcaaacctgggcgactcacgtgcagttcttggaaggcttgttaaggcaactggagaggttttggccattcagttgtcatcggagcacaatgcgtgctatgaggaagttagacaagagctgcagtcatcacatcctgatgatccacatattgttgttctcaaacacaatgtttggcgtgtgaagggtatcatccagtcagaagacgggcgggcgaagcaagaggaagcacgcgcgcgttgtcgctaagggagaacggagccgcgccgccgtggaaggtttgactggcgggcagagcaggagggtcgtgccactgcggaagagggttgctgccaccacctagggatgtaaatgatctcaagatctattggagatgtatatctaaagaaaccagagtataatagagaaccgcttcacagcaagtttcggcttcgagaaaccttccagaggccgatccttagttctgaacctcaaattactgaacatcgaatacagccaaacgatcaatttgttatatttgcttctgatggtctatgggagcacctcagcaataaggaagcagttgaccttgtccaaagtagtccccgaaatggaatcgctcggagactagtgaaagccgcgatgcaagaagctgccaagaagagggagatgagatattcagacctcaagaagatcgaccgtggtgtgagaaggcatttccacgacgatataactgtcgtcgtggtgttcatgccatgagcaaagctagctggagcaaaagcccctcggtttctcttcgagggggcggtgtcacccttcctgcggagtccctcgcacctttctcagctccggcatggttgaagagcaccaactgaagctgctgctactcttgaaaggaagagcacagtgcaggtctgcaggagagatgaaaaaagaacagcaatcaagtgtagcgttacacttgcacctgctgtgttgttgctcttcgcgaaactactgtcttgactctagactacgcctggtaattagtgcactgatagcgacgcaaatcctttcacattcttttctctccctcgacatgagatgagaattgagatactccattcatccaggaaaataggaccgattatggagaaaagacaaaatttaaccaacaattactcaatgtatgtgtaagtttaggatacaacttatattagtagatttattatattcaattgactccgagattatattactaatttcttttagaaattgaaaacactccattcgttccaaaatagtagtaattttagagaattagtaggttca

SEQ ID NO: 221334 - DNA, 2415 bp, Zea Mays
acccacttctcaggtcctccgttcctcccccggccccctatataaaccggacacgaccccctcgctgcacccgaatccagttccaaacccatcgcccccacactcctatcgcgtcgcatatatatatatatatatatatactcctacacatcaccaggaggttgcgaccaagccaagtacgtagtacgctagctagccaccaccagcaagcgcgcgccgtggctctccctcgtcggcagcgccgtcgcctcctccaccaccaccacgggttccgcgcccaacggcaagaagcggaagcgggacggcagcgacgaagacgactgcggcgaggtcgtggacgggatcgagctcaatttcgacgccgcgccgctgccccccgagtggcaacgctgcctcgacatcaagtcggggcagatccactactacaacacgaggacgcagaagcggacgtggaaggaccccaggggggagccggagtaccgcgccgccgccgaggaggaggaggaggaggactccgcgaattgcgcgccgccagggctggacctggagctgaacctcacgttcgagccgcgccgggctgtggcccacgagaagaagaggcccaaaccccccgcggctaataaggcgacacatgaccgtcgtcgtcagcccgcggaggaggccgaggacagcagcagcggcagcagcagggagatggtggccggcccgccccgtcgccccggagccggagccggagccgccggtgccactgctcaagctcggcctccagctgctctgctgccgggactagctggctggctacatacgctgcatgccccaccggcagcgtcgatcatcaaatcaaattaaacgggagcgcgtcgtccgaccgacctaccatggatggttctattctataccgtgctcccccccggcctagccatgcgtggaacgaagtggaacacagtagagcgcgcgcgcacgtgtgtgcgtccgcatgtgcaaggggtggggtggaggggctcaggatcacgttacgtaattatattagaggcagcgtaatccaatcggacagctagcgtggaggagcgaggaggagttgcatggttaatggcgagggttttttaaattggtgccctcagttttggttgtgtgctcacttatacccttagtcgtgtttttgctcagctgtgcccttcctattctatagaatagaagggcacagctgagcaaaaaacacaagtaagggtatagatgagcacacaaccaaaactaagggcaccaatttaaaaaaaccctaatggcgacgccgacgccgtccgaccgatcgatcagctgtacgtacggttcggttcaccaaggggccgggccgggtatatcgtatcatatagtatggcgatgagtggtgatgtagatatacaagtgcatagcatgggtgcagctcggaactttcgggtgtccgtcacgcattgtccgcgcgcgtgcgtgcaatgcatgtactactccgatcctcctcctacatgctgtacgtacgtaatcctaatcctaatcgatcgaacgaacttgcggaaagctggtcggcccttgtggactgtggtgtacatatatgtcattgttgcattgcgctcgctctcaatcgatcagtcttcgagagagagagagagagagactctgacctgtctatctcgatcgcattgatactgccactagaagcagtagcgattagtagcattttagcaagagagatggagaaaacgtaatataagcacggcacggccatatgcaaacttcggccagagtgagtgggagcggccgctgggaaattcgaaccggtattagttcgatctcttcagttccgtggcgctgccatatagtaagtagtatatttgccaatgccataccggtagcgctgtcgtgcataccaagctagggcgtgcacccgcatacgggtgcgcgtgtgtagatggatcatggaaggcgcgcgagctgattcggcaaccggggtcgaattagtgcaaggagttttgaatgcgcctcaattactgtactagctagctagctctgggtctgggtggcggatgcaacgaaccgtcctctcacgtattcaatcgcacatatccagactgtagtgctgtgccatcgtcgttctcttgtcatgacaatgagacgattcattgcgtgcagcagtaggaggaccggaggatgtgtgtgtatacagcccggtgtcgcgatcgagagcttagcaaagctctggatgatgcagtacgtacgtacgtacgtggacgacattaaactctgtcaggggttttcttcattaccccctgtttccaggaaaaggaaaggcacgagtgtaacgttcatctgtttcgtccccccatcattttttttttcttcttcttctcctcctcatcagctgccaacgcaaaaggatttctt

SEQ ID NO: 221335 - DNA, 1044 bp, Zea Mays
tcattccaagcgtccaaaccccccatacaaccaactcgcaactcctcgcgcggttcctcgatcgaagtctccagacgcccagcgtcgatcgcgacgacgtacgccaagccgcagcaaagctccggcggtgtgcggtgagatggcggtggtgtcagcgctggccaagtacaagctcgtgttcctgggcaaccaggcggtgggcaagacggccatcatcacccgcttcatgtacgacaagttcgacgacacctaccaggcgacgatcgggatcgacttcctgtccaagacgatgtacctcgaggaccgcaccgttcgccttcagctctgggacacagctgggcaggagaggttccgcagcctgatcccgagctacatcagagactcctccgtagccgtcatcgtttacgatgtgaccgacaggcagtcattcttgaacacgtcaaagtggatcgaggaagtaaacacgcaaagaggtggagacgtgctcatcttcctcgttggaaataaaactgaccttgtcgacaagaggaaagtgtccaccgacgaaggagaagccaaagcacaggagcatggtgctatgttcatggagaccagtgcaaaagctgggttcaacgtcaagcccctgttccgcaagatcgctggatcccttccaggactggacgcactttcgtcaggaaagcaggaagacatggtcgacataaacctcagacctgccagcggttcgtcggcttcaggtgcagccgcgcagctggagcagaaatcaggcggttgctcctgttgagacttcgacagttttgtgttcagagaagctacagcagtactgcaacatcgagttaagtactttcagagagattatgacgaagagtgtgttttcgcccagacgtccagtagtgatatactgacatccatagcgagaagccaatttctgtgtacagatttgtttagcaagttatcatatactaggatataactttttgagacacaagggacaaaatctgtggagcatcgacattcaatttcacagcaggaacttttccattccat

SEQ ID NO: 221336 - DNA, 717 bp, Zea Mays
aaaattcagcatgttgaataatctccagacgaaaggtccatgcagcaaggcacgccgatgatttccagcttttctgttttagaatactaacaggcagtcattcttgaacacgtcaaagtggatcgaggaagtaaacacgcaaagaggtggagacgtgctcatcttcctcgttggaaataaaactgaccttgtcgacaagaggaaagtgtccaccgacgaaggagaagccaaagcacaggagcatggtgctatgttcatggagaccagtgcaaaagctgggttcaacgtcaagcccctgttccgcaagatcgctggatcccttccaggactggacgcactttcgtcaggaaagcaggaagacatggtcgacataaacctcagacctgccagcggttcgtcggcttcaggtgcagccgcgcagctggagcagaaatcaggcggttgctcctgttgagacttcgacagttttgtgttcagagaagctacagcagtactgcaacatcgagttaagtactttcagagagattatgacgaagagtgtgttttcgcccagacgtccagtagtgatatactgacatccatagcgagaagccaatttctgtgtacagatttgtttagcaagttatcatatactaggatataactttttgagacacaagggacaaaatctgtggagcatcgacattcaatttcacagcaggaacttttccattccat

SEQ ID NO: 221337 - DNA, 2628 bp, Zea Mays
ctcaccggcctctccacctccccttccgcctccctgcactactgctaacccctgctccccaatcctgatccacccccacacccgatcccctgaatcgccgtcccatcaccccgctccgggtctgcgattcgggttttgatttcccatcgtttgggagttgggactttgggttgcgtgcgtgttcgagtgttcttgatcgctattgagatgaggaccgcgaaggcggcggcggagtggacggaggacagagagctggatttgcttctcggcgagatcccccaggtcacctccccgcaggggcggcagcgcggggtgggcgtcatcggcgacggcaacggcgtgcatggcgcctcggggtgcgacgggtacgcttcaccaatgcgcctggggggccgacgggtacactgccccccggggggcgacggctacgatgcgcagcgccacgccaaggacgcttactacgacatggtcctgaaccgtcgcgaaaatggtgctccactccgcggcggcggcggcggcggggatgcagagggcgtgggcttccccgcgccgtcaccggttccaggaccattcatcggtagcgtggtgccgccgccgcttgcgctgggggtggactacccggagcagcagctggtcgtgaaccagctccaaagcctgcgcatcggggacgcgcaggccgcgctcctgcgccagggcccagcgccagtcatgagcacgaccccgatcgaggtccccgcagcgcacggcgcctaccacgggtacaacttcgcggcgtcaggttcttccatccgccatgaacacgtgttccttgatcaggccaaagctgacgggtacgttgcagcacggccgcatcgcctcgtgtcggacgttggcctggataactttggtgtttttcccagaaccctggacaccagcactggcattggttggggccaaggtttcgtgcagcctgatttcgcccagtcctacctgctttccagtcaggctggtaatgcatatggtggtgtccctgtggcagacaacgggtttgtgagaggcagaaatcagtttgaggcattccatcctgacagcagtcccactgaggcgggtgcggagtttttcagctcgaatcccgctgcccttgatttccgaggtggaccaaagcgacactatgcatatggtgctattcctgtagcagaggcgtaccattgcgagaacagtctaatgtttggtgggaagaacatgaacttcctggaacgtgagaggaagaggagtttccggcgtgttaataacagagcaccggagcttgggaatttgaggactttgaggtttgacgatgtggttcgtgtcaaggaaggatccatctactaccacatggccaaggataaaaatgggtgccggtatttgcaggacaagtttttggaagggaagcatcatgtggatgcgatctttgaaggaatcattaaccacattgcagaccttatgatcagcagtgctggcaactatcttgtacaggagatggtggaagtgtgtgatgaagggcaaagactgaggatcatcttagcgctgacgcaggaccctgtgaagatgattgccatctctctaaacacacatgggacaagggtagtacagagattaatagagaaagttacgagcagagagctgattatactcattatttcagccctacagccaggtttcatgctacttgtcaatgaccccaatggtactcatgtaatacagaaatgtctggcaaactttggagctgaggataacaagttcatttttgagggcgctgcagccaactattttaacatggcggtacaacgccatggatgctgtgttctacaaaagtgcatatctactgcacgtggtcgataccaggccaatctaattgtgaaaatatgtgctcatggctttgagcttgctcaagatatattcgggaactatgtggtccaacatgttttgaaacagaaaattccttatgcaaatgcacgcttggcatctctgtttgaaggaaagtatatatatctctcaaagcagaaggtgagcagcaatgtggtgcagagatgcattgagttcttcccagacgatgccaaagctgtcatagtgcatgaattcctcttgctcagagggtctcatttcgaacaactggtgacagatccttacgcaaactatgtcattaacaccgcccttaacaacaccaggggccatctgctcaatgcccttgttgaagcgatccgccctcatgaggatgccatccgaacccacccctgctgtaagaggatctgcaggttcctgtccaggtggtgaaagttgtaccatctgcgtgcctttggtaccaggaactcaaagtatttggtaattcatgtggtctagacagtctatcgtccaccagagaaaccaatagtacatgtccagcaatccgccatataatttccatgtccacgacagaaacaacggtggcgacttgagcacgtacacccctacagagagatgcggtggcggctaatattattctctcaagcacgctagcccctctgtgtatatgagtccattagcatttttcatggatcataattgtctcttagccatatagtcaacagttttcaccttttccctatggactctaagtatttgatcattcat

SEQ ID NO: 221338 - DNA, 683 bp, Zea Mays
cgaacaactagaacctcacggtctgtcacagctgcagacaatggattcggtaggacgatatcgaggaagtcacttgacatggctatcaggcacatggacattcgacaaaatttgggtggcattcgtggtacatctctatttccccatagcatccgatctactactaccaagggacgagcagctcgagcctcagatccaggccattccgtctcaaatggtgaccgatacttcacagataatggcagcagcaatgggcacatctctggagattctagtggtgctctttcacataacggtgggagctcaattggttcccctgatagggaaacctttgcgacaaaagatgttctgtgtgaactggatatatatgccaattcaagatatgaggcgatggtgctgaaggaggacaccaagaacatgagttggttgcacagcgtggatgacaagtcggaccagagcccggtgtttgatcataggtgcaagtttttaacgcgaaatcggtgacgattgtggcatcccaagaaggattctaccctgcagggaagcgagcactcatcagccgctccctcgttggactgttgcagcagacaagccgtgcatttgatggagcctacaaggctctgatgaaggcatttgtcgagcacaacaagtcctcaaagcggttgcatctatccagcaactga

SEQ ID NO: 221339 - DNA, 338 bp, Zea Mays
ctgcctgggagcaaagaaaacaggtcaatcaaggttgtttagagatgcctgccaacactgattgttctgaagatttattccaaagccatgaagaaatgcttgagaacgcagaattttggtcaaagtcaaactactcccctgtggagcatctggagtgccatatggaagttaacatggagctgaacgaaggagaacaaatgattgatcacacagaagctagccgatatgaattgtttagcaacgatctgcagagcaaatcaagaacttccaacttggacaatgaacattttccaagggatgcatcaaaccacgctaatgttgaagcaactggacctcca

SEQ ID NO: 221340 - DNA, 820 bp, Zea Mays
aacgaggcaaccggctgcaccgcctcgtgacgatcagtcgcaccacgaaaccacccaccccggtccgcctccgaaaataacgaccccgattccggctcggccattccgaacgccagacccgttcctttttatttaaatcccatctcggagcgaattttcctttcgttcgacgcggatgccatcttctttttagccccctcccgtcaccaccaccacaggtccacagccgcgctgattggaaaaggggtttcgctcttccggagaaggcaaggcgtttgcggtttgcccgccgccgtgaatcgtatgtgatcgaatcgcgcggcgggtgatggcggaggaaccggtggtcggttatgatggcttcgaggccgccggtgatgctggcgccggtggcgcggaggacaacctgtcgatgtccctcggcgacttcatggcgttcctcgaaactgagcccacgtcacccgaggaaggctggaaggaggagcagcagatgcagcctgcggtcaatcaaggttgtttagagatgcctgccaacactgattgttctgaagatttattccaaagccatgaagcagaaatgcttgagaacgcagaattttggtcaaagtcaaactactcccctgtggagcatctggagtgccatatggaagttaacatggagctgaacgaaggagaacaaatgattgatcacacagaagctagccgatatgaattgtttagcaacgatctgcagagcaaatcaagaacttccaacttggacaatgaacattttccaagggatgcatcaaaccacgctaatgttgaagcaactggacctcca

SEQ ID NO: 221341 - DNA, 2067 bp, Zea Mays
attttttgccctagatctttattgccatatttcagtattggatcctttgaaggttcttgggatcgcacaattgagatttgaagatgccgaagtgagatcagatgaaatcatcaaatagaataggatactgttgaggataatggttcagcgatccaggaagtccctcgtgaaaaagtgaatttctcagaagaacttttgagcagcacatcatttgctcgccaattagtggatcagatgactctagcaaaggcatatgtcatccttgcaaaagagcaaggtaatcttcagcttgcatgggagcttagttcacagataaggaattgtcaaagattgctatctgaaggggcagttaatggaagagcaatcactaaagatgaagcccatcctataataagccggctagcacggttaatatacaaggctcaggactctcactatgatatcagcacaacaatagtgacattgaagaaccatgccttggcactagaggagcgtgcaaaggcagcaattgttcagagtgctgagtttggccagttagcagcagaatccttccccaaaaatctgcactgtctaactgtgaaactgacagaggagtggcttcggaacccgaagcataggagtcactcagaggagaaccggaattccacacgattggtggataataatctgtaccatttctgtatattctctgataatgtgctggccacttcagttgttgtcaattctacggtctccaatgcaaatcatcctcaacagcttgtgtttcatgtggtcaccgacagaatccattttggcgcaatgtcaacttggttcctcataaatgacttcaaaggttgtactgttgaagtccgctgcatagatgagttctcgtggttgaatgcttcttcatctcctcttgtcaggcagctatctgaggcggaaactcagggttactattactcagctggttccaagaatcctgaaagagaaacaaaattccataatccaaagtttgtttctctactgaaccatttacgtttctacattcctcagatacttcccaacttggagaaggtggtgtttcttgatgatgatgttgtggtgcaaaaggacctgactcagctgttctccattgagttgcatggcaatgtcattggagcagtggaaacctgtttggagtcgtttcatcgatacagcaagtatctaaatttttcgcaccctaccatcagctccaagattgatccacatacttgtggatgggcttttggaatgaacatttttgacttgatagcctggaggaaggcgaacgccacatcgttgtaccattattggcaagagcaaaattcagatctattgctctggagaacgggaattcttcctgcaggccttttgacattttacggcctggtggagcccctagaccgcagatggcatgtcttgggtcttgggtatgatgtagacatagatgaccgtttgattgagagtgctgctgttgtgcactataacggaaacatgaaaccgtggctgaagctggctattcgccgttacaagtatatatgggagcggtatgtgaatatctcacatccgtatgttagagagtgtatgttgcaatagaaagcctgcaaatctctgtatgttcttggatggtgttgaagctgtttcctcacacgaggctgctttcgagcacattgtatgagggaaaggttcagaggtagtagaatatataccagtcatcaaagaagtcaactgttaagtttctttttctttttgggttgggggaagattcattttgagatgaaaataattcctttgcagagtttacatacaaatctggactgggaattttagcagtctaaccagatacatctggatagatattgtaaaagagatacagttggatcaatgagcattttttctttgagatttaggaagtgcaaactgtgagctcaactgtgcagggtcagtggtgctgcattcttttagtactatcttgttttatactggcgaagaaggttctgcctccctacttgtataagtaactgttttagtttgtgctctccatacttaaaggctctgtttggaagcgac

SEQ ID NO: 221342 - DNA, 1412 bp, Zea Mays
tctgcatcaactcaccgtcaatccggcaggtctccggcctagccgaactctcctacgcgagaggcttcgattcccctctacacaatcgaacgggaagcagaggaagatcgcgaagtactacaagaaacaagagaatctactgaaggatttcagcgaaatggagaccatgaacgaaatgggtggcctagatcagaatgctcctaccgaggaagagcagaagcagttggcgaagagcgagaggtttgccatcaacctgtcgaatgcagtcaacctggtcctcttcgtaacaaaagtcgtcgcttcagtcgaaagcgcgtccatggcggttatagcgtcgacgctggactctctgttggacctgctgtcagggttcatactttggttcactgcgtacaagatgaaaaagccgaacaagtacaactatccaattggaaagaggcgcatgcagccagtgggaataatagttttcgcatcagtgatgggcacacttggcttccaagtgctgatcgaatcagggcgccagctcataactcaggagcacgcggatttcaagttcaagcaagagctgtggatggtcattagcatgtcctctgttgcggtcgtgagttcttcctcatgctctactgcagaacgttcaagaatgagatcgtgagggcctacgcccaggaccatttcttcgacgtaatcacaaactcggtcggcctggtctcggcgctgctcgctgtccggttcaaatggtggatggaccctgttggcgccatactgatcgcgttgtacacgatcacgacgtgggcgcgaacagtgctggagaacgtaggcacactgataggcaagtcggcgccggcagagtacctgacgaagctcacgtacttgatctggaaccaccatgaggagatccagcacatcgacacggtgcgagcctacaccttcggcacgcactacttcgtcgaggtggacatcgttctctcgggcgacatgccgctgagtcaggcacatgacatcggcgagtcgctgcaggagaagctggagcagctgaccgaggtcgagcgcgccttcgtccatgtggatttcgagttcacgcaccggcccgagcacaaggccgaggtctgagtgcgtggttagtggttactgcagagttcagaccagctgtagcgctactgcagatttgacttcatatgctattagttcgtaagatgaatgctatattcatttcccacaactcttcaaaaagaatctagatattttttgtcatgtacgtgcagactggaataaaattttgtatagtcgttcatgaaccggtgaaaaatatattttttaatacatttgactaataaagaattattcatattagtttctttttattttctataaaacaaacataatagatatccaaagtgtatattttaagggac

SEQ ID NO: 221343 - DNA, 1938 bp, Zea Mays
gtgcgggggtgtgagaggggagatttaaaaaaatgtgattagcagtggatagttacgtgtaaaattatcaagcccctgtagcgattaatatcatgtgacctaaattagaagttttataattgcacggaggagttggtttataccagatatgttcaacacaagggtcgtgtggaaagcaacaacggacgaggcgacgtacgcgcgcgcggccggcgcgcacctcgccgtcccagccacctgccgttgtgcatgcgctctcaatctctgatctagtcatctgatctgtgcgggagtgtggccgccaccaccacgaccaccaccataactgctcatctatatataaaacacccccaccacaccgttctcccccactgtcctgccgccgtccgatcctgtggttgcgccgactctctggccgcgctagtccccattccttcatccgacgaatctaccctcgatcggatcctctggccggcggcatgggcgacgacgacgaccacaatgaggggctgagggcggggccgacggcgtcgtggcggctcaacgtcagcgacttccacatgccggagcggcccaaggagccgcccttcgtcgccagggtcttcctccgcagccacgggaagcagaggaagatcgcgaagtactacaagaaacaagagaatctactgaaggatttcagcgaaatggagaccatgaacgaaatgggtggcctagatcagaatgctcctaccgaggaagagcagaagcagttggcgaagagcgagaggtttgccatcaacctgtcgaatgcagtcaacctggtcctcttcgtaacaaaagtcgtcgcttcagtcgaaagcgcgtccatggcggttatagcgtcgacgctggactctctgttggacctgctgtcagggttcatactttggttcactgcgtacaagatgaaaaagccgaacaagtacaactatccaattggaaagaggcgcatgcagccagtgggaataatagttttcgcatcagtgatgggcacacttggcttccaagtgctgatcgaatcagggcgccagctcataactcaggagcacgcggatttcaagttcaagcaagagctgtggatggtcattagcatgtcctctgttgcggtcgtgagttcttcctcatgctctactgcagaacgttcaagaatgagatcgtgagggcctacgcccaggaccatttcttcgacgtaatcacaaactcggtcggcctggtctcggcgctgctcgctgtccggttcaaatggtggatggaccctgttggcgccatactgatcgcgttgtacacgatcacgacgtgggcgcgaacagtgctggagaacgtaggcacactgataggcaagtcggcgccggcagagtacctgacgaagctcacgtacttgatctggaaccaccatgaggagatccagcacatcgacacggtgcgagcctacaccttcggcacgcactacttcgtcgaggtggacatcgttctctcgggcgacatgccgctgagtcaggcacatgacatcggcgagtcgctgcaggagaagctggagcagctgaccgaggtcgagcgcgccttcgtccatgtggatttcgagttcacgcaccggcccgagcacaaggccgaggtctgagtgcgtggttagtggttactgcagagttcagaccagctgtagcgctactgcagatttgacttcatatgctattagttcgtaagatgaatgctatattcatttcccacaactcttcaaaaagaatctagatattttttgtcatgtacgtgcagactggaataaaattttgtatagtcgttcatgaaccggtgaaaaatatattttttaatacatttgactaataaagaattattcatattagtttctttttattttctataaaacaaacataatagatatccaaagtgtatattttaagggac

SEQ ID NO: 221344 - DNA, 1629 bp, Zea Mays
gccaccaccacgaccaccaccataactgctcatctatatataaaacacccccaccacaccgttctcccccactgtcctgccgccgtccgatcctgtggttgcgccgactctctggccgcgctagtccccattccttcatccgacgaatctaccctcgatcggatcctctggccggcggcatgggcgacgacgacgaccacaatgaggggctgagggcggggccgacggcgtcgtggcggctcaacgtcagcgacttccacatgccggagcggcccaaggagccgcccttcgtcgccagggtcttcctccgcagccacgggaagcagaggaagatcgcgaagtactacaagaaacaagagaatctactgaaggatttcagcgaaatggagaccatgaacgaaatgggtggcctagatcagaatgctcctaccgagaagcagttggcgaagagcgagaggtttgccatcaacctgtcgaatgcagtcaacctggtcctcttcgtaacaaaagtcgtcgcttcagtcgaaagcgcgtccatggcggttatagcgtcgacgctggactctctgttggacctgctgtcagggttcatactttggttcactgcgtacaagatgaaaaagccgaacaagtacaactatccaattggaaagaggcgcatgcagccagtgggaataatagttttcgcatcagtgatgggcacacttggcttccaagtgctgatcgaatcagggcgccagctcataactcaggagcacgcggatttcaagttcaagcaagagctgtggatggtcattagcatgtcctctgttgcggtcgtgagttcttcctcatgctctactgcagaacgttcaagaatgagatcgtgagggcctacgcccaggaccatttcttcgacgtaatcacaaactcggtcggcctggtctcggcgctgctcgctgtccggttcaaatggtggatggaccctgttggcgccatactgatcgcgttgtacacgatcacgacgtgggcgcgaacagtgctggagaacgtaggcacactgataggcaagtcggcgccggcagagtacctgacgaagctcacgtacttgatctggaaccaccatgaggagatccagcacatcgacacggtgcgagcctacaccttcggcacgcactacttcgtcgaggtggacatcgttctctcgggcgacatgccgctgagtcaggcacatgacatcggcgagtcgctgcaggagaagctggagcagctgaccgaggtcgagcgcgccttcgtccatgtggatttcgagttcacgcaccggcccgagcacaaggccgaggtctgagtgcgtggttagtggttactgcagagttcagaccagctgtagcgctactgcagatttgacttcatatgctattagttcgtaagatgaatgctatattcatttcccacaactcttcaaaaagaatctagatattttttgtcatgtacgtgcagactggaataaaattttgtatagtcgttcatgaaccggtgaaaaatatattttttaatacatttgactaataaagaattattcatattagtttctttttattttctataaaacaaacataatagatatccaaagtgtatattttaagggac

SEQ ID NO: 221345 - DNA, 2314 bp, Zea Mays
gaaataacatattacatatccatataactaaaatgaccaattcaagacaactaaattcactccatagtttagataattatagaacaacaactaaaacatgctagaagaagacatattcatgtatgaaaaaaaaacaaatcaccatcttttggagaacgtccatgtaaataaaaacatgagcatactccttcgtcggatgacatctgtgtggcctcggactgtcgtatgtagtggtgggtaatctaaatacacgaaatagaactgtcgtatgtgagccattgtctattagacctatagccgtatgtcgccgttaccagcagcggccacatgggcggggcaggtgggcttatgttgctgcgcgcgcggtgccgtctccaactctgtctcggcctctcgcgtggaggtggaggtggaggcggagccgatgagatcgatcgcccgacccccgtcacgtccggggtcgcattctctttccgtcccggggaaaaaagaaggaaaccgaaccttggcagcggcgtgccggcaggcatgtcagcgacggtagccggccacaggtccagattccggaaccgaaccaccgtcccccgcgaaccacggaacagcgaagacacctgggccagggctagtgaggccaagccgatccgaaacatcgcgttgcgtcccgcacaatcccgtcccgatctgggccgggggcacgcgagcgacgataaacttcctcgtggcggtgagggccggcttggagtcggcgcagagctggacgagttgcacttgcaccttgcacgcgacagccacgcactagcctgcagctgcagggcaggggcggagaccatggggagcccgcaccatggacacggcgttgacggtggcggccgcagcgacgacgaggagggcgacgccgggtcgtggcggctgcgcatggacagcggcttcagcgtcccggaccggttccaccgccagccgcccttctacgccaggatcttcggcggctcgcacgggaagcagaggaagatcgcgaagtactacaagaaacaagagaatctactgaaggatttcagcgaaatggagaccatgaacgaaatgggtggcctagatcagaatgctcctaccgaggaagagcagaagcagttggcgaagagcgagaggtttgccatcaacctgtcgaatgcagtcaacctggtcctcttcgtaacaaaagtcgtcgcttcagtcgaaagcgcgtccatggcggttatagcgtcgacgctggactctctgttggacctgctgtcagggttcatactttggttcactgcgtacaagatgaaaaagccgaacaagtacaactatccaattggaaagaggcgcatgcagccagtgggaataatagttttcgcatcagtgatgggcacacttggcttccaagtgctgatcgaatcagggcgccagctcataactcaggagcacgcggatttcaagttcaagcaagagctgtggatggtcattagcatgtcctctgttgcggtcgtgagttcttcctcatgctctactgcagaacgttcaagaatgagatcgtgagggcctacgcccaggaccatttcttcgacgtaatcacaaactcggtcggcctggtctcggcgctgctcgctgtccggttcaaatggtggatggaccctgttggcgccatactgatcgcgttgtacacgatcacgacgtgggcgcgaacagtgctggagaacgtaggcacactgataggcaagtcggcgccggcagagtacctgacgaagctcacgtacttgatctggaaccaccatgaggagatccagcacatcgacacggtgcgagcctacaccttcggcacgcactacttcgtcgaggtggacatcgttctctcgggcgacatgccgctgagtcaggcacatgacatcggcgagtcgctgcaggagaagctggagcagctgaccgaggtcgagcgcgccttcgtccatgtggatttcgagttcacgcaccggcccgagcacaaggccgaggtctgagtgcgtggttagtggttactgcagagttcagaccagctgtagcgctactgcagatttgacttcatatgctattagttcgtaagatgaatgctatattcatttcccacaactcttcaaaaagaatctagatattttttgtcatgtacgtgcagactggaataaaattttgtatagtcgttcatgaaccggtgaaaaatatattttttaatacatttgactaataaagaattattcatattagtttctttttattttctataaaacaaacataatagatatccaaagtgtatattttaagggac

SEQ ID NO: 221346 - DNA, 1976 bp, Zea Mays
ctatagccgtatgtcgccgttaccagcagcggccacatgggcggggcaggtgggcttatgttgctgcgcgcgcggtgccgtctccaactctgtctcggcctctcgcgtggaggtggaggtggaggcggagccgatgagatcgatcgcccgacccccgtcacgtccggggtcgcattctctttccgtcccggggaaaaaagaaggaaaccgaaccttggcagcggcgtgccggcaggcatgtcagcgacggtagccggccacaggtccagattccggaaccgaaccaccgtcccccgcgaaccacggaacagcgaagacacctgggccagggctagtgaggccaagccgatccgaaacatcgcgttgcgtcccgcacaatcccgtcccgatctgggccgggggcacgcgagcgacgataaacttcctcgtggcggtgagggccggcttggagtcggcgcagagctggacgagttgcacttgcaccttgcacgcgacagccacgcactagcctgcagctgcagggcaggggcggagaccatggggagcccgcaccatggacacggcgttgacggtggcggccgcagcgacgacgaggagggcgacgccgggtcgtggcggctgcgcatggacagcggcttcagcgtcccggaccggttccaccgccagccgcccttctacgccaggatcttcggcggctcgcacgggaagcagaggaagatcgcgaagtactacaagaaacaagagaatctactgaaggatttcagcgaaatggagaccatgaacgaaatgggtggcctagatcagaatgctcctaccgaggaagagcagaagcagttggcgaagagcgagaggtttgccatcaacctgtcgaatgcagtcaacctggtcctcttcgtaacaaaagtcgtcgcttcagtcgaaagcgcgtccatggcggttatagcgtcgacgctggactctctgttggacctgctgtcagggttcatactttggttcactgcgtacaagatgaaaaagccgaacaagtacaactatccaattggaaagaggcgcatgcagccagtgggaataatagttttcgcatcagtgatgggcacacttggcttccaagtgctgatcgaatcagggcgccagctcataactcagcatgtcctctgttgcggtcgtgagttcttcctcatgctctactgcagaacgttcaagaatgagatcgtgagggcctacgcccaggaccatttcttcgacgtaatcacaaactcggtcggcctggtctcggcgctgctcgctgtccggttcaaatggtggatggaccctgttggcgccatactgatcgcgttgtacacgatcacgacgtgggcgcgaacagtgctggagaacgtaggcacactgataggcaagtcggcgccggcagagtacctgacgaagctcacgtacttgatctggaaccaccatgaggagatccagcacatcgacacggtgcgagcctacaccttcggcacgcactacttcgtcgaggtggacatcgttctctcgggcgacatgccgctgagtcaggcacatgacatcggcgagtcgctgcaggagaagctggagcagctgaccgaggtcgagcgcgccttcgtccatgtggatttcgagttcacgcaccggcccgagcacaaggccgaggtctgagtgcgtggttagtggttactgcagagttcagaccagctgtagcgctactgcagatttgacttcatatgctattagttcgtaagatgaatgctatattcatttcccacaactcttcaaaaagaatctagatattttttgtcatgtacgtgcagactggaataaaattttgtatagtcgttcatgaaccggtgaaaaatatattttttaatacatttgactaataaagaattattcatattagtttctttttattttctataaaacaaacataatagatatccaaagtgtatattttaagggac

SEQ ID NO: 221347 - DNA, 1354 bp, Zea Mays
ctcgtgcgtaaaagtcagttggtaattggtgactttgcttcgagtgcccttaataaaggacgatgctgtataggaaggaagggaagcagaggaagatcgcgaagtactacaagaaacaagagaatctactgaaggatttcagcgaaatggagaccatgaacgaaatgggtggcctagatcagaatgctcctaccgaggaagagcagaagcagttggcgaagagcgagaggtttgccatcaacctgtcgaatgcagtcaacctggtcctcttcgtaacaaaagtcgtcgcttcagtcgaaagcgcgtccatggcggttatagcgtcgacgctggactctctgttggacctgctgtcagggttcatactttggttcactgcgtacaagatgaaaaagccgaacaagtacaactatccaattggaaagaggcgcatgcagccagtgggaataatagttttcgcatcagtgatgggcacacttggcttccaagtgctgatcgaatcagggcgccagctcataactcagcatgtcctctgttgcggtcgtgagttcttcctcatgctctactgcagaacgttcaagaatgagatcgtgagggcctacgcccaggaccatttcttcgacgtaatcacaaactcggtcggcctggtctcggcgctgctcgctgtccggttcaaatggtggatggaccctgttggcgccatactgatcgcgttgtacacgatcacgacgtgggcgcgaacagtgctggagaacgtaggcacactgataggcaagtcggcgccggcagagtacctgacgaagctcacgtacttgatctggaaccaccatgaggagatccagcacatcgacacggtgcgagcctacaccttcggcacgcactacttcgtcgaggtggacatcgttctctcgggcgacatgccgctgagtcaggcacatgacatcggcgagtcgctgcaggagaagctggagcagctgaccgaggtcgagcgcgccttcgtccatgtggatttcgagttcacgcaccggcccgagcacaaggccgaggtctgagtgcgtggttagtggttactgcagagttcagaccagctgtagcgctactgcagatttgacttcatatgctattagttcgtaagatgaatgctatattcatttcccacaactcttcaaaaagaatctagatattttttgtcatgtacgtgcagactggaataaaattttgtatagtcgttcatgaaccggtgaaaaatatattttttaatacatttgactaataaagaattattcatattagtttctttttattttctataaaacaaacataatagatatccaaagtgtatattttaagggac

SEQ ID NO: 221348 - DNA, 1359 bp, Zea Mays
acagcctttcccctgaaaaaaaaattaccccccggacctcctcctccgatcggcttcctcctcccagtcccgaaccgcacgcgctcgatttcccgcaccccctctagcctctagcggccatgtcgcccgccgccgccaccacaaccttcgtcgcaatctccatcgccgtccccaaccctaccgctccatcccgcggtcgcgtgcgccttccgctaggcggggtccccgctgctccacgccgcgccgtcgcctctatggcagtgtccgcccccaggtccggcgccgccacctcgtttctcgagcgccgcgagtcggagcgcgctctccactttgtcaaataccagggcctcggcaacgacttcataatggtggacaacagggattcgtcggtgccgaaggtgacgcccgaggaggctgcgaagctgtgcgaccgaaacttcggcattggcgccgacggtgttatcttcgtcatgccgggggtcaatggtgccgactacaccatgagaatcttcaactctgatggcagcgaaccagagatgtgtggtaatggagtccgttgcttcgctcggtttatagccgagattgaaaatctgcaggggacaaatagattcactattcatactggtgctggaaagatcgttcctgaaatacaaagtgatgggcaggtaaaggttgatatgggcgagcctatcctttctggactagacatccccacaaaactgctagctaccaagaacaaagctgttgttcaagctgaattggcagttgagggcttaacatggcatgtcacatgtgttagcatgggaaaccctcactgtgtcacatttggtgcaaatgagttaaaggtattgcaggtcgacgatttaaaacttagcgaaattgggcctaaatttgagcatcatgaaatgtttcctgctcgcacaaacacagaattcgtacaggttttgtctcgctcacacctcaaaatgcgggtctgggaacgtggtgctggagcaactcttgcctgtggtactggtgcttgtgcagtggttgttgcagctgttcttgagggtcgagctgagcggaaatgtgtagttgatttgcctggcgggccattggaaattgagtggagggaggatgacaatcatgtttacatgactggtcctgcagaggtcgtcttttatggatctgttgttcactagctggtcacaggtgaaacgacgagcgggcagcgtctaaagcatcatttcatggatcgtcctctttgaacgttcggtggtgtcaggtcaggctgaagcacaagatgtcctccatcacgtacccctccaaactggtaaaccgtctctagattatggtttctcgattaagaaacgatttgac

SEQ ID NO: 221349 - DNA, 1379 bp, Zea Mays
ctccgatcggcttcctcctcccagtcccgaaccgcacgcgctcgatttcccgcaccccctctagcctctagcggccatgtcgcccgccgccgccaccacaaccttcgtcgcaatctccatcgccgtccccaaccctaccgctccatcccgcggtcgcgtgcgccttccgctaggcggggtccccgctgctccacgccgcgccgtcgcctctatggcagtgtccgcccccaggtccggcgccgccacctcgtttctcgagcgccgcgagtcggagcgcgctctccactttgtcaaataccagggcctcggcaacgacttcataatggtggacaacagggattcgtcggtgccgaaggtgacgcccgaggaggctgcgaagctgtgcgaccgaaacttcggcattggcgccgacggtgttatcttcgtcatgccgggggtcaatggtgccgactacaccatgagaatcttcaactctgatggcagcgaaccagagatgtgtggtaatggagtccgttgcttcgctcggtttatagccgagattgaaaatctgcaggggacaaatagattcactattcatactggtgctggaaagatcgttcctgaaatacaaagtgatgggcaggtaaaggttgatatgggcgagcctatcctttctggactagacatccccacaaaactgctagctaccaagaacaaagctgttgttcaagctgaattggcagttgagggcttaacatggcatgtcacatgtgttagcatgggaaaccctcactgtgtcacatttggtgcaaatgagttaaaggtattgcaggtcgacgatttaaaacttagcgaaattgggcctaaatttgagcatcatgaaatgtttcctgctcgcacaaacacagaattcgtacaggttttgtctcgctcacacctcaaaatgcgggtctgggaacgtggtgctggagcaactcttgcctgtggtactggtgcttgtgcagtggttgttgcagctgttcttgagggtcgagctgagcggaaatgtgtagttgatttgcctggcgggccattggaaattgagtggagggaggatgacaatcatgtttacatgactggtcctgcagaggtaagagggggaggtcttggtggccaggtgatatggtgggtgtgatttggagctccctaaagatcctatattccaccatttgggttgccctcagattctaactgataaagtagcttttttaattggctcatgttgcgcatattgtattgcaaaatcataggtgtgcatgttaggacatcagctttattgacgtctggaatttgcagaggtatattcttgctttttgttaataaactacagtatacaataaaagttaatttatttgtttacc

SEQ ID NO: 221350 - DNA, 1296 bp, Zea Mays
tacagcctttcccctgaaaaaaaaattaccccccggacctcctcctccgatcggcttcctcctcccagtcccgaaccgcacgcgctcgatttcccgcaccccctctagcctctagcggccatgtcgcccgccgccgccaccacaaccttcgtcgcaatctccatcgccgtccccaaccctaccgctccatcccgcggtcgcgtgcgccttccgctaggcggggtccccgctgctccacgccgcgccgtcgcctctatggcagtgtccgcccccaggtccggcgccgccacctcgtttctcgagcgccgcgagtcggagcgcgctctccactttgtcaaataccagggcctcggcaacgacttcataatggtggacaacagggattcgtcggtgccgaaggtgacgcccgaggaggctgcgaagctgtgcgaccgaaacttcggcattggcgccgacggtgttatcttcgtcatgccgggggtcaatggtgccgactacaccatgagaatcttcaactctgatggcagcgaaccagagatgtgtggtaatggagtccgttgcttcgctcggtttatagccgagattgaaaatctgcaggggacaaatagattcactattcatactggtgctggaaagatcgttcctgaaatacaaagtgatgggcaggtaaaggttgatatgggcgagcctatcctttctggactagacatccccacaaaactgctagctaccaagaacaaagctgttgttcaagctgaattggcagttgagggcttaacatggcatgtcacatgtgttagcatgggaaaccctcactgtgtcacatttggtgcaaatgagttaaaggtattgcaggtcgacgatttaaaacttagcgaaattgggcctaaatttgagcatcatgaaatgtttcctgctcgcacaaacacagaattcgtacaggttttgtctcgctcacacctcaaaatgcgggtctgggaacgtggtgctggagcaactcttgcctgtggtactggtgcttgtgcagtggttgttgcagctgttcttgagggtcgagctgagcggaaatgtgtagttgatttgcctggcgggccattggaaattgagtggagggaggatgacaatcatgtttacatgactggtcctgcagaggtcgtcttttatggatctgttgttcactagcgttttaacatacgaagtcatcaggagtttcggtcctggtgtgtttgtcctgactcctgaagttattttggattctctaccctgcactcctatagctaagccccctcctatttg

SEQ ID NO: 221351 - DNA, 1642 bp, Zea Mays
atgttgacctcacgttcctccaggactcgtaccaacttgtggctgtacctaaaggtgaagttagacagaaataaaaccaagatagtggatgctggtgcacttgagcccctgcttggttatttgcgatcaagcgatccaaatttgcaggagtacgcaactgctgctctccttacactttcagcctcatccaccactaagcctgtcataagtgcctcaggagcaatccctctacttgtggaagtcctcaaaggagggaatccccaagccaagaatgatgctgtgatggccctgtacaacctctccacaatcgcagacaaccttcaagctatcctttccgcccagccgatcccccctttaatagagctactgaagggtggcaagaggtcctccaagacagccgacaaatgctgtgctctcctcgagtcgttgctcgcttttgaccagtgtcgggtggccttgacatccgaggaaggcgcagtgctcgccgtcgtagaggtgcttgaggagggctcccttcagggcagagaacacgccgtgggagcgctcctgacaatgtgcgagagcgaccgcagcaggtatagggacctcatcctgaacgaaggggcgattcctggtcttctcgagcttacggtccacggcacgcccaagtcccggatgaaggcccacgtccttcttgacctgctgcggaactcgccgtactcgagaccaaagctgccggcagacacgctggaaaacatcgtgaccaacattgcctcccagatagatggcgaagaccgcggcggcaaagccaagaagatgcttgctgagatggtgaaggtgagcatggagcagagcctgaggcacttgcagcgtcgggcctccttcgcctgaaactgcatccaggtggcgggtgccccaccccccttattttgcaatggagatagaagatagtccaagaataatgagatttctggtgatgccggtccaggccttgacaggaccgagtgaccggtctatgccgtcgtatactaagctcttgacgtagaactccttttcccccctttcactcgccaatcttgtgttctcgttatatgaagaaaagaggttgtgatcatgaggctggtgaccatttcattgctaatctgaccacacgcgcgagagatcggccatcgcagatttgttttctttccgtgccaaagggagatcgtgtggtgggggtgtaccgatcttatccaccggatggtcggacgtcgacggggggcgtgggggctctcgcgtgcggaggcggagcttctgcttctgcacgcctcgttccacctccatcgtctgaatctgaatagtgggggtgtacagttcagcagcagcatgcggtgtattttccgttggcgaacgtcccggtgcccgacagcaatcggacacgcagacggcttcggtaggaaggctgctacgtcacacggtcacacctgcacgtctgcacctctcaacaaaactaaaacggaaccaataaaaaggttccttcggacgtgacggaaacgcttttgtgctctcaagcatcgccgtcgcagcaactgtactgctctttattatctttctataaaacggcaacgacaaggttagcactactgcatcgccgtatcagaccgcactgcgtagtgcgtgcgtg

SEQ ID NO: 221352 - DNA, 3439 bp, Zea Mays
gattaatccacgtgtgcccaaagatgccacgaaaggatctcttatcctaatgtttcctcttcttttgccctccaccacctgccatgccatgtctaacccacagaagccgcgtaattaacgccctacttaaaagccttaccaaaccaaggccggaagaaggaatactcaaccaaaactagtcgctgcgaaaaaccacagacacgcggaaggacaagcgaacatcgaaagtattgtgggcttcccgtccgaccgagctctcgactctctctctcccaagacgtgttgagctgtttcccagtccttcgtcaccttccctccgctcagactcaccagcgcagctccccccatcctcttctcttgttcataagcccactcacaaacagaagtggagcggagcttctgcagagtaccactagcactagtaagtaaccttggggattttcctgtgagaagagagactggcattggagtgcagttagcggagccaaaaaggaagggaagcccaggattagcgtttggcggatagagtggctatttcgtgagaagggagagagaaggagaggcgtggcctaggccggcggacgcggcggctttcttggaccggccattgatggcgccgtgcagcggcttgtggggcggcaaggccggcggcgacgcctaccggggcacgccggtggtggtcaagatggagaaccccaactggtcgatctccgagatctcgtctccggaggacgacgacgacgacgaggacatcttggccgccgccggcggccgccgccgcaagggggcccgcaccaagaacgccaagcagatcaggtgggtgctgctcctcaaggcgcaccgcgccgccgggtgcctcgcctcgctggcctccgccgccgtcgcgctgggcgccgcggccaggcgcagggtggccgcggggaggaccgacgccgacgccgacgccgacgccggcgtgctggccgtcgccggcgagagccccgtggtgcgctccgggttctacgccttcatcagggccttcctcgtcgtctccctgctcctgctggccgtcgaggtcgcggcgtacatcaacggctgggacctcgccgcctccgcgctcgccctccccgccctcggcctcgagtcgctgtacgcctcctggctgcgcttccgcgccgcctacgttgcgccggggatacagttcctcaccgacgcctgcgtcgtgctcttcctcgtccagagcgccgaccgcctcatcctgtgccttggctgcttctacatccgcgtcaagcgcatcaagcccgagccgaagtccccggcattacctgatgcggaggaccccgatgccgggtactaccccatggtacttgtccagataccaatgtgcaacgagaaggaggtgtatcaacaatcaattgcggccgtgtgcaaccttgactggccgaaatccagcttcttggtccaggtgctggatgactccgatgacctactgacacaggctctgatcagagaagaggtggccaaatggcagcagcaaggtgcccggattgtgtacaggcaccgtgtgttgagggatggttacaaggctggaaacctcaagtcggccatgagctgcagctacgtgaaggattacgagtttgttgccatctttgacgcagacttccaaccccagcctgactttctgaagcgcactgtgctacatttcaaggacaatgatgaacttgggctagtgcaagcaaggtgaatggagtgttcttgaacttcttcgggttcaatggcaccgccggggtgtggaggatcaaggcactggaggactcaggtggatggatggagcggacaacggtggaggatatggacattgctgtcagggcacatctccatggctggaagtttatattcctgaacgatgttgagtgccagtgcgaactgcccgagtcctatgaggcttacaggaagcagcagcatcggtggcattccggtccaatgcagctattcaggctgtgtttaccggacatcatcaaatgcaagatggcgttctggaagaaaggcaacctgatcctcctcttcttcctgctccggaagctcatactgcccttgtactccttcacgctcttctgcatcatcctcccgacggcgatgttcgtgccggaggcggagctcccggactgggtggtgtgctacgtcccggccctcatgtccctgctgaacgtgctgccgtcgccgaggtccttccccttcgtcatcccgtacctgctgttcgagaacaccatgtcggtgaccaagttcaacgcgatggtctcggggctgttccagctggggagcgcgtacgagtgggtagtgaccaagaagtcgggctcgggcccccgctcgtccgaggtcgccggcgacctcgtctcgctggccgccgccgccccgacggcgaagaagaagaagaagaagaagcacaaccggatatacaagaaggagctcgcgctgtcgatgctgctcctgaccgcggccgcccgcagcttgctgtcgaagcagggtatccacttctacttcctcctgttccagggcgtgtcgttcttgttggtcgggcttgacctcataggggagcaggtcgagtgaatcgtgtaagcaagcaggaggttgtaggtgtggaaacggtgagtggggtcggtcagtcgccatgggagtgccgggtgggagggagggagggagggatgtctcgctgccatgggcacggcggcaggctcgtggctgaggttcgaaagatgcggttgtggagctgtgtgccttctctgatccgatccgtcctgactatgaagagagaacctccgcctccgcctcggaggtgcaggtgcagccgtgcaggtaaaatttgcgtagtgggctcctgcattcatctgtaacagaattttgttcgcctttgcgattggtggaggaaaacaggagcgccactgggttaggaggcgtcctggtgccagacgacgctggcatcttgctccacttgtgaagctgagagagtagatccagatcgtgggcttgtttgtccacgtgtgtttgttgtagcctgtctctccggctctccccgctcgacgccggggaaagctggcagttgtcgagcgcggtgtgtcacatgactggggaagacgaagatctgtgtctcctgcatatgccgatgatcattgtgcatcaaggttccaggagtagcttgtctcatcgaactggttagttctgtcgggatatgtaacctttttttctctctctgcaactaacgttttaccggctctgtagtgtgatagaaattatctcctggtaatgaaatgtgtgtcccaagtccggactaggaatctaggataaaatggaacgtttgtcttcagttgcgagcaacaattttgtacatgaactttatccgggtcatgggctcgtacaagcggcaaaagcttgacccttgctgagtcgtgtacctgcctttatc

SEQ ID NO: 221353 - DNA, 830 bp, Zea Mays
atgccgacgctgcacgcgaatatggccgagatgccgtctgctgcgatggcgaaggcgcgtagcctgctgcggcgcacggacagggggtccagttccatccccaccaggaagaggaagaagaggaggcccggttgtgaagaggagcagcaacgacacgaggcgaggaagacgagaggacggagcggaacaggtgaagaagttaagccaggagccacggtctcttgcatagtttgtgatggtttggttatccacctgtcacaggctgcactaggggaaccaaagaaagcgagtgagaatgtcattgtgtctgtgaaaattaacgataagaaactagtgcttggaaccttatcagttgagaagcatcctcagatctcttgtgatctgttttttgataaagaattttccgcggcaaagtttcccgtgaaggatgtcatacaaaatgctgatgaaactagtggtgatgatgatgatttcactgatagtgagagtgaaatgtctttggaagatgactctagttcagaagaacagactcctagcccaaacaagactgatgtagtagttggcaagaagagggcaattgaagctgaggcaccttctggtaagaaggctaagtctgaacaatctgctcagaaaacagcccaacttgggagccatgcctgcaagtcatgcaacaagtcctttgggcagtgcgtcagcactcaagtctcatctagggatgaaaacggtcggagacggagacggtcgtaaaaactctccaaccactttaaatttcgtattttaattcaaatcaggaacggtaataggattgtcggttggaaaaacgaaaccgg

SEQ ID NO: 221354 - DNA, 850 bp, Zea Mays
ccttccctcgccctcgctcttcgtggctctgaactgatccaccttctgcgttaggctcgattgtttgccggcgatggtgcagaccaacctctccatcgacaagattaatgccatgcttaaggcattcgaccatacgagagggttcatgtagcatgattaccaccttggctagaggcacaacatgctcattatgtggaggttgtcttaggtcactggaatcaaaatgggaaacctcctatgcagaatgttttgtaatatgtttttcataaggcataggaaaaattagcataggcaaagaaatgggtcaaacctcatgttgagactgctaagatgaaatggattcctgttaaggagaaattggttctcctcaagaaaatgtagaacataatgtacaaaaggtatcaacaaggtgttaatgaattcaacctcatattgagattgctaagatgaaatggatttccgttaaggagaaattggttgtcctcaaggaaaatgcagaaccttatgtacaaattggttgtcttcaaaatgttggtcatgtagctgcaagcctacaacaaagagaatcaacaatggtggtgatgctacacatgtagaagtagcaatgttggtcttgtaaatccaagatttggttgttgatgaatgatatctatgataatatattgctaagtatatgtgatgatcattaattgtcgtttaattataatgagttgtgccttttgtgccacattgacattggtgatagttaaaaattaaaatggtcttgattgaccaaatgttgtgatgaacaaaaatgttttgaaacaaactaaatcgtcatggtatggatgccacgtgaaggccttgtctt

SEQ ID NO: 221355 - DNA, 1097 bp, Zea Mays
attcaatcccagcaacagccgccctatcctcctcgtcagccgtcaccgccgccccacagcctcgcctctaccatcgcccccgccggtgctagctgcatccggccaggaggtcagtgcccggcactagccgcatctagcctggtgattagtgctccacctcgctccagcctccagcccacgcctataggggcccctgcctagcagccagccactgtcggctaggtggtcaatgcccccgcccgccgcccatgccacgccgccagccggccagctggctagccggcccgccactgctccactgtgctccagtagatgctcgattgtttgccggcgatggtgcagaccaacctctccatcgacaagattaatgccatgcttaaggcattcgaccatacgagagggttcatgtagcatgattaccaccttggctagaggcacaacatgctcattatgtggtcactggaatcaaaatgggaaacctcctatgcagaatgttttgtaatatgtttttcataaggcataggaaaaattagcataggcaaagaaatgggtcaaacctcatgttgagactgctaagatgaaatggattcctgttaaggagaaattggttctcctcaagaaaatgtagaacataatgtacaaaaggtatcaacaaggtgttaatgaattcaacctcatattgagattgctaagatgaaatggatttccgttaaggagaaattggttgtcctcaaggaaaatgcagaaccttatgtacaaattggttgtcttcaaaatgttggtcatgtagctgcaagcctacaacaaagagaatcaacaatggtggtgatgctacacatgtagaagtagcaatgttggtcttgtaaatccaagatttggttgttgatgaatgatatctatgataatatattgctaagtatatgtgatgatcattaattgtcgtttaattataatgagttgtgccttttgtgccacattgacattggtgatagttaaaaattaaaatggtcttgattgaccaaatgttgtgatgaacaaaaatgttttgaaacaaactaaatcgtcatggtatggatgccacgtgaaggccttgtctt

SEQ ID NO: 221356 - DNA, 1113 bp, Zea Mays
ccgattcaatcccagcaacagccgccctatcctcctcgtcagccgtcaccgccgccccacagcctcgcctctaccatcgcccccgccggtgctagctgcatccggccaggaggtcagtgcccggcactagccgcatctagcctggtgattagtgctccacctcgctccagcctccagcccacgcctataggggcccctgcctagcagccagccactgtcggctaggtggtcaatgcccccgcccgccgcccatgccacgccgccagccggccagctggctagccggcccgccactgctccactgtgctccagtagatgctcgattgtttgccggcgatggtgcagaccaacctctccatcgacaagattaatgccatgcttaaggcattcgaccatacgagagggttcatgtagcatgattaccaccttggctagaggcacaacatgctcattatgtggaggttgtcttaggtcactggaatcaaaatgggaaacctcctatgcagaatgttttgtaatatgtttttcataaggcataggaaaaattagcataggcaaagaaatgggtcaaacctcatgttgagactgctaagatgaaatggattcctgttaaggagaaattggttctcctcaagaaaatgtagaacataatgtacaaaaggtatcaacaaggtgttaatgaattcaacctcatattgagattgctaagatgaaatggatttccgttaaggagaaattggttgtcctcaaggaaaatgcagaaccttatgtacaaattggttgtcttcaaaatgttggtcatgtagctgcaagcctacaacaaagagaatcaacaatggtggtgatgctacacatgtagaagtagcaatgttggtcttgtaaatccaagatttggttgttgatgaatgatatctatgataatatattgctaagtatatgtgatgatcattaattgtcgtttaattataatgagttgtgccttttgtgccacattgacattggtgatagttaaaaattaaaatggtcttgattgaccaaatgttgtgatgaacaaaaatgttttgaaacaaactaaatcgtcatggtatggatgccacgtgaaggccttgtctt

SEQ ID NO: 221357 - DNA, 1161 bp, Zea Mays
ccgattcaatcccagcaacagccgccctatcctcctcgtcagccgtcaccgccgccccacagcctcgcctctaccatcgcccccgccggtgctagctgcatccggccaggaggtcagtgcccggcactagccgcatctagcctggtgattagtgctccacctcgctccagcctccagcccacgcctataggggcccctgcctagcagccagccactgtcggctaggtggtcaatgcccccgcccgccgcccatgccacgccgccagccggccagctggctagccggcccgccactgctccactgtgctccagtagatgctcgattgtttgccggcgatggtgcagaccaacctctccatcgacaagattaatgccatgcttaaggcattcgaccatacgagagggttcatgtagcatgattaccaccttggctagaggcacaacatgctcattatgtggtcagagtagaaccacaaatatttatcacttcaatttccattctcatggaggttgtcttaggtcactggaatcaaaatgggaaacctcctatgcagaatgttttgtaatatgtttttcataaggcataggaaaaattagcataggcaaagaaatgggtcaaacctcatgttgagactgctaagatgaaatggattcctgttaaggagaaattggttctcctcaagaaaatgtagaacataatgtacaaaaggtatcaacaaggtgttaatgaattcaacctcatattgagattgctaagatgaaatggatttccgttaaggagaaattggttgtcctcaaggaaaatgcagaaccttatgtacaaattggttgtcttcaaaatgttggtcatgtagctgcaagcctacaacaaagagaatcaacaatggtggtgatgctacacatgtagaagtagcaatgttggtcttgtaaatccaagatttggttgttgatgaatgatatctatgataatatattgctaagtatatgtgatgatcattaattgtcgtttaattataatgagttgtgccttttgtgccacattgacattggtgatagttaaaaattaaaatggtcttgattgaccaaatgttgtgatgaacaaaaatgttttgaaacaaactaaatcgtcatggtatggatgccacgtgaaggccttgtctt

SEQ ID NO: 221358 - DNA, 987 bp, Zea Mays
ctatggtccacaagaccataaccctaacctagccgattcaatcccagcaacagccgccctatcctcctcgtcagccgtcaccgccgccccacagcctcgcctctaccatcgcccccgccggtgctagctgcatccggccaggagctcgattgtttgccggcgatggtgcagaccaacctctccatcgacaagattaatgccatgcttaaggcattcgaccatacgagagggttcatgtagcatgattaccaccttggctagaggcacaacatgctcattatgtggtcagagtagaaccacaaatatttatcacttcaatttccattctcatggaggttgtcttaggtcactggaatcaaaatgggaaacctcctatgcagaatgttttgtaatatgtttttcataaggcataggaaaaattagcataggcaaagaaatgggtcaaacctcatgttgagactgctaagatgaaatggattcctgttaaggagaaattggttctcctcaagaaaatgtagaacataatgtacaaaaggtatcaacaaggtgttaatgaattcaacctcatattgagattgctaagatgaaatggatttccgttaaggagaaattggttgtcctcaaggaaaatgcagaaccttatgtacaaattggttgtcttcaaaatgttggtcatgtagctgcaagcctacaacaaagagaatcaacaatggtggtgatgctacacatgtagaagtagcaatgttggtcttgtaaatccaagatttggttgttgatgaatgatatctatgataatatattgctaagtatatgtgatgatcattaattgtcgtttaattataatgagttgtgccttttgtgccacattgacattggtgatagttaaaaattaaaatggtcttgattgaccaaatgttgtgatgaacaaaaatgttttgaaacaaactaaatcgtcatggtatggatgccacgtgaaggccttgtctt

SEQ ID NO: 221359 - DNA, 1447 bp, Zea Mays
ctagggttcgggctatcgagaatatgatgctgtttcagtatcttgtcaacacacttgaagcagattttgtgcctcgccaaattgcaaccaaagagtcactagactgggtgattttcagagagtctctcttaagtatgcttctgggatcacgaaagctcgtgttcaaatcttttgtgaagaactgcatgtgtattctactcaaccagtattaccatgaagctaaagatgattatgaagacatcataccttctgaaagagaaactgaatcaacatcttatcacaatttctccctaaactatttgtcctttgagttaaaaaagacactcatttctctcaggaaattatttgtgatggttatgaaacttgacttgaccaggaaagaagcagacacattagggttaacctcaagagctgacagattcagaaactctatcatggatattattttggatgaactaacttacaacagcagttatttatccccatttctcttggcctttgtggaacggaagtggaaattggagattattttgcagtacttttcaaaatattgtggcaagggcgcagtccgtactcgaaggtctgataattcacaagaagatttgaaactggaaaatgttctgaatttctttgtgacagccacaagtgcaaaagctattgtcagaaagatgagtgcagaaattgcccagcttcttttaacacatgcttaccaggcgtgcctttctgctgaagatgccaacagcaattctgctgatacacccgaaaaagttggagctactctccaagagatatcttccaacttcatagctgcttttcaaaacatcaggaaagttagcccggatatccagatatcaccgttcgagaaagaagctctgtttactgctgcaacgttggttaggaaattgaagagcaaagaaaggtttaagcaagagggaactccaggacttgctgcatgatggcgcgaagctcctgttgaaggctgctaatgcaaagatcaatccgcagacgccgagcgaggatggtgggcactgaggtgttgtcatgttggatgatctttgaatcttttgaggggctgctgatgtcttgtgtttcctgttgctgaaataagtgagaagtggctgagaacttagctgttatgtgtgtgtttctggtttgtttcagtttataaacattgagttgtttggtggtgtgacctgaatcaggtcagtttctggtgttttatcccttctagatcttagcccttggtgctttgctagacgtggataagaacaattgtatttctgttatgcaagtaatagaaatggagtgatctccgttcgaaaaaaaatgtgcaagtgagtctcttgattattagatcatgatctaattgtaggtataagtataaccgtttgttagggttttttttctataaatctacacgagctggtgatggaagggtttaaatgtt

SEQ ID NO: 221360 - DNA, 2531 bp, Zea Mays
cctgatgcagtgatgagaactgtctcactgagccaccagctcacgggttcgaagcagcctgtccgcatttgcgggagaaggcttgcctcggtttatccctttctcaggccccactcttgtgggagcctcatgcactgggtctgcccctttttgtattgtttactaaagtatcatagatgccacacttgttcaactgatcattgaatatcaaattggttgtttttatatcagtcattttacacagtaatttggttaatgaccctccccctccccctccctctccaccataaccctgttgcagccctttcgccacacactctattgattgatcttgttttgttcttcagctgctttgatttctgatccttaggatttcttctggattgctcataatcatgtgagtgatgctagataaactgctcagaagaataaataataaagggattgtatcaaatgtctgcattagtttccctgtttggttttctgcaattagtaataagttacaccaacctttgactttaaaacgagaagcttatatttgtattattttgttaatcaaagtaagctaatgtttgcgtctatctgacagctggaattgggttctactcaccagatctatctgacaactgcattagtttcccttggagacgaattttcaggcttggttaaaaaatctcctcattgtgcctcatccgctctcggttacgatgttctgtgcgccagcatccggttgggccgttgcatagtggacggttgacgtcggcccgttagtgatgggaggctagggttcgggtattttctcggccgggaccattgtttcggactcctattaatattataccggcagggtggtcatttcctccatggcccgagtttttttagatctctgtttgactattgcatttcgtggatgagtctagaaagtgatttgttttcttcattgcattttgtggatgggcctaaaaaataatatttttatctttttcatgcgtcacaaagtaatctgtttttatctctttcattgcatttttctagtttatctgattatttgcctctagacttgaaatttgagttaatttctgttctatgacctaggctatcgagaatatgatgctgtttcagtatcttgtcaacacacttgaagcagattttgtgcctcgccaaattgcaaccaaagagtcactagactgggtgattttcagagagtctctcttaagtatgcttctgggatcacgaaagctcgtgttcaaatcttttgtgaagaactgcatgtgtattctactcaaccagtattaccatgaagctaaagatgattatgaagacatcataccttctgaaagagaaactgaatcaacatcttatcacaatttctccctaaactatttgtcctttgagttaaaaaagacactcatttctctcaggaaattatttgtgatggttatgaaacttgacttgaccaggaaagaagcagacacattagggttaacctcaagagctgacagattcagaaactctatcatggatattattttggatgaactaacttacaacagcagttatttatccccatttctcttggcctttgtggaacggaagtggaaattggagattattttgcagtacttttcaaaatattgtggcaagggcgcagtccgtactcgaaggtctgataattcacaagaagatttgaaactggaaaatgttctgaatttctttgtgacagccacaagtgcaaaagctattgtcagaaagatgagtgcagaaattgcccagcttcttttaacacatgcttaccaggcgtgcctttctgctgaagatgccaacagcaattctgctgatacacccgaaaaagttggagctactctccaagagatatcttccaacttcatagctgcttttcaaaacatcaggaaagttagcccggatatccagatatcaccgttcgagaaagaagctctgtttactgctgcaacgttggttaggaaattgaagagcaaagaaaggtttaagcaagagggaactccaggacttgctgcatgatggcgcgaagctcctgttgaaggctgctaatgcaaagatcaatccgcagacgccgagcgaggatggtgggcactgaggtgttgtcatgttggatgatctttgaatcttttgaggggctgctgatgtcttgtgtttcctgttgctgaaataagtgagaagtggctgagaacttagctgttatgtgtgtgtttctggtttgtttcagtttataaacattgagttgtttggtggtgtgacctgaatcaggtcagtttctggtgttttatcccttctagatcttagcccttggtgctttgctagacgtggataagaacaattgtatttctgttatgcaagtaatagaaatggagtgatctccgttcgaaaaaaaatgtgcaagtgagtctcttgattattagatcatgatctaattgtaggtataagtataaccgtttgttagggttttttttctataaatctacacgagctggtgatggaagggtttaaatgtt

SEQ ID NO: 221361 - DNA, 1074 bp, Zea Mays
ccaccataaccctgttgcagccctttcgccacacactctattgattgatcttgttttgttcttcagctgctttgatttctgatccttaggatttcttctggattgctcataatcatgctatcgagaatatgatgctgtttcagtatcttgtcaacacacttgaagcagattttgtgcctcgccaaattgcaaccaaagagtcactagactgggtgattttcagagagtctctcttaagtatgcttctgggatcacgaaagctcgtgttcaaatcttttgtgaagaactgcatgtgtattctactcaaccagtattaccatgaagctaaagatgattatgaagacatcataccttctgaaagagaaactgaatcaacatcttatcacaatttctccctaaactatttgtcctttgagttaaaaaagacactcatttctctcaggaaattatttgtgatggttatgaaacttgacttgaccaggaaagaagcagacacattagggttaacctcaagagctgacagattcagaaactctatcatggatattattttggatgaactaacttacaacagcagttatttatccccatttctcttggcctttgtggaacggaagtggaaattggagattattttgcagtacttttcaaaatattgtggcaagggcgcagtccgtactcgaaggtctgataattcacaagaagatttgaaactggaaaatgttctgaatttctttgtgacagccacaagtgcaaaagctattgtcagaaagatgagtgcagaaattgcccagcttcttttaacacatgcttaccaggcgtgcctttctgctgaagatgccaacagcaattctgctgatacacccgaaaaagttggagctactctccaagagatatcttccaacttcatagctgcttttcaaaacatcaggaaagttagcccggatatccagatatcaccgttcgagaaagaagctctgtttactgctgcaacgttggttaggaaattgaagagcaaagaaagtatgctgatgacaccatcatatgtttggagaatgacattaagaaagccag

SEQ ID NO: 221362 - DNA, 1479 bp, Zea Mays
cagccctttcgccacacactctattgattgatcttgttttgttcttcagctgctttgatttctgatccttaggatttcttctggattgctcataatcatgctatcgagaatatgatgctgtttcagtatcttgtcaacacacttgaagcagattttgtgcctcgccaaattgcaaccaaagagtcactagactgggtgattttcagagagtctctcttaagtatgcttctgggatcacgaaagctcgtgttcaaatcttttgtgaagaactgcatgtgtattctactcaaccagtattaccatgaagctaaagatgattatgaagacatcataccttctgaaagagaaactgaatcaacatcttatcacaatttctccctaaactatttgtcctttgagttaaaaaagacactcatttctctcaggaaattatttgtgatggttatgaaacttgacttgaccaggaaagaagcagacacattagggttaacctcaagagctgacagattcaggcctttgtggaacggaagtggaaattggagattattttgcagtacttttcaaaatattgtggcaagggcgcagtccgtactcgaaggtctgataattcacaagaagatttgaaactggaaaatgttctgaatttctttgtgacagccacaagtgcaaaagctattgtcagaaagatgagtgcagaaattgcccagcttcttttaacacatgcttaccaggcgtgcctttctgctgaagatgccaacagcaattctgctgatacacccgaaaaagttggagctactctccaagagatatcttccaacttcatagctgcttttcaaaacatcaggaaagttagcccggatatccagatatcaccgttcgagaaagaagctctgtttactgctgcaacgttggttaggaaattgaagagcaaagaaaggtagagctgaggcccccgcttagggctggtttggtggacatggaattggagaggatccaacgggggagtaatcccctccttattcaaatttaaatagggaggagattcctcccacgtggattccctcaaattccctgtccaccaaatcagcttttaggatgtgataggttcagatggtgtagctttctggccactggtatcatcaagttgtttcatattttgggttatgtgtcacggttacggaattaccccgcctccagtagccagtgtccgcctcccctagtagactagcggtactggtctactggaaagttgaaggtacataacttatgcggctgttgcatatttacgagtggtggcatgtgtcgggaatatggtcttagaacctgattgtgggtcatctgatcaacccaacctaacccacccaaaacatcctgatttagggtgagtttgggtgaagagtggagaagaatgaagtcctattttctaaatctttagttctcaacaaagaacagtggagcgacttcgtgtttggtttgaga

SEQ ID NO: 221363 - DNA, 1568 bp, Zea Mays
ctccaccataaccctgttgcagccctttcgccacacactctattgattgatcttgttttgttcttcagctgctttgatttctgatccttaggatttcttctggattgctcataatcatgctatcgagaatatgatgctgtttcagtatcttgtcaacacacttgaagcagattttgtgcctcgccaaattgcaaccaaagagtcactagactgggtgattttcagagagtctctcttaagtatgcttctgggatcacgaaagctcgtgttcaaatcttttgtgaagaactgcatgtgtattctactcaaccagtattaccatgaagctaaagatgattatgaagacatcataccttctgaaagagaaactgaatcaacatcttatcacaatttctccctaaactatttgtcctttgagttaaaaaagacactcatttctctcaggaaattatttgtgatggttatgaaacttgacttgaccaggaaagaagcagacacattagggttaacctcaagagctgacagattcagaaactctatcatggatattattttggatgaactaacttacaacagcagttatttatccccatttctcttggcctttgtggaacggaagtggaaattggagattattttgcagtacttttcaaaatattgtggcaagggcgcagtccgtactcgaaggtctgataattcacaagaagatttgaaactggaaaatgttctgaatttctttgtgacagccacaagtgcaaaagctattgtcagaaagatgagtgcagaaattgcccagcttcttttaacacatgcttaccaggcgtgcctttctgctgaagatgccaacagcaattctgctgatacacccgaaaaagttggagctactctccaagagatatcttccaacttcatagctgcttttcaaaacatcaggaaagttagcccggatatccagatatcaccgttcgagaaagaagctctgtttactgctgcaacgttggttaggaaattgaagagcaaagaaaggtagagctgaggcccccgcttagggctggtttggtggacatggaattggagaggatccaacgggggagtaatcccctccttattcaaatttaaatagggaggagattcctcccacgtggattccctcaaattccctgtccaccaaatcagcttttaggatgtgataggttcagatggtgtagctttctggccactggtatcatcaagttgtttcatattttgggttatgtgtcacggttacggaattaccccgcctccagtagccagtgtccgcctcccctagtagactagcggtactggtctactggaaagttgaaggtacataacttatgcggctgttgcatatttacgagtggtggcatgtgtcgggaatatggtcttagaacctgattgtgggtcatctgatcaacccaacctaacccacccaaaacatcctgatttagggtgagtttgggtgaagagtggagaagaatgaagtcctattttctaaatctttagttctcaacaaagaacagtggagcgacttcgtgtttggtttgaga

SEQ ID NO: 221364 - DNA, 86 bp, Zea Mays
gatcgagaggtacaagaaggcacacgccgttggctcttcctctggccccccactcttagagcacaatgcccagcaagaatccgcaa

SEQ ID NO: 221365 - DNA, 1010 bp, Zea Mays
caaggccatccgaccaccgcagcctaaatcaccttccgtcgccagctcctagaaacccctctcctgcccggcctcctccctctctcatccgatgggcaagtcaagcaagaaggcggccgccgtggctgcagcgccagcggcggtgcccaaggggaagaagcgggaggcggaggacgagatcgagatggccgtgagcgcgaagaagcagaaggcggcgccaccggcgaaggccgtgccgacgtccaagaaggacgccaaggaggacgccaagtccaagaagcagccgccccccaagaaggctgagaacagcagcagtgactctgaagaggaccccgagtccgaagaggagaatttttataatttgattgagtcggggagggcagacggagatgaggagtttgacgaggacgaggaggacgggttcgagttcggtgacgctgacgaggcgatgcaatgcgtggtgatggcggaaagcagcaccaccgccgcggcgctgcgtgctcacacgcaggactacgaggcgctagctgcgcacaagcgcaaggcccttgccgaggagcaaccccagagggaggagggtcccaaaaggccaagaccggaccaactttcagaagcagaagcagcaaccatgttcgaccaactgatggaaggctttggtcttaggcgtaaaagaaggtcaaaagatggcaagagaaggggaagaaagaaaggaacaaagaataagggcagtgctgaagttattaaaaagttgggtgatgctactctacttttcgctgaagaaaaatttaacgaggcaatacctatactacatgagattgtgcgaattgcaccaaatttgtcagattcatattatctacttggtagcatttatagtgagattggtgaactagataaagccataaacttcttgatgctagctgcatatgtttccccaaaggatgcatctctgtggaagaaacttattcccttggcaaacatgatacacttgccatcagtggcatgtcctggat

SEQ ID NO: 221366 - DNA, 739 bp, Zea Mays
atgggcaagtcaagcaagaaggcggccgccgtggctgcagcgccagcggcggtgcccaaggggaagaagcgggaggcggaggacgagatcgagatggccgtgagcgcgaagaagcagaaggcggcgccaccggcgaaggccgtgccgacgtccaagaaggacgccaaggaggacgccaagtccaagaagcagccgccccccaagaaggctgagaacagcagcagtgactctgaagaggaccccgagtccgaagaggagaatttttataatttgattgagtcggggagggcagacggagatgaggagtttgacgaggacgaggaggacgggttcgagttcggtgacgctgacgaggcgatgcaatgcgtggtgatggcggaaagcagcaccaccgccgcggcgctgcgtgctcacacgcaggactacgaggcgctagctgcgcacaagcgcaaggcccttgccgaggagcaaccccagagggaggagggtcccaaaaggccaagaccggaccaactttcagaagcagaagcagcaaccatgttcgaccaactgatggaaggctttggtcttaggcgtaaaagaaggtcaaaagatggcaagagaaggggaagaaagaaaggaacaaagaataagggcagtgctgaagttattaaaaagttgggtgatgctactctacttttcgctgaagaaaaatttaacgagttatgtacaatggtcacctggaaggtggacgattgag

SEQ ID NO: 221367 - DNA, 1743 bp, Zea Mays
ctcatatggatgaacatgttcattcgtccagaagaggcggtcttcaaactgtcccgttcataatcattaacgaaggatgtgaacggattgtaaacgtagcggtcagtgcaaatattattatatacttgaccaaagagtatcatatgggatctgcggaaagtgcaatggttttgtttatctaccaagcagctacaaacttcttgcctatctttggggctattgtgtctgatgcactattgggacgctttctcacaatctcactcacacttttcgcatgcacgattggagctgttcttctctggttgaccacagtagttccaacattggtcgcagaagattgttcaaatgaagaccagagttgtcactcaccgacaacactacaattttttgtcttgctaacttctttattgttcttgtcaattggcgcaagtggtgttcgcccttgcagccttccttttggtgtggaccagtttacccactggagcggcgctccaaaggaccgtgcgctcaaagttctattcggctggtattacgtatcaatgggtggctcagcaatcatttctataactctcatcgtgtacttgcaagacaaattgggctggaagatcggttttgccatttctatggttatagcggcatttgctgcaattttaaacattgttacatcgcccctttacatcaaggtgaaaccacagaaaagcacgtggattagtttagtgcaagtggttttcatcgctataaggaatcgacacattcagcttcctaaagcagcaggtgagaatgatctgcattactgcaacgttggaggactggcaatggttccatcaagcaaaatgaggttccttaacagagcatgcgtattgagggcacatgtagaaagttctaacactgaagtgcttaattcatggagtgtatgcacagttgagcaagtcgaggacatcaagcgtgtactaagtgtcatccctatgtggtcagctacgattacaagtttgttgatccaaacggcttcgttcagggtgctacaggcagaaacgatggaccgtcatgttggtagcacaaggttccaaatgcctgctggttcagtcgcaatatttgaaggcattacattcacattggtgtcaggatgcattacaggaagagaaaaaacgcttagtcacaagcagaaaatgggcatcggcgtgctcttttccattgcatgtgctctttcggcatcagtggtggaggccatccggaggaagcaagcaacaaggcagggcctagaaaataatactgatgatggtggggttgtaaatatgtcagtgctgtggctagcccctcaatgtgtttttgctggcctcattagtgcgtttggatccattggacagatcgaattctactatgaagtgctaccaaagtcaatgagtagcttagcactggccctcctccccctagcaataggtgtcgcaaacattgcaagtacagtggtcgtcaagctcgtcaaagtgattacatgtagtggtggaagagtaggatggcttcttgataacctgaaccaaggccattatgactacttctattttgtgctagcaatgctcggtattgcaggttttatctattttgttgcttgttgctattggtttgaggaaccatcaccaaaccagcttgttcaatctaatgaagatgaaccaaatatgagatgaccatggttggcataaagctttctataatgtcattgggtcaaaccatgtttgtcgaggcatagtt

SEQ ID NO: 221368 - DNA, 1508 bp, Zea Mays
gttcattcgtccagaagaggcggtcttcaaactgtcccgttcataatcaggagctgttcttctctggttgaccacagtagttccaacattggtcgcagaagattgttcaaatgaagaccagagttgtcactcaccgacaacactacaattttttgtcttgctaacttctttattgttcttgtcaattggcgcaagtggtgttcgcccttgcagccttccttttggtgtggaccagtttacccactggagcggcgctccaaaggaccgtgcgctcaaagttctattcggctggtattacgtatcaatgggtggctcagcaatcatttctataactctcatcgtgtacttgcaagacaaattgggctggaagatcggttttgccatttctatggttatagcggcatttgctgcaattttaaacattgttacatcgcccctttacatcaaggtgaaaccacagaaaagcacgtggattagtttagtgcaagtggttttcatcgctataaggaatcgacacattcagcttcctaaagcagcaggtgagaatgatctgcattactgcaacgttggaggactggcaatggttccatcaagcaaaatgaggttccttaacagagcatgcgtattgagggcacatgtagaaagttctaacactgaagtgcttaattcatggagtgtatgcacagttgagcaagtcgaggacatcaagcgtgtactaagtgtcatccctatgtggtcagctacgattacaagtttgttgatccaaacggcttcgttcagggtgctacaggcagaaacgatggaccgtcatgttggtagcacaaggttccaaatgcctgctggttcagtcgcaatatttgaaggcattacattcacattggtgtcaggatgcattacaggaagagaaaaaacgcttagtcacaagcagaaaatgggcatcggcgtgctcttttccattgcatgtgctctttcggcatcagtggtggaggccatccggaggaagcaagcaacaaggcagggcctagaaaataatactgatgatggtggggttgtaaatatgtcagtgctgtggctagcccctcaatgtgtttttgctggcctcattagtgcgtttggatccattggacagatcgaattctactatgaagtgctaccaaagtcaatgagtagcttagcactggccctcctccccctagcaataggtgtcgcaaacattgcaagtacagtggtcgtcaagctcgtcaaagtgattacatgtagtggtggaagagtaggatggcttcttgataacctgaaccaaggccattatgactacttctattttgtgctagcaatgctcggtattgcaggttttatctattttgttgcttgttgctattggtttgaggaaccatcaccaaaccagcttgttcaatctaatgaagatgaaccaaatatgagatgaccatggttggcataaagctttctataatgtcattgggtcaaaccatgtttgtcgaggcatagtt

SEQ ID NO: 221369 - DNA, 2256 bp, Zea Mays
cccctctctgcttgttcttagcactgcaattgatatctctaggaaactatggcatttttcctttgtgggattaaccaagttctgctagaacagtatgaagtaaaccatgctaagacatcgatttggacaatattgacgacattgacatcgagagcagaggtgacttcatttgcataatgtgatgctcacgcctggtttaggtagtagagtagtagcaatgagcttcctttgattgtcgctcacgagagagtagaagagtagcagtacgacaggttcaggtagcagaatagcagtagcattgccatagatcatgcacttatatgctgagatctgcacaaaaattctatgaccagttgaatcagcacatccattcccctacgatttctgttatcgatcagaaatggtatagcttgtatcacttcaacaatctgtagttcgtttttatagaatcatttcatggatctcaatattagcggccatagtttttagctgcatataaatgtcatttgtttgtaacccaataaagtattttaggcaaattttgactgatttaaatgttcagcctggacagtgacttcagacagtatagatggtaccagtgtcagtccattacaaggttttgcattatactgcattttctgcaaaagtagcagttaccaagtgccatgtgccctcgttctgcatcatcactttgctcgttcagaagtactgaagtagtaattaacacccctttctataatgattagatgcaccaaactataaaacacatgacaccagtttgtaaaaatacctgcatcctaaggttattctgctctactctgctgctaaattcaacatccagattacttggtagaggtagcaaggccttgatcctagcacgaaatgagaaaaaagttgacgtcaccttcttgtatgaactatacactttaggatcccttcttcctaaacgcgggctggcagtgttgggttcttctattgtgcttttgtgcattggacaagacaagaagttcttgggacaaactggaggtttcatgtgcccattggcgcgggagtccggggaagagagcgtcggctcctttaggatcgggtcgtcgatgctgctgggccacggggtgacgatccgtgtgctcctcttcagctcgatgtggcacctgcgggggcgcgcgtacgccgccatctcgcgcgtgcgcagcgcgacgttgccggtggcggcgtcctggctgcgcttcaagaacacccacgtcctcctcatggtcgtcctcttcgccctcttcttacggaagctctctggcgctgatcttccgagatgtttgcaatgttgtctttgcgatgcattgccagacgccacctcttgctcacagggacctaaaggtagaaaatgttcttgctgctgatggggcatggaaactatgtgattttggtagtgtatcgacaaatcataagtgctttgataaacctgaggagatgggcattgaagaagataacatcaggaagcacactactccttcatataagttaccagtgagaaagtagatatctggactcttgggtgtctcttgtatagaatctgctacttcaaatcagcattcgatggagaatcaaagctccaaatacttaacgggaactatcgcatcctagaattgccgaagtacagttcttctaattcaacacttaccaaagacatgcttaattcttctacagatgccagacaggacatcacacaggcaagtgctttgcttgattggccattcacagtgaacaggcaggacaagattgcgagttcaaaataatgtcaacctggcagtctattatatcatatattgtggcaccacatctcagataaaaaggtgagtccaggaatgaggattcacgaacactgcaattcaattatggttcattcaaacataagggatttttgaagcactaattgcagtgtatcaactccgctctcaaatataagtgaaaaaagaacctatgtcagtcctttagaaaatatcttctcagggatggtttcagcttgaaggttcgagctttgcatattgccaaagaagctttagatatggtacttgcagatgataacttcagtactatagttgcagcagttggtgaagggaggtctatttacaacaacatgaaggcttttattaggtccattttttagataatctatggccaaacattttttgaatcctaggcctgttgcagcggtgagagttgtctagaaaggcttgtctcagttaatcccttactccaacc

SEQ ID NO: 221370 - DNA, 2836 bp, Zea Mays
ttttggtgcaatgtgaagtatgaggtagtcgaggctgcaaagcggctccatttgaaggagcatgtggttttggacggttctggcaatcctgtaaaattagctgctacagtcgaatgcaagggcattgttgggagtgatgacaggcattacattttggatctgatgagagtgactcctcgagattctaactacattggacaagggcaccgcttctgtgtgctgagacctgaacttatagcatcatttgttgaggctgaatccatgaaacaatcgttgaagcagaaggttccagatgctccagttgcaagtacttctgatgctaaggctacctctgttgaagcagatgacaagtctgaagaaagctctgttcatacacacaaggaaaatgacaactcaagctccgagattcttttcaatccaaatgtgtttacggagtacaagcttgatggcagtccagaggaaatcgctgccgacgaagagttggtaaaaagggctggtacatatcttatagacatagtgatcccaaaaattgttcaggatctatgctcccttgatatctcccctatggatggacagactttaaccgatgcattgcatctccatgggataaatattaggtatctgggcaagattgcaggcatggtcaaacatttaccacacttacaggacttgttttctgctgaaataatagttagatctgcaaagcatgttatcaaggatatactgaggcaaagtttggatcatgatattgggccagctattgctcatttcttgaactgtttcatggggaaagttttaggtgcttctacagagggtagtctaagtgacatgcagtcaaagactctgaagggccatgaaaatagccaaactcaaaagtctactaaaggccataaactgagcaatgctgctgcttcaagaaaaagcttgtcagcttattctcatctaacctctgatggaatttggtttagcattaaggaatttgcaaaatcaaaatatcagtttgaagtgccagatgatgcaaggctttcagccaaaagggtagctgttctccgaaatctttgccaaaaggtaggaataacaattgctgcacgtaaatatgatcttgatgcttcaactccatttgaagcctcagatattttaaatctccaaccagtcgtcaagcattctgttccaacctgtacggaagcaaaaaatcttatggaagcagggaaagtcaggatggctgagggaacattgaatgaggcatatgcattgttttctgaagccttttcactgcttcaacagataactggtcccatgcacaaggatgctgcaaattgttgccggtaccttgctatggttttgtaccatgctggtgatacagctggggcagttgtgcagcaacatagggaactcatcataaacgagagatgtcttggtcttgatcatccagacacagcccacagttatggtaacatggccttattctatcatgggctcaatcaaactgagctggcactgcggcacatgtctcgcacactgctgctgctaagtttggcgtcaggacctgatcacccggatgttgcagcaactcttataaatgttgcaatgatgtaccaggatgccagtaatatgaataccgctctcaggtatcttcaagaagcccttatgaagaatgagcgacttcttgggcctgtccatgttcaaacagctgtgtgctatcatgctctagccattgcatttagttgtatgagcttatataagctttcaattcagcatgaaaagaagacatatgatatactggtaaaacaattaggggaaaatgactcacggactgaagactcaaaaaattggttgaatacatttaagcttcgagaagagcaggtcaacgcccagaagcagaagggccaggaagctaatgcatccgataacgctgttaaattcttgaaggcaaaccctgcagttttacaagcaatgaaggctgctgcgatccaatcaggtggtgtgtcagcaaatgtcaacaggtcgctcaatgctgcagtcgttggagaaggtgtaccacgactgagaggagtggatgagcgagctgctcgagcgactgcagaagcacggaagaaagctgctgcaagaggccttaatgtccgtaatggccctgtggcaaaccatgcgtctgatgaactagctcagattctcaaactcatcaacgctgtttcggggtcttccactcctggctctgcaaagactgaggtatctgcctctgaagggcaggcaacgaatggatgtattcaaaatggaactgacactgaaccgaaggctgcggataccaacgggctatctgcatcggttaagtccactgtcaacgcaccatttggactggggacaacattggagtcgaagaagcagaaatcgaagcaaaagtcgtagaaaacctgtgcttggaatttcctttagcaacagttttggactgtagagtgatttgggtttttgacctttataggattgccacgttcacgtggtggaagagttcatttgtttttgttggaggttttttaggaggtctcaataatcattacaagaaagaagacaattgtttcgaatcatcattgatagaccactgatgagatattggctaatccttaagttaataaatcttcagtcgatacaatacctgtttaaagcatccttgtgatggctgctattgtttgtcgtacggcatatgctggtataccgttaatgtagttcttgatcatcgtatctttttctagaaggtatacccgtacaatgttgccaactattttattattgctatcgataattattgaactaggctgagcgctgttgcttggcctggccgtga

SEQ ID NO: 221371 - DNA, 3294 bp, Zea Mays
atggaacaaccacaatgcaatgcgcctttgcaggcagtggggcaagaaaagccgagggagaggaggaagcgacgctaccggcgatgcgtggctgaacaattgagggagagttttgctgtcgacgccgactatgaatacatttcaaaggaccacaagccagattgccaaaatgggtccagcagaagcaccaaggtttcctccccagatgtgatcactaagccagaccatgatgaatctgctgaggtagttgactcaaaatccgaagaggcacaaatcacagatagtgagcaggcaacatatgcttctgccaacaatgacttaaaaggaactaaggcctatcaagaagctgatgtttctggcctttacaatcttgcgatggcaataattgattacagaggtcacagggttgtagctcagagtatcatacctggtattcttcaaggagacaagtctgattctcttctgtatggctctgttgataatggcaagaagatatcttggaacgaaacattccattcaaaggtagtcgaggctgcaaagcggctccatttgaaggagcatgtggttttggacggttctggcaatcctgtaaaattagctgctacagtcgaatgcaagggcattgttgggagtgatgacaggcattacattttggatctgatgagagtgactcctcgagattctaactacattggacaagggcaccgcttctgtgtgctgagacctgaacttatagcatcatttgttgaggctgaatccatgaaacaatcgttgaagcagaaggttccagatgctccagttgcaagtacttctgatgctaaggctacctctgttgaagcagatgacaagtctgaagaaagctctgttcatacacacaaggaaaatgacaactcaagctccgagattcttttcaatccaaatgtgtttacggagtacaagcttgatggcagtccagaggaaatcgctgccgacgaagagttggtaaaaagggctggtacatatcttatagacatagtgatcccaaaaattgttcaggatctatgctcccttgatatctcccctatggatggacagactttaaccgatgcattgcatctccatgggataaatattaggtatctgggcaagattgcaggcatggtcaaacatttaccacacttacaggacttgttttctgctgaaataatagttagatctgcaaagcatgttatcaaggatatactgaggcaaagtttggatcatgatattgggccagctattgctcatttcttgaactgtttcatggggaaagttttaggtgcttctacagagggtagtctaagtgacatgcagtcaaagactctgaagggccatgaaaatagccaaactcaaaagtctactaaaggccataaactgagcaatgctgctgcttcaagaaaaagcttgtcagcttattctcatctaacctctgatggaatttggtttagcattaaggaatttgcaaaatcaaaatatcagtttgaagtgccagatgatgcaaggctttcagccaaaagggtagctgttctccgaaatctttgccaaaaggtaggaataacaattgctgcacgtaaatatgatcttgatgcttcaactccatttgaagcctcagatattttaaatctccaaccagtcgtcaagcattctgttccaacctgtacggaagcaaaaaatcttatggaagcagggaaagtcaggatggctgagggaacattgaatgaggcatatgcattgttttctgaagccttttcactgcttcaacagataactggtcccatgcacaaggatgctgcaaattgttgccggtaccttgctatggttttgtaccatgctggtgatacagctggggcagttgtgcagcaacatagggaactcatcataaacgagagatgtcttggtcttgatcatccagacacagcccacagttatggtaacatggccttattctatcatgggctcaatcaaactgagctggcactgcggcacatgtctcgcacactgctgctgctaagtttggcgtcaggacctgatcacccggatgttgcagcaactcttataaatgttgcaatgatgtaccaggatgccagtaatatgaataccgctctcaggtatcttcaagaagcccttatgaagaatgagcgacttcttgggcctgtccatgttcaaacagctgtgtgctatcatgctctagccattgcatttagttgtatgagcttatataagctttcaattcaggggaaaatgactcacggactgaagactcaaaaaattggttgaatacatttaagcttcgagaagagcaggtcaacgcccagaagcagaagggccaggaagctaatgcatccgataacgctgttaaattcttgaaggcaaaccctgcagttttacaagcaatgaaggctgctgcgatccaatcaggtggtgtgtcagcaaatgtcaacaggtcgctcaatgctgcagtcgttggagaaggtgtaccacgactgagaggagtggatgagcgagctgctcgagcgactgcagaagcacggaagaaagctgctgcaagaggccttaatgtccgtaatggccctgtggcaaaccatgcgtctgatgaactagctcagattctcaaactcatcaacgctgtttcggggtcttccactcctggctctgcaaagactgaggtatctgcctctgaagggcaggcaacgaatggatgtattcaaaatggaactgacactgaaccgaaggctgcggataccaacgggctatctgcatcggttaagtccactgtcaacgcaccatttggactggggacaacattggagtcgaagaagcagaaatcgaagcaaaagtcgtagaaaacctgtgcttggaatttcctttagcaacagttttggactgtagagtgatttgggtttttgacctttataggattgccacgttcacgtggtggaagagttcatttgtttttgttggaggttttttaggaggtctcaataatcattacaagaaagaagacaattgtttcgaatcatcattgatagaccactgatgagatattggctaatccttaagttaataaatcttcagtcgatacaatacctgtttaaagcatccttgtgatggctgctattgtttgtcgtacggcatatgctggtataccgttaatgtagttcttgatcatcgtatctttttctagaaggtatacccgtacaatgttgccaactattttattattgctatcgataattattgaactaggctgagcgctgttgcttggcctggccgtga

SEQ ID NO: 221372 - DNA, 3231 bp, Zea Mays
atggaacaaccacaatgcaatgcgcctttgcaggcagtggggcaagaaaagccgagggagaggaggaagcgacgctaccggcgatgcgtggctgaacaattgagggagagttttgctgtcgacgccgactatgaatacatttcaaaggaccacaagccagattgccaaaatgggtccagcagaagcaccaaggtttcctccccagatgtgatcactaagccagaccatgatgaatctgctgaggtagttgactcaaaatccgaagaggcacaaatcacagatagtgagcaggcaacatatgcttctgccaacaatgacttaaaaggaactaaggcctatcaagaagctgatgtttctggcctttacaatcttgcgatggcaataattgattacagaggtcacagggttgtagctcagagtatcatacctggtattcttcaaggagacaagtctgattctcttctgtatggctctgttgataatggcaagaagatatcttggaacgaaacattccattcaaaggtagtcgaggctgcaaagcggctccatttgaaggagcatgtggttttggacggttctggcaatcctgtaaaattagctgctacagtcgaatgcaagggcattgttgggagtgatgacaggcattacattttggatctgatgagagtgactcctcgagattctaactacattggacaagggcaccgcttctgtgtgctgagacctgaacttatagcatcatttgttgaggctgaatccatgaaacaatcgttgaagcagaaggttccagatgctccagttgcaagtacttctgatgctaaggctacctctgttgaagcagatgacaagtctgaagaaagctctgttcatacacacaaggaaaatgacaactcaagctccgagattcttttcaatccaaatgtgtttacggagtacaagcttgatggcagtccagaggaaatcgctgccgacgaagagttggtaaaaagggctggtacatatcttatagacatagtgatcccaaaaattgttcaggatctatgctcccttgatatctcccctatggatggacagactttaaccgatgcattgcatctccatgggataaatattaggtatctgggcaagattgcaggcatggtcaaacatttaccacacttacaggacttgttttctgctgaaataatagttagatctgcaaagcatgttatcaaggatatactgaggcaaagtttggatcatgatattgggccagctattgctcatttcttgaactgtttcatggggaaagttttaggtgcttctacagagggtagtctaagtgacatgcagtcaaagactctgaagggccatgaaaatagccaaactcaaaagtctactaaaggccataaactgagcaatgctgctgcttcaagaaaaagcttgtcagcttattctcatctaacctctgatggaatttggtttagcattaaggaatttgcaaaatcaaaatatcagtttgaagtgccagatgatgcaaggctttcagccaaaagggtagctgttctccgaaatctttgccaaaaggtaggaataacaattgctgcacgtaaatatgatcttgatgcttcaactccatttgaagcctcagatattttaaatctccaaccagtcgtcaagcattctgttccaacctgtacggaagcaaaaaatcttatggaagcagggaaagtcaggatggctgagggaacattgaatgaggcatatgcattgttttctgaagccttttcactgcttcaacagataactggtcccatgcacaaggatgctgcaaattgttgccggtaccttgctatggttttgtaccatgctggtgatacagctggggcagttgtgcagcaacatagggaactcatcataaacgagagatgtcttggtcttgatcatccagacacagcccacagttatggtaacatggccttattctatcatgggctcaatcaaactgagctggcactgcggcacatgtctcgcacactgctgctgctaagtttggcgtcaggacctgatcacccggatgttgcagcaactcttataaatgttgcaatgatgtaccaggatgccagtaatatgaataccgctctcagcatgaaaagaagacatatgatatactggtaaaacaattaggggaaaatgactcacggactgaagactcaaaaaattggttgaatacatttaagcttcgagaagagcagttattttatcgtcaatctgcacaggtcaacgcccagaagcagaagggccaggaagctaatgcatccgataacgctgttaaattcttgaaggcaaaccctgcagttttacaagcaatgaaggctgctgcgatccaatcaggtggtgtgtcagcaaatgtcaacaggtcgctcaatgctgcagtcgttggagaaggtgtaccacgactgagaggagtggatgagcgagctgctcgagcgactgcagaagcacggaagaaagctgctgcaagaggccttaatgtccgtaatggccctgtggcaaaccatgcgtctgatgaactagctcagattctcaaactcatcaacgctgtttcggggtcttccactcctggctctgcaaagactgaggtatctgcctctgaagggcaggcaacgaatggatgtattcaaaatggaactgacactgaaccgaaggctgcggataccaacgggctatctgcatcggttaagtccactgtcaacgcaccatttggactggggacaacattggagtcgaagaagcagaaatcgaagcaaaagtcgtagaaaacctgtgcttggaatttcctttagcaacagttttggactgtagagtgatttgggtttttgacctttataggattgccacgttcacgtggtggaagagttcatttgtttttgttggaggttttttaggaggtctcaataatcattacaagaaagaagacaattgtttcgaatcatcattgatagaccactgatgagatattggctaatccttaagttaataaatcttcagtcgatacaatacctgtttaaagcatccttgtgatggctgctattgtttgtcgtacggcatatgctggtataccgttaatgtagttcttgatcatcgtatctttttctagaaggtatacccgtacaatgttgccaactattttattattgctatcgataattattgaactaggctgagcgctgttgcttggcctggccgtga

SEQ ID NO: 221373 - DNA, 3336 bp, Zea Mays
gcatggaacaaccacaatgcaatgcgcctttgcaggcagtggggcaagaaaagccgagggagaggaggaagcgacgctaccggcgatgcgtggctgaacaattgagggagagttttgctgtcgacgccgactatgaatacatttcaaaggaccacaagccagattgccaaaatgggtccagcagaagcaccaaggtttcctccccagatgtgatcactaagccagaccatgatgaatctgctgaggtagttgactcaaaatccgaagaggcacaaatcacagatagtgagcaggcaacatatgcttctgccaacaatgacttaaaaggaactaaggcctatcaagaagctgatgtttctggcctttacaatcttgcgatggcaataattgattacagaggtcacagggttgtagctcagagtatcatacctggtattcttcaaggagacaagtctgattctcttctgtatggctctgttgataatggcaagaagatatcttggaacgaaacattccattcaaaggtagtcgaggctgcaaagcggctccatttgaaggagcatgtggttttggacggttctggcaatcctgtaaaattagctgctacagtcgaatgcaagggcattgttgggagtgatgacaggcattacattttggatctgatgagagtgactcctcgagattctaactacattggacaagggcaccgcttctgtgtgctgagacctgaacttatagcatcatttgttgaggctgaatccatgaaacaatcgttgaagcagaaggttccagatgctccagttgcaagtacttctgatgctaaggctacctctgttgaagcagatgacaagtctgaagaaagctctgttcatacacacaaggaaaatgacaactcaagctccgagattcttttcaatccaaatgtgtttacggagtacaagcttgatggcagtccagaggaaatcgctgccgacgaagagttggtaaaaagggctggtacatatcttatagacatagtgatcccaaaaattgttcaggatctatgctcccttgatatctcccctatggatggacagactttaaccgatgcattgcatctccatgggataaatattaggtatctgggcaagattgcaggcatggtcaaacatttaccacacttacaggacttgttttctgctgaaataatagttagatctgcaaagcatgttatcaaggatatactgaggcaaagtttggatcatgatattgggccagctattgctcatttcttgaactgtttcatggggaaagttttaggtgcttctacagagggtagtctaagtgacatgcagtcaaagactctgaagggccatgaaaatagccaaactcaaaagtctactaaaggccataaactgagcaatgctgctgcttcaagaaaaagcttgtcagcttattctcatctaacctctgatggaatttggtttagcattaaggaatttgcaaaatcaaaatatcagtttgaagtgccagatgatgcaaggctttcagccaaaagggtagctgttctccgaaatctttgccaaaaggtaggaataacaattgctgcacgtaaatatgatcttgatgcttcaactccatttgaagcctcagatattttaaatctccaaccagtcgtcaagcattctgttccaacctgtacggaagcaaaaaatcttatggaagcagggaaagtcaggatggctgagggaacattgaatgaggcatatgcattgttttctgaagccttttcactgcttcaacagataactggtcccatgcacaaggatgctgcaaattgttgccggtaccttgctatggttttgtaccatgctggtgatacagctggggcagttgtgcagcaacatagggaactcatcataaacgagagatgtcttggtcttgatcatccagacacagcccacagttatggtaacatggccttattctatcatgggctcaatcaaactgagctggcactgcggcacatgtctcgcacactgctgctgctaagtttggcgtcaggacctgatcacccggatgttgcagcaactcttataaatgttgcaatgatgtaccaggatgccagtaatatgaataccgctctcaggtatcttcaagaagcccttatgaagaatgagcgacttcttgggcctgtccatgttcaaacagctgtgtgctatcatgctctagccattgcatttagttgtatgagcttatataagctttcaattcagcatgaaaagaagacatatgatatactggtaaaacaattaggggaaaatgactcacggactgaagactcaaaaaattggttgaatacatttaagcttcgagaagagcaggtcaacgcccagaagcagaagggccaggaagctaatgcatccgataacgctgttaaattcttgaaggcaaaccctgcagttttacaagcaatgaaggctgctgcgatccaatcaggtggtgtgtcagcaaatgtcaacaggtcgctcaatgctgcagtcgttggagaaggtgtaccacgactgagaggagtggatgagcgagctgctcgagcgactgcagaagcacggaagaaagctgctgcaagaggccttaatgtccgtaatggccctgtggcaaaccatgcgtctgatgaactagctcagattctcaaactcatcaacgctgtttcggggtcttccactcctggctctgcaaagactgaggtatctgcctctgaagggcaggcaacgaatggatgtattcaaaatggaactgacactgaaccgaaggctgcggataccaacgggctatctgcatcggttaagtccactgtcaacgcaccatttggactggggacaacattggagtcgaagaagcagaaatcgaagcaaaagtcgtagaaaacctgtgcttggaatttcctttagcaacagttttggactgtagagtgatttgggtttttgacctttataggattgccacgttcacgtggtggaagagttcatttgtttttgttggaggttttttaggaggtctcaataatcattacaagaaagaagacaattgtttcgaatcatcattgatagaccactgatgagatattggctaatccttaagttaataaatcttcagtcgatacaatacctgtttaaagcatccttgtgatggctgctattgtttgtcgtacggcatatgctggtataccgttaatgtagttcttgatcatcgtatctttttctagaaggtatacccgtacaatgttgccaactattttattattgctatcgataattattgaactaggctgagcgctgttgcttggcctggccgtga

SEQ ID NO: 221374 - DNA, 4864 bp, Zea Mays
cttttagacatgaccaatgccctatgcacaatatgctgccacagtctaagctggtgcatgcgcagcgatggccgacggaaagaaaaataaggaaaagaagcaaaccaacgcgagcgtgtgacccagactggcagactcccagtcgcagaggccgcacgagagattaggatggtctgcccatccgtataaaaggcgcggccggcgattgcagccccctccgtcctcgttctcgtcttcgcgccgcctctcatcttccgtgagccgaagcttcggcggcggcggaatatggcggggaaaaccaagggtgggaagaacaaaggaaaggcgcagggcgctggtcagtccgcctctgctgagccagaggtgccggcgactgacggagccgaagtggtgaatccagagaatggggaagtaaacgaaccccccgtcacggaggatggtgtgaaaaatgttgagaaaggagacggggatgccctggaggttgtgcagcctgcaagaaagccagctgaaggagagcttcatctatacgctgttcctgtcaggacacaatcaggtgaaaagcttgagctgcagctaagcccaggagattctgttattgatgttaaacaattccttttggatgctcctgaaacatgcttctatacatgctacaatttgatattgcatactgaagatgggtcagctcatcagttggaagactacaatgaaatatctgaaatagcagatataacttctagtggatgttcactggagatggttgctgcaatatacgatgagaggtctattaggtcacatctccgacgtgtgagggagctactatctctgtctagtctttatgtttccctatcaacatccttagctctgcatcaggagtctgctcaaggaaaatctgcaggtcctgaaaaaggccctattcaggagcttgatggtttaaatttcatggaggatagtgctggcgctctcactaatttattggcttctgcaccagcagagataaaatgtgttggaagcattgttttttcgtctttcaatcctccgcctagttatcggaggttacatggagatctcatttatattgatgttacaacactagaaggaaataaatactgcattaccggaagctccaaatttttttatgttaacagtagcaaaggaagtatatttgactcgaaacctacaaaacaaggactggaggccagcactctcataggcctactacagaagatcagtaccaaatttaagaaaggttttcgtgaactcttggatcgcagggcatcggctcatccatttgagaatgttcagtctttgcttccagtgacttcttggttaggagcttttcctgtgccagagcatagaagggatgaagccagggctgaggactcggttgtgttgtcgtatggcaccgaattaattggcatgcagagagactggaatgaagaattgcagtcctgccaggagtttcctcatggcaatcctcaagaaaggatattgcgtggcagagcacgctataaagtaacatgtgattttgtggatgctgcagtaaaaggtgcagttggtgtcattaatagatgcatacccccaataaatccaactgacccagaatgttttcatatgtatgttcacaacaatattttctttagttttgctgtcgacgccgactatgaatacatttcaaaggaccacaagccagattgccaaaatgggtccagcagaagcaccaaggtttcctccccagatgtgatcactaagccagaccatgatgaatctgctgaggtagttgactcaaaatccgaagaggcacaaatcacagatagtgagcaggcaacatatgcttctgccaacaatgacttaaaaggaactaaggcctatcaagaagctgatgtttctggcctttacaatcttgcgatggcaataattgattacagaggtcacagggttgtagctcagagtatcatacctggtattcttcaaggagacaagtctgattctcttctgtatggctctgttgataatggcaagaagatatcttggaacgaaacattccattcaaaggtagtcgaggctgcaaagcggctccatttgaaggagcatgtggttttggacggttctggcaatcctgtaaaattagctgctacagtcgaatgcaagggcattgttgggagtgatgacaggcattacattttggatctgatgagagtgactcctcgagattctaactacattggacaagggcaccgcttctgtgtgctgagacctgaacttatagcatcatttgttgaggctgaatccatgaaacaatcgttgaagcagaaggttccagatgctccagttgcaagtacttctgatgctaaggctacctctgttgaagcagatgacaagtctgaagaaagctctgttcatacacacaaggaaaatgacaactcaagctccgagattcttttcaatccaaatgtgtttacggagtacaagcttgatggcagtccagaggaaatcgctgccgacgaagagttggtaaaaagggctggtacatatcttatagacatagtgatcccaaaaattgttcaggatctatgctcccttgatatctcccctatggatggacagactttaaccgatgcattgcatctccatgggataaatattaggtatctgggcaagattgcaggcatggtcaaacatttaccacacttacaggacttgttttctgctgaaataatagttagatctgcaaagcatgttatcaaggatatactgaggcaaagtttggatcatgatattgggccagctattgctcatttcttgaactgtttcatggggaaagttttaggtgcttctacagagggtagtctaagtgacatgcagtcaaagactctgaagggccatgaaaatagccaaactcaaaagtctactaaaggccataaactgagcaatgctgctgcttcaagaaaaagcttgtcagcttattctcatctaacctctgatggaatttggtttagcattaaggaatttgcaaaatcaaaatatcagtttgaagtgccagatgatgcaaggctttcagccaaaagggtagctgttctccgaaatctttgccaaaaggtaggaataacaattgctgcacgtaaatatgatcttgatgcttcaactccatttgaagcctcagatattttaaatctccaaccagtcgtcaagcattctgttccaacctgtacggaagcaaaaaatcttatggaagcagggaaagtcaggatggctgagggaacattgaatgaggcatatgcattgttttctgaagccttttcactgcttcaacagataactggtcccatgcacaaggatgctgcaaattgttgccggtaccttgctatggttttgtaccatgctggtgatacagctggggcagttgtgcagcaacatagggaactcatcataaacgagagatgtcttggtcttgatcatccagacacagcccacagttatggtaacatggccttattctatcatgggctcaatcaaactgagctggcactgcggcacatgtctcgcacactgctgctgctaagtttggcgtcaggacctgatcacccggatgttgcagcaactcttataaatgttgcaatgatgtaccaggatgccagtaatatgaataccgctctcaggtatcttcaagaagcccttatgaagaatgagcgacttcttgggcctgtccatgttcaaacagctgtgtgctatcatgctctagccattgcatttagttgtatgagcttatataagctttcaattcagcatgaaaagaagacatatgatatactggtaaaacaattaggggaaaatgactcacggactgaagactcaaaaaattggttgaatacatttaagcttcgagaagagcaggtcaacgcccagaagcagaagggccaggaagctaatgcatccgataacgctgttaaattcttgaaggcaaaccctgcagttttacaagcaatgaaggctgctgcgatccaatcaggtggtgtgtcagcaaatgtcaacaggtcgctcaatgctgcagtcgttggagaaggtgtaccacgactgagaggagtggatgagcgagctgctcgagcgactgcagaagcacggaagaaagctgctgcaagaggccttaatgtccgtaatggccctgtggcaaaccatgcgtctgatgaactagctcagattctcaaactcatcaacgctgtttcggggtcttccactcctggctctgcaaagactgaggtatctgcctctgaagggcaggcaacgaatggatgtattcaaaatggaactgacactgaaccgaaggctgcggataccaacgggctatctgcatcggttaagtccactgtcaacgcaccatttggactggggacaacattggagtcgaagaagcagaaatcgaagcaaaagtcgtagaaaacctgtgcttggaatttcctttagcaacagttttggactgtagagtgatttgggtttttgacctttataggattgccacgttcacgtggtggaagagttcatttgtttttgttggaggttttttaggaggtctcaataatcattacaagaaagaagacaattgtttcgaatcatcattgatagaccactgatgagatattggctaatccttaagttaataaatcttcagtcgatacaatacctgtttaaagcatccttgtgatggctgctattgtttgtcgtacggcatatgctggtataccgttaatgtagttcttgatcatcgtatctttttctagaaggtatacccgtacaatgttgccaactattttattattgctatcgataattattgaactaggctgagcgctgttgcttggcctggccgtga

SEQ ID NO: 221375 - DNA, 4771 bp, Zea Mays
cttttagacatgaccaatgccctatgcacaatatgctgccacagtctaagctggtgcatgcgcagcgatggccgacggaaagaaaaataaggaaaagaagcaaaccaacgcgagcgtgtgacccagactggcagactcccagtcgcagaggccgcacgagagattaggatggtctgcccatccgtataaaaggcgcggccggcgattgcagccccctccgtcctcgttctcgtcttcgcgccgcctctcatcttccgtgagccgaagcttcggcggcggcggaatatggcggggaaaaccaagggtgggaagaacaaaggaaaggcgcagggcgctggtcagtccgcctctgctgagccagaggtgccggcgactgacggagccgaagtggtgaatccagagaatggggaagtaaacgaaccccccgtcacggaggatggtgtgaaaaatgttgagaaaggagacggggatgccctggaggttgtgcagcctgcaagaaagccagctgaaggagagcttcatctatacgctgttcctgtcaggacacaatcaggtgaaaagcttgagctgcagctaagcccaggagattctgttattgatgttaaacaattccttttggatgctcctgaaacatgcttctatacatgctacaatttgatattgcatactgaagatgggtcagctcatcagttggaagactacaatgaaatatctgaaatagcagatataacttctagtggatgttcactggagatggttgctgcaatatacgatgagaggtctattaggtcacatctccgacgtgtgagggagctactatctctgtctagtctttatgtttccctatcaacatccttagctctgcatcaggagtctgctcaaggaaaatctgcaggtcctgaaaaaggccctattcaggagcttgatggtttaaatttcatggaggatagtgctggcgctctcactaatttattggcttctgcaccagcagagataaaatgtgttggaagcattgttttttcgtctttcaatcctccgcctagttatcggagtagcaaaggaagtatatttgactcgaaacctacaaaacaaggactggaggccagcactctcataggcctactacagaagatcagtaccaaatttaagaaaggttttcgtgaactcttggatcgcagggcatcggctcatccatttgagaatgttcagtctttgcttccagtgacttcttggttaggagcttttcctgtgccagagcatagaagggatgaagccagggctgaggactcggttgtgttgtcgtatggcaccgaattaattggcatgcagagagactggaatgaagaattgcagtcctgccaggagtttcctcatggcaatcctcaagaaaggatattgcgtggcagagcacgctataaagtaacatgtgattttgtggatgctgcagtaaaaggtgcagttggtgtcattaatagatgcatacccccaataaatccaactgacccagaatgttttcatatgtatgttcacaacaatattttctttagttttgctgtcgacgccgactatgaatacatttcaaaggaccacaagccagattgccaaaatgggtccagcagaagcaccaaggtttcctccccagatgtgatcactaagccagaccatgatgaatctgctgaggtagttgactcaaaatccgaagaggcacaaatcacagatagtgagcaggcaacatatgcttctgccaacaatgacttaaaaggaactaaggcctatcaagaagctgatgtttctggcctttacaatcttgcgatggcaataattgattacagaggtcacagggttgtagctcagagtatcatacctggtattcttcaaggagacaagtctgattctcttctgtatggctctgttgataatggcaagaagatatcttggaacgaaacattccattcaaaggtagtcgaggctgcaaagcggctccatttgaaggagcatgtggttttggacggttctggcaatcctgtaaaattagctgctacagtcgaatgcaagggcattgttgggagtgatgacaggcattacattttggatctgatgagagtgactcctcgagattctaactacattggacaagggcaccgcttctgtgtgctgagacctgaacttatagcatcatttgttgaggctgaatccatgaaacaatcgttgaagcagaaggttccagatgctccagttgcaagtacttctgatgctaaggctacctctgttgaagcagatgacaagtctgaagaaagctctgttcatacacacaaggaaaatgacaactcaagctccgagattcttttcaatccaaatgtgtttacggagtacaagcttgatggcagtccagaggaaatcgctgccgacgaagagttggtaaaaagggctggtacatatcttatagacatagtgatcccaaaaattgttcaggatctatgctcccttgatatctcccctatggatggacagactttaaccgatgcattgcatctccatgggataaatattaggtatctgggcaagattgcaggcatggtcaaacatttaccacacttacaggacttgttttctgctgaaataatagttagatctgcaaagcatgttatcaaggatatactgaggcaaagtttggatcatgatattgggccagctattgctcatttcttgaactgtttcatggggaaagttttaggtgcttctacagagggtagtctaagtgacatgcagtcaaagactctgaagggccatgaaaatagccaaactcaaaagtctactaaaggccataaactgagcaatgctgctgcttcaagaaaaagcttgtcagcttattctcatctaacctctgatggaatttggtttagcattaaggaatttgcaaaatcaaaatatcagtttgaagtgccagatgatgcaaggctttcagccaaaagggtagctgttctccgaaatctttgccaaaaggtaggaataacaattgctgcacgtaaatatgatcttgatgcttcaactccatttgaagcctcagatattttaaatctccaaccagtcgtcaagcattctgttccaacctgtacggaagcaaaaaatcttatggaagcagggaaagtcaggatggctgagggaacattgaatgaggcatatgcattgttttctgaagccttttcactgcttcaacagataactggtcccatgcacaaggatgctgcaaattgttgccggtaccttgctatggttttgtaccatgctggtgatacagctggggcagttgtgcagcaacatagggaactcatcataaacgagagatgtcttggtcttgatcatccagacacagcccacagttatggtaacatggccttattctatcatgggctcaatcaaactgagctggcactgcggcacatgtctcgcacactgctgctgctaagtttggcgtcaggacctgatcacccggatgttgcagcaactcttataaatgttgcaatgatgtaccaggatgccagtaatatgaataccgctctcaggtatcttcaagaagcccttatgaagaatgagcgacttcttgggcctgtccatgttcaaacagctgtgtgctatcatgctctagccattgcatttagttgtatgagcttatataagctttcaattcagcatgaaaagaagacatatgatatactggtaaaacaattaggggaaaatgactcacggactgaagactcaaaaaattggttgaatacatttaagcttcgagaagagcaggtcaacgcccagaagcagaagggccaggaagctaatgcatccgataacgctgttaaattcttgaaggcaaaccctgcagttttacaagcaatgaaggctgctgcgatccaatcaggtggtgtgtcagcaaatgtcaacaggtcgctcaatgctgcagtcgttggagaaggtgtaccacgactgagaggagtggatgagcgagctgctcgagcgactgcagaagcacggaagaaagctgctgcaagaggccttaatgtccgtaatggccctgtggcaaaccatgcgtctgatgaactagctcagattctcaaactcatcaacgctgtttcggggtcttccactcctggctctgcaaagactgaggtatctgcctctgaagggcaggcaacgaatggatgtattcaaaatggaactgacactgaaccgaaggctgcggataccaacgggctatctgcatcggttaagtccactgtcaacgcaccatttggactggggacaacattggagtcgaagaagcagaaatcgaagcaaaagtcgtagaaaacctgtgcttggaatttcctttagcaacagttttggactgtagagtgatttgggtttttgacctttataggattgccacgttcacgtggtggaagagttcatttgtttttgttggaggttttttaggaggtctcaataatcattacaagaaagaagacaattgtttcgaatcatcattgatagaccactgatgagatattggctaatccttaagttaataaatcttcagtcgatacaatacctgtttaaagcatccttgtgatggctgctattgtttgtcgtacggcatatgctggtataccgttaatgtagttcttgatcatcgtatctttttctagaaggtatacccgtacaatgttgccaactattttattattgctatcgataattattgaactaggctgagcgctgttgcttggcctggccgtga

SEQ ID NO: 221376 - DNA, 2271 bp, Zea Mays
atggaacaaccacaatgcaatgcgcctttgcaggcagtggggcaagaaaagccgagggagaggaggaagcgacgctaccggcgatgcgtggctgaacaattgagggagagttttgctgtcgacgccgactatgaatacatttcaaaggaccacaagccagattgccaaaatgggtccagcagaagcaccaaggtttcctccccagatgtgatcactaagccagaccatgatgaatctgctgaggtagttgactcaaaatccgaagaggcacaaatcacagatagtgagcaggcaacatatgcttctgccaacaatgacttaaaaggaactaaggcctatcaagaagctgatgtttctggcctttacaatcttgcgatggcaataattgattacagaggtcacagggttgtagctcagcatctttttgtatattattatgccaaactgtcacaaatgagtatcatacctggtattcttcaaggagacaagtctgattctcttctgtatggctctgttgataatggcaagaagatatcttggaacgaaacattccattcaaaggtagtcgaggctgcaaagcggctccatttgaaggagcatgtggttttggacggttctggcaatcctgtaaaattagctgctacagtcgaatgcaagggcattgttgggagtgatgacaggcattacattttggatctgatgagagtgactcctcgagattctaactacattggacaagggcaccgcttctgtgtgctgagacctgaacttatagcatcatttgttgaggctgaatccatgaaacaatcgttgaagcagaaggttccagatgctccagttgcaagtacttctgatgctaaggctacctctgttgaagcagatgacaagtctgaagaaagctctgttcatacacacaaggaaaatgacaactcaagctccgagattcttttcaatccaaatgtgtttacggagtacaagcttgatggcagtccagaggaaatcgctgccgacgaagagttggtaaaaagggctggtacatatcttatagacatagtgatcccaaaaattgttcaggatctatgctcccttgatatctcccctatggatggacagactttaaccgatgcattgcatctccatgggataaatattaggtatctgggcaagattgcaggcatggtcaaacatttaccacacttacaggacttgttttctgctgaaataatagttagatctgcaaagcatgttatcaaggatatactgaggcaaagtttggatcatgatattgggccagctattgctcatttcttgaactgtttcatggggaaagttttaggtgcttctacagagggtagtctaagtgacatgcagtcaaagactctgaagggccatgaaaatagccaaactcaaaagtctactaaaggccataaactgagcaatgctgctgcttcaagaaaaagcttgtcagcttattctcatctaacctctgatggaatttggtttagcattaaggaatttgcaaaatcaaaatatcagtttgaagtgccagatgatgcaaggctttcagccaaaagggtagctgttctccgaaatctttgccaaaaggtaggaataacaattgctgcacgtaaatatgatcttgatgcttcaactccatttgaagcctcagatattttaaatctccaaccagtcgtcaagcattctgttccaacctgtacggaagcaaaaaatcttatggaagcagggaaagtcaggatggctgagggaacattgaatgaggcatatgcattgttttctgaagccttttcactgcttcaacagataactggtcccatgcacaaggatgctgcaaattgttgccggtaccttgctatggttttgtaccatgctggtgatacagctggggcagttgtgcagcaacatagggaactcatcataaacgagagatgtcttggtcttgatcatccagacacagcccacaggcatgatgccagtaatatgaataccgctctcaggtatcttcaagaagcccttatgaagaatgagcgacttcttgggcctgtccatgttcaaacagctgtgtgctatcatgctctagccattgcatttagttgtatgagcttatataagctttcaattcagcatgaaaagaagacatatgatatactggtaaaacaattaggggaaaatgactcacggactgaagactcaaaaaattggttgaatacatttaagcttcgagaagagcagttattttatcgtcaatctgca

SEQ ID NO: 221377 - DNA, 1412 bp, Zea Mays
atggaacaaccacaatgcaatgcgcctttgcaggcagtggggcaagaaaagccgagggagaggaggaagcgacgctaccggcgatgcgtggctgaacaattgagggagagttttgctgtcgacgccgactatgaatacatttcaaaggaccacaagccagattgccaaaatgggtccagcagaagcaccaaggtttcctccccagatgtgatcactaagccagaccatgatgaatctgctgaggtagttgactcaaaatccgaagaggcacaaatcacagatagtgagcaggcaacatatgcttctgccaacaatgacttaaaaggaactaaggcctatcaagaagctgatgtttctggcctttacaatcttgcgatggcaataattgattacagaggtcacagggttgtagctcagcatctttttgtatattattatgccaaactgtcacaaatgagtatcatacctggtattcttcaaggagacaagtctgattctcttctgtatggctctgttgataatggcaagaagatatcttggaacgaaacattccattcaaaggtagtcgaggctgcaaagcggctccatttgaaggagcatgtggttttggacggttctggcaatcctgtaaaattagctgctacagtcgaatgcaagggcattgttgggagtgatgacaggcattacattttggatctgatgagagtgactcctcgagattctaactacattggacaagggcaccgcttctgtgtgctgagacctgaacttatagcatcatttgttgaggctgaatccatgaaacaatcgttgaagcagaaggttccagatgctccagttgcaagtacttctgatgctaaggctacctctgttgaagcagatgacaagtctgaagaaagctctgttcatacacacaaggaaaatgacaactcaagctccgagattcttttcaatccaaatgtgtttacggagtacaagcttgatggcagtccagaggaaatcgctgccgacgaagagttggtaaaaagggctggtacatatcttatagacatagtgatcccaaaaattgttcaggatctatgctcccttgatatctcccctatggatggacagactttaaccgatgcattgcatctccatgggataaatattaggtatctgggcaagattgcaggcatggtcaaacatttaccacacttacaggacttgttttctgctgaaataatagttagatctgcaaagcatgttatcaaggatatactgaggcaaagtttggatcatgatattgggccagctattgctcatttcttgaactgtttcatggggaaagttttaggtgcttctacagagggtagtctaagtgacatgcagtcaaagactctgaagtttcatttttttattttgatttttag

SEQ ID NO: 221378 - DNA, 1531 bp, Zea Mays
ctcactttcccaaggaagtcaccgaatccgcattcgataaacctgccgtgtcccgttcaccccgcgttcgcttcatccgggcgtgggctaccgccgcagccgccgccctacgtccggtgaccaggctttcattgagctttgccgacgacgaccacgcaccagatggctgggtatatgtcaagagggccccaaaatggttctgtgtatgtctgcaatctacctcctggaactgacgagaatatgttggctgaatattttggcaccatagggttgctaaaggtatgggtcttaccagaaggacaaaaggaatgggcgcccaaaaatttggatctatagggacaaagtttccaatgaaccaaagggtgatgctacagtcacttatgaggatccacatgctgcttcagctgctgtggaatggttcaataacaaggatttccacgggagcactattcaggttcacatagctgagtcaaaaagcaaagatgctttcgataaccccacaaatttgaacaccattgctggtgtcagtgaacaagatgaagtggataacggagcaggcagaggtagagggcgtggtgatggtcccggcaaggcttggcagcaagatggggactggatgtgtccaaatacaagttgtggcaatgtaaattttgccttccgtggtgtttgtaatcgctgtggagctgcacgccctgccggtgctggtggaactggtggtggaggtggcggtaggggtagaggccgtggtaactctgatgcaagaggaagcagtcgtgcgggtgctggtgctgctactggtggtggtccacctggattatttggcccaaatgattggccatgtccaatgtgcggcaacatcaactgggctaagcgtaccaaatgtaatatatgtaacacctccaagcctggtaccaatgaaggtggtgtgaggggtggccgtggtggtgggtacaaagagctcgatgaagaagaactagaggaagttaaaaaacgccggaaagaggctgaggaggatgatggagagatctatgatgaatttggcaacctgaaaaagaaatttcgctctaaagctctgcatactggaagtgcgcagacacttcctgggtctggacgtgctggatgggaagttgagcatcgtggttctagtgaaagggaaggcagggagaggagcagggatcgtggtagggacgactatgatgaaaaggaaaccaggagcatagatagaggtgatcatggaagggaccagcgccggagccaagaccgcgaaagggaaaaggggagggagagaagagaccatgagtatgagagaagtagggagcgtgaccggcgccacaggtggtatgaaaattttgcttggaccaggcttgcactccagccgtccgatttcctatgctgccatatccaggccagggcagcaaccaaacaggccttaaggaaataaggagttaggctttaggtcttacgttgcttcctctataatctatagcactatataattcattaatttaaacttttgtaaaactcaccaaac

SEQ ID NO: 221379 - DNA, 1591 bp, Zea Mays
atgatgtcgggtcgaggcagatcaggacacacgctaggagtcgcgggcgggggcgggatcagggtaggaagacgacgcgagcgggggcgggattacaggaaggaagatggcgtggcgcgaggctggagcgggggcacgatggctgggtatatgtcaagagggccccaaaatggttctgtgtatgtctgcaatctacctcctggaactgacgagaatatgttggctgaatattttggcaccatagggttgctaaagaaggacaaaaggaatgggcgcccaaaaatttggatctatagggacaaagtttccaatgaaccaaagggtgatgctacagtcacttatgaggatccacatgctgcttcagctgctgtggaatggttcaataacaaggatttccacgggagcactattcaggttcacatagctgagtcaaaaagcaaagatgctttcgataaccccacaaatttgaacaccattgctggtgtcagtgaacaagatgaagtggataacggagcaggcagaggtagagggcgtggtgatggtcccggcaaggcttggcagcaagatggggactggatgtgtccaaatacaagttgtggcaatgtaaattttgccttccgtggtgtttgtaatcgctgtggagctgcacgccctgccggtgctggtggaactggtggtggaggtggcggtaggggtagaggccgtggtaactctgatgcaagaggaagcagtcgtgcgggtgctggtgctgctactggtggtggtccacctggattatttggcccaaatgattggccatgtccaatgtgcggcaacatcaactgggctaagcgtaccaaatgtaatatatgtaacacctccaagcctggtaccaatgaaggtgaaactggctcaaaggaggtgcagtgccactttggcccattgccaattgttgtttgcattgccatttttcttcattttaggggtggccgtggtggtgggtacaaagagctcgatgaagaagaactagaggaagttaaaaaacgccggaaagaggctgaggaggatgatggagagatctatgatgaatttggcaacctgaaaaagaaatttcgctctaaagctctgcatactggaagtgcgcagacacttcctgggtctggacgtgctggatgggaagttgagcatcgtggttctagtgaaagggaaggcagggagaggagcagggatcgtggtagggacgactatgatgaaaaggaaaccaggagcatagatagaggtgatcatggaagggaccagcgccggagccaagaccgcgaaagggaaaaggggagggagagaagagaccatgagtatgagagaagtagggagcgtgaccggcgccacaggtgaagagagaaatgacagggctttctgttcttacatcgcatttgccactttttgtagccatggaacccgtggtcttgtgttagtatctgggggcgtgcattgattctcagaatctgatttttgctttgaatgtttcgctgcattggcactttattcagatatgccgttccttctgttactacttttatgtttgtgaaacacgtatgacactcgtggatccaat

SEQ ID NO: 221380 - DNA, 1615 bp, Zea Mays
ctcactttcccaaggaagtcaccgaatccgcattcgataaacctgccgtgtcccgttcaccccgcgttcgcttcatccgggcgtgggctaccgccgcagccgccgccctacgtccggtgaccaggctttcattgagctttgccgacgacgaccacgcaccagatggctgggtatatgtcaagagggccccaaaatggttctgtgtatgtctgcaatctacctcctggaactgacgagaatatgttggctgaatattttggcaccatagggttgctaaagaaggacaaaaggaatgggcgcccaaaaatttggatctatagggacaaagtttccaatgaaccaaagggtgatgctacagtcacttatgaggatccacatgctgcttcagctgctgtggaatggttcaataacaaggatttccacgggagcactattcaggttcacatagctgagtcaaaaagcaaagatgctttcgataaccccacaaatttgaacaccattgctggtgtcagtgaacaagatgaagtggataacggagcaggcagaggtagagggcgtggtgatggtcccggcaaggcttggcagcaagatggggactggatgtgtccaaatacaagttgtggcaatgtaaattttgccttccgtggtgtttgtaatcgctgtggagctgcacgccctgccggtgctggtggaactggtggtggaggtggcggtaggggtagaggccgtggtaactctgatgcaagaggaagcagtcgtgcgggtgctggtgctgctactggtggtggtccacctggattatttggcccaaatgattggccatgtccaatgtgcggcaacatcaactgggctaagcgtaccaaatgtaatatatgtaacacctccaagcctggtaccaatgaaggtgaaactggctcaaaggaggtgcagtgccactttggcccattgccaattgttgtttgcattgccatttttcttcattttaggggtggccgtggtggtgggtacaaagagctcgatgaagaagaactagaggaagttaaaaaacgccggaaagaggctgaggaggatgatggagagatctatgatgaatttggcaacctgaaaaagaaatttcgctctaaagctctgcatactggaagtgcgcagacacttcctgggtctggacgtgctggatgggaagttgagcatcgtggttctagtgaaagggaaggcagggagaggagcagggatcgtggtagggacgactatgatgaaaaggaaaccaggagcatagatagaggtgatcatggaagggaccagcgccggagccaagaccgcgaaagggaaaaggggagggagagaagagaccatgagtatgagagaagtagggagcgtgaccggcgccacaggtgaagagagaaatgacagggctttctgttcttacatcgcatttgccactttttgtagccatggaacccgtggtcttgtgttagtatctgggggcgtgcattgattctcagaatctgatttttgctttgaatgtttcgctgcattggcactttattcagatatgccgttccttctgttactacttttatgtttgtgaaacacgtatgacactcgtggatccaat

SEQ ID NO: 221381 - DNA, 902 bp, Zea Mays
actagcaatttctccgtgttgaattttcaattgagaccgagtctacggactacgtctaccccggttccagtttccgcgttcctcgaactcgaagaaatgtgagcctggctgtgatttttcctccctcgctagtcatcttcaagcatcaggaccgaagccacacgacaccagccgtcctcgcgatctctcctccgtctcccattccccaccgcgcccttctccccgcgcctcctcactggaatcggaagcgactcgcggggccggtgcgcaggctgctggcagcgccatccgcggtggccggctaccatggaggatctaggcatcgaggcgaaggaggctgcggttcgcgaggtggcgaagctgctcccgttcccggagctcctctcctctatcgcctctatcaaatacgactaccttacgcggcagcagataaatgatgcacaactcagtacaatggtggcagaccaggtggagcaggcccatgctggcatcaatgctctagcattatctcagataacaataaacaaactacgtgagaacttcattgatatagacaagttgtgtcaggagtgtcaaactttaattgagaaccatgacaagatcaagcttcttagcaatacaagaaacaatttgaacacaactctaaaggatgtgggaggtatgatgtccatttctgttgaggctgctgctgcacatgactcattaagcaatgaccaggagttaattcacacttacgagcgactaatagctcttgatggtaagaggcgttttgctctagctgctgctgcatctcataaggaagaagttggaagattaagagaatactttgaggatgttgatcaaacatgggaaacatttgagaaaacattatggggccatatcactaactttttcaaactttc

SEQ ID NO: 221382 - DNA, 703 bp, Zea Mays
gctacgatggccttggccatctggaggggtgcaacaagagtggactgggccacaacgtcagatggggggcagctgacggagcaacgaagtagcgagtccgacaagagtagaggtgaattcgacagtcggccaacgagggaaagatcgccggctcctgtggcctgcaaggggagcaccgctgctggccacgccggtgggagcgagtgtgcccatgtctatagaaggctaggcatctgcgcctgtggtggggcaagccttgtgcatgaggtcgcgccaacggtggagcaggcccatgctggcatcaatgctctagcattatctcagataacaataaacaaactacgtgagaacttcattgatatagacaagttgtgtcaggagtgtcaaactttaattgagaaccatgacaagatcaagcttcttagcaatacaagaaacaatttgaacacaactctaaaggatgtgggaggtatgatgtccatttctgttgaggctgctgctgcacatgactcattaagcaatgaccaggagttaattcacacttacgagctcttgatggtaagaggcgttttgctctagctgctgctgcatctcataaggaagaagttggaagattaagagaatactttgaggatgttgatcaaacatgggaaacatttgagaaaacattatggggccatatcactaactttttcaaactttc

SEQ ID NO: 221383 - DNA, 578 bp, Zea Mays
aaaatctttagctctaaagaagagaaaggaagggctctgaagttgaataatgaacacggtctagcccagcaatccctacagcggccaaatcattgcgtctctggggtgggcacaggatggagagtggagactctggggtgggcataggaaagagactccggcatcaagcaaacagttaattgatgagcagccgtactgatgcgcggtgagaaacgtgagcggcgcgccacatcggacaatggcagacatcaaatcaaggcacatacaacacatgctagacctttagttctaagggctagtgtgaaactccatttttttaatggatttccattttccaagtgaaaataaactaatttttcttggaaattgaaaatcctcggaagaatgaggtttctaaactagccctaagaattagatataaaagcagatacttattaagatattaattttttagtttttttattgcaaatctacttgttatttgtttctgctgcaggtccatctattgtgatcttgtcatgttcttgtatcttcgcaatggacaaaagggggttggacagtagtacctaggattatgt

SEQ ID NO: 221384 - DNA, 841 bp, Zea Mays
gagcgtggtccttaaaaatgaccaaatagatgcctccaacccattccaaatcctgtcgtcggcgggagacctatacacccactatgactgccggtctcctaaatctcggtgcaacccctcggcgtcaagcagaaggtgccgcccatcactcccctctccccccttgcaacagcggcatactcccctctctcccttgcaacaacggcatcaaaggtttctgcaatagcgacatggacgaccagttcccgggtgaagctgttttcagcaacaatgacatcaaagtgattctatgatcaacactcgaagatcaatgccaccatctacacttaaccaaaataggatggttacaagttttaagtggtgaagctattgatactgccaaggctcttgctttgaaagaatagaaataacgtactgttgggggcctttgtcttcgaaggtcctcaaaaacacgactaacatgcttttcgagtataatatgttgtcataggaaccttcggtcttaagatgaagctatgcatggtatgaaaggcgtagtctgagagaaggatgaatcagtgtcgaagctactgatgaagaagcttcggctcagcgcaaaggcaacgatggagaatggaactgacctaaaagggaatataccactcagtcctcgacaaattactccttagtcagtagtaagtgttgaggacacaaatgtaattttacccaggctgcgtcctgtgcctataaatagatgaacagtaacacagtattgttcatgctaacttgtaatttctcgcacgtcacttttagacttttgccttctatcaagccgaaggtataagatgtatttcaatatttg

SEQ ID NO: 221385 - DNA, 1705 bp, Zea Mays
cgccgaggctgccctcgtcctcccccacacccactgcatcgcccgaatctgcgctcgcgatgtcttcacttcccctcgcgccgccgtttcctctgcatcactagccatgtcgccgacttgcctaggacggagcccgtccgaccaaccatgccaggcaccacgccgtcccctcagcgtcgtcctctccacggtgtggtcggccgtctcgaagccctcgcgtcccctagcccatgcacccgcctcggatgccccaactgcccaaacgccatgcccccgcctcaccgtcccctctgcgcagccgcgcagtcgaggtgcgaccgaccgtggaggagccctcgcgacccctagcccaaccagccatgggcccccatcgtttccccttccgcgcagccagggccccaaatttggcaatgcaccatcccccccaacaatcgtgctcgatctggcaattgcgtgcatgatatccgccgctgatttggaaagcgcacgatctacaacgatgatttggaaagtgccttgccaaacgattccaacacaaatcccccaaatcgtgcacccatcatcattaaaaaggtcgcaattgccagactgctacaaccatcctacagctacggaaatccttcgctcacactcctccaggtgaagacagttaccttccctttgcaatccaaccatatatagagatcaacgtcaaaaggaacctcaggctttgtaaacgactaacttaaatcggttcaggaagcatatttgagacgttgcggctcggcaaaccgcttatcgtcgtcataaacaaggatctgatggacaatcaccagagcgaactagcagaagaattggctgaaaggaagcacctcttctgtgcacgcccacaaacactgggagagaccatccgagcgatggacctggagacgctggttccttacgagccaggggatgccaagccagtcgtcgccctgatcaacaggtttcttggcttcccagttggttgacaaacaaaccatgagatacctccattaaggcgtcagttcctgtacctgtttgatgtaaaatgaattaactggcatggaaacaacaagactgtccttgattgttgcagttgggtttaattaggggggcgtccattcgttgttcttgtcatgcccgcccttgacacgagaagacaatagtattaaacttgtcaatttctggaatgatgtgtggttggatggcatcgctgaagccaataatactttaagatcgtgagaggcccgaagaagacggaagtcacgtcaccctttttcatagttcaatagtcagggcagtcaataataccagggcttgattcaagaaggtgcaaagctgctggtcagggcagcgagcgttaagttggatgctcgtgttgtcgatcaagtggaagaggagaacgatgatacagagaactaaaagtttggtatagtgatcagctttctggtggaagcccgacgaggattgtctacttctagatcttggtcgtatagctttgttctacttctcttgtgttgctcttgttcgagtataaggtctacaatgacataatgcttgtaccatcttttttgtggtaacttattttttctcatgcagtgcatgtgacttgaaactttgttaggacatagtttgtgaaagggaaaatggacccaacatttcctatagtcgattttggtatctgacgttcatcacaaacgattat

SEQ ID NO: 221386 - DNA, 1774 bp, Zea Mays
gcactccgctacacgcccgccgcagcccgacgccccgtgctcgacgactccccctccatcctctcgccgaggctgccctcgtcctcccccacacccactgcatcgcccgaatctgcgctcgcgatgtcttcacttcccctcgcgccgccgtttcctctgcatcactagccatgtcgccgacttgcctaggacggagcccgtccgaccaaccatgccaggcaccacgccgtcccctcagcgtcgtcctctccacggtgtggtcggccgtctcgaagccctcgcgtcccctagcccatgcacccgcctcggatgccccaactgcccaaacgccatgcccccgcctcaccgtcccctctgcgcagccgcgcagtcgaggtgcgaccgaccgtggaggagccctcgcgacccctagcccaaccagccatgggcccccatcgtttccccttccgcgcagccagggccccaaatttggcaatgcaccatcccccccaacaatcgtgctcgatctggcaattgcgtgcatgatatccgccgctgatttggaaagcgcacgatctacaacgatgatttggaaagtgccttgccaaacgattccaacacaaatcccccaaatcgtgcacccatcatcattaaaaaggtcgcaattgccagactgctacaaccatcctacagctacggaaatccttcgctcacactcctccaggtgaagacagttaccttccctttgcaatccaaccatatatagagatcaacgtcaaaaggaacctcaggctttgtaaacgactaacttaaatcggcgaggttcaggaagcatatttgagacgttgcggctcggcaaaccgcttatcgtcgtcataaacaaggatctgatggacaatcaccagagcgaactagcagaagaattggctgaaaggaagcacctcttctgtgcacgcccacaaacactgggagagaccatccgagcgatggacctggagacgctggttccttacgagccaggggatgccaagccagtcgtcgccctgatcaacaggtttcttggcttcccagttggttgacaaacaaaccatgagatacctccattaaggcgtcagttcctgtacctgtttgatgtaaaatgaattaactggcatggaaacaacaagactgtccttgattgttgcagttgggtttaattaggggggcgtccattcgttgttcttgtcatgcccgcccttgacacgagaagacaatagtattaaacttgtcaatttctggaatgatgtgtggttggatggcatcgctgaagccaataatactttaagatcgtgagaggcccgaagaagacggaagtcacgtcaccctttttcatagttcaatagtcagggcagtcaataataccagggcttgattcaagaaggtgcaaagctgctggtcagggcagcgagcgttaagttggatgctcgtgttgtcgatcaagtggaagaggagaacgatgatacagagaactaaaagtttggtatagtgatcagctttctggtggaagcccgacgaggattgtctacttctagatcttggtcgtatagctttgttctacttctcttgtgttgctcttgttcgagtataaggtctacaatgacataatgcttgtaccatcttttttgtggtaacttattttttctcatgcagtgcatgtgacttgaaactttgttaggacatagtttgtgaaagggaaaatggacccaacatttcctatagtcgattttggtatctgacgttcatcacaaacgattat

SEQ ID NO: 221387 - DNA, 983 bp, Zea Mays
cgacaaagtcagcctcggctacggcggcaacaagaagctcgacggccgccactaccaggtccagcttaattatgcagatgaccatgatggttccaccttcgttcccgcaagaacactctctgaacaaggccggagcacaggctgcttcgctggttggctggttctggttgtgaagcacagagacgcggtatacggaccggagttcgtcaaggatgacgggaggaacgagctcagcggtttcagccttgctcatatgaaggatgtcgacgatactgaacttgactgaaacgatgaagattcggatggtgattcagacgaccgacgagtatgcggtcaaggaggaaggagaggaggagaagtagaactgcttggccaggtttctgcagtttcatttgtgttggcagatgcattttctggggtctcatcgagtatgtggattttttttattattataatatagtagtagcataggatgagagtctcatagcctatcatcaacttgattctaacacacttttgcagtgtcgagcatatgcttgtcattagatgtttcaggcgtgctctgcttctttcaatcatggtatataacgttcatggtagtgtgtttatgggttaccaaggttaggtcacaatttctaaggggctgatttggtgaacagagaattggagaagatccatgagaaggaatcctcttggtattcaattttaaataacaagaggatccctttccataaatctcatctaattctctggtcaccaaatcagtcccaagaacttatttggatcagccgagtctcgacgagtccacagacccactttgttatatttttctcgttgagctgtagatgggtaggtactgccaggttctacagcaatttgaatgtttgatctattcacgtaacaacacaggtgtatcatttatttaccacatggatgtaaagttttgtatacatgtcatcgcatttgttcgttgtatatctcta

SEQ ID NO: 221388 - DNA, 846 bp, Zea Mays
tttcgcagggtacaaacatagctttgcgtcaatcggtgctaggcgaatgcagaacgcttggtagccggtcagcgctatgtgtagaacacatactccagagatgaaattggatcacgagcactggaataattgttgtcagccatggacccatggcagcggcggtttcgcgcacctcaaagacatgggtggggaggcatcgcggctgctgcacgccctctggagaatgcttatcgatcatcaggttcctggaagtaccatgagagactcttttttggtgaatggtgttgcattcaagaagacgttttcatatgcaggatttgagcaacaaccaaagaagtgtggatggcttcagtttgcgctttgcctatatgaacataagccacttctacccgaacctgaaaacaatccaagctactcttgtcagtgcagccaagcaaagcaatggtgcctttaaattttcatgcagcttccagtttttgtttgggttctgtagggaccgagattctggatacctcactcccttgattcagaatgactccactgagtcattgctccgttggcaatgtcagcctgtttcacatcggaactacaggaccacccgagaaatccagataagaaggttccagggctcggcgaggtattcgagagtagcatcgccgtcgcctcggagactgctgcagccgcaaacaacattccacctgatcagtatctacaccgatggaggagactgatccgtgtgacgcgcgccaagctaaggaagcgcacggccaccgaagttcctgttgggaattagctgcaggccattgtttttcctttccctgcacattgtgttgatctttttatttt

SEQ ID NO: 221389 - DNA, 1211 bp, Zea Mays
atggctgcattgaagatcgaggtggcaggctatgatatcgatgataaaaacctcaaaagcaccgccaggaagaaggtgctggccgggagcgagccgtctgccgtagatgccaccgttgtagtggtgaacttgaggctcacgtggtacaggttcacccctaccgtaatcctgaaaggcaatttccacagtagatctgtatcgtctccccacgctggcgttgcccactcaagtccggcgggggcgggggcggggtctgagtcgtgggcggcctcggcggacgaggccggagtgtcggcgaccgtggcagacggggccagggcgggggcgtccgcggcggacggggccagggacggaggcgggagcgggcaggggcgtccgcggcggacggggccagggacgggggcgggcacgggcatgcgcggcaggggcgaccggtttcgtggacggcgggggcggctagtggcgggcggctccaatggaagagacagatgcgagagagacgggttgagaaagaataatgaacttgaagaccagcttcgtaagtccgcacaatccaaagtcccatcagatcccaacatatggcttcagatgcgtgacaactttgagaagataattctcatagatcacgacctctctgaacagagagatgtagagtatctcctatggcagttgcattacaaaagaattgaggacttcaggaggaacattagtgcagctagctcacttgcatctcagagtgggaagagcaacactaacccagatcgagtcaagagaattaaatcagccttcaaaagcttcctttcagaagcaactggcttctatcatgacttgatgttaaagatcaaatcaaattggggccttccactcaattactttccagacagccttgacaatgcaaacaactctgtgcgagatgacatgaaaacagttcaattgaagaaagatcttgctcgttacaagagtttgaatggtgatggtgattctgctagtcgtgaatacacagcggcttctagttactacaaggaggcagcttctatctatccttccagtggcaaccctcatcatcagcttgctatactagcttcttactccggcaacgaggtggtggctgtttataggtacttccgaagcttagctgcagacactccttttgccactgcacgggacaacttgattattctttttgaaaagacttgcgctattaagcttct

SEQ ID NO: 221390 - DNA, 3377 bp, Zea Mays
cagcaccagcaggcagaggctccggcccggctccaaatcctcctcgtgcttgccgatgtccgggcgttagaggaaagcggcaccggtgctccggccatatggcctctcgccccctcctcctccgcccatgaccgaccccacccggcccggccctattcttctactactccctactccacggctacgcccacgcacatgcctcccacaccctcatcacttgcattgagcaccacgtcgtcgagctatctgagcacaagtgctactaagctagtagccaccacctgctataggagtataggctataggcctatagctaccagagccgccagctgccagagctgtagctcagctagctagtaggagagtagggggtcgtcgtctgggtgttgctggccgctcgatcgagtactcagttgttggctgctgtgccattgcgacggcggccggcgggccggggagcgagcgcgagtcggaggcagatggtgacggccaaggaggccgcggcggcggcggcggccatggacgccagcaagtacgtgcggtacacgccggagcaggtggaggcgctggagcggctctactacgagtgccccaagccgagctcgctgcgccgccagcagctggtccgcgactgccccgtcctcgccagcgtcgaccccaagcagatcaaggtctggttccagaaccgcaggtgccgggagaagcagcggaaggagtcgtcccggctgcaggcggtaaaccggaagctgacggccatgaacaagctgctcatggaggagaacgaccgcctgcagaagcaggtctcgcagctcgtctacgagaacggctactaccgccagcagacgcagagcgtacgcgcggggctggcgaccacggacacgagctgcgagtcggtcgtcaccagcggcccccagaacgtggccgcggtgctgccacaagcccagccgcgcgacgcgggccctgccgggctcatgtccatagcggaggagacactgacggagtttctgtccaaggccaccggcaccgccgtcgagtgggtccagatgcccgggatgaagcctggtccggattctattggaatcattgccatctcgcatggctgccccggtgtcgccgcgcgagcttgcggcctcgtgggcatggagcctgcgaaagtcgctgaggtcctcaaggaccgcccgctgtggctgcgagactgccgatccatggaagtggtgaacgttctccctgccggtaccagtggcacagtcgagcttctctacatgcagctctacgcccccacgacgctcgcgccagctcgcgacttctggctgctgcggtacacctccattctcgacgacggaagcttagtggtatgcgagagatcactcggcgccaaccagggcggcccaagcatgcctctcgtccagccttttgtcaggggcgagatgcttcccagtgggttcttggtccggcctagcgacggcggaggcagcgtcatacacatcgttgatcacatggacctggagccttggagcgtgcccgaagtcgttcgcccactgtacgagtcgtctgcgatggttgctcagaagatgtcaatggcggccttgcgctatctcaggcaggttgctcacgaagataccgcccattctgtggtaaccggcgggtggggacggcagcctgcttctctacgggctctgagccagaagctcaccagagggttcaatgaagctctcaatgggctcgctgacgacgggtggtctgtggtcggaagtgacggggtggacgatgtctgcgtctctgtcagttcatccccgagtagagtggtcagctgcaatgcaactttcagtaacggacctgtagtcggcactggcagcagcagtgtgctctgcgcaaaggcatcgatgctgctgcaggacgtttctccgccagagctcctgcgcttcatgcgggagcagcggtcgcagtgggccgacagcaatctagacgcgttcttcgcttctgcgatgaaaccggatttctgcagcttgcctattcctcctcgccttggagggtttggtggccaggtcatacttcctctagcccacacgtttgaccctgaagaattcctcgaggttataaaagtaggaaatgccggtaactaccaagacgcgctcctgcaccgtgatctgtttctgttgcagatgtacaacggggtagacgagaacatggcaggcacttgttcagagctcatctttgcccctatagacgcatcgttcagcgacgactcgccactgctcccatccggctttcgtatcatcccgatcgacgctcctcttgacacgtccagccccaagtgcacgctggaccttgcctccaccctcgaagccggaactcccagaagcaggacaagcgggagcggcggccctggaactgccgccgccgcttgtgccggctccaaggccgtgatgacgatcgtgttccagtttgccttcgagagccatctgcaggacagcgtcgcagccatggcgaggcagtacgtgcggagcatcgtcgcgtcggtccagaggatcgcgctggcgctctcctccgcgcgcctggtcgtccctcatggcagcggtgtcagccacggtgctcctgctgctggtccggaggcagccacgcttgcaagatggatctgccagagttacaggttccatttcggggctgagcttatcaaatccgcagacggtagcggctgtggtgaagcagtgctgaaaactctctggcaccatgccggcgctatactctgctgctctctcaaggccttgccagtgttcacgttcgcgaaccagtccgggctcgacatgctggagacgacgctggtggcgctgcaggacatcgcgctggagagagtgttcgacgaccaagggaggaagaacctgtgcgcggagctccccggcgtcatggagcaggggttcgcgtgcgtccccggcgggatgtgcgtgtcgggcctaggccggccggtgtcgtacgagaaggcgctggcgtggaaggtgctcgacgacggcagcggcggcgtgcactgcgtctgcttcatgttcgtcaactggtcgtttgtgtgacgcgtctgctaccaggtccgtcgcgctcaggggaaaatcagttgatcggtgacgtgcttgagggtacgtacgtctcaaatcgccctttggttattgggatgtaaaatggtttcggttttttttttgttttttttttgaagaaaaatgtgaaatggtagaaggaaggacctgaatagcagtattgtacacggatggatcgtgtgatgtcaaacaagaatgactttttgtttgatggtgaagctagcatggcccctcctttatggttttgattattataaatggattgcataattataataagattaacatgtgtca

SEQ ID NO: 221391 - DNA, 1973 bp, Zea Mays
ctgtcgcacacgccctcctgcccctctgctcccctcccagatcccgtgatccgctgccgtgatccgatgccgcacccgccatcaacgccctcctccccctctgctcccctcccagatctcgtgatccgctgcgaggccgccatcaacgccctcctccccctccgctcagctcccctcccaggatctcggcgcgctttcatcgccgccttgatggtccacggctgcacccacatacgacatcgcctgtccgcacgcaagcttctgcctgcgcccacctgtgtgcatagatgtgtgcccccgcccacctcttctgcgcccaatctttacccgtcgtccgcgccgctgttccatcctcgcacccacgcccgagatccacatgtgccgcaccccagccgtgctccggatgctgcaccgcccttccatcctccgcatgcagcaccatgttggccgccgccctgaaacctcgctaccacggagctgcaagcccccgcttccaaaccagcaccatgcagacttccaatttgttttttgtttggagcactgttgattttttctcgtttttttgagaacattacattgcccgtctttcactgttcaacttttcttaattaaccatttacatttaccaaaaacttattcaacttttcactgttcaagttcaatttgttttgtgcagtattgatctgttgtgcagtgtatactttgaggttcggttggccgatcttgcgatcgaataccaaaaacttgtgcggtactctgttgctgaataaaacttggatcaggttaccccaaccccaatggcatttaccgagccgatggaggcgaacctgctacgccaagtgctggactatccccccagtgctctgtccatgtccatccctccttcagcttcattgatggttgcactgctctactatactataagtgaattgagttaaagcattttttgttcgactactgtttggtgcatgcaacttaatatggctgatttttagtctttctattttagtttataaattgtcaatcacagggattaaaagagactaaaagtaaggtttcaggttctatttctatccatctttaattaagggctgaaacgatactgtcttgattcctaattcacctaatattcctagaccaagaacgactcgggttaatggtcagggatgccaaattgtttcagtaaaactaagcaagctcgtatgatgattatgtacctacttgagaacaaattgtctaaaacatatctgctactacacttcagtaaaacaattgatcacacacaagaagttcagatcagaaagcaggctgtcgctactcccgtcaggttctcggatggttcccgtcaagggctgaccatggagaagagcacagtggtggtcagtgtccctgttgttgtcatggccgagactgctgagaccgactacagctcgagcttctcgcacctttgcaggatgcagagtcccagaaagatgttgggaagggtgataaatcaagggataagggaactgctgagaagtttgcaatatatcagaagcatcgttcttcgttggcagacactgttcaattcaggaggccagctgctccaacttccagtgtgaatgctgatattgtgggaacatccactctgcagtctgcatctctaccgaaacaagaaccctcaacagctacatccaagagctatactttcagagaaggtgatagggtgcgttatatgggtccagctcagttatcctcattgtcacaaaggctcctctccttttgctggcttcgctgttggaagcgagacatcatgtggtgtggataacgtccttgcagagcacgtgaactcaaatttcactctaatgccagctagctgctacatagtgcacttctgtatattatgagaagagagtggctcttcactcccatcggattgacaaaaaggtagaaatgttcagacctacgtgttctctttaaataaggaaaaaaag

SEQ ID NO: 221392 - DNA, 2468 bp, Zea Mays
gtcgcacacgccctcctgcccctctgctcccctcccagatcccgtgatccgctgccgtgatccgatgccgcacccgccatcaacgccctcctccccctctgctcccctcccagatctcgtgatccgctgcgaggccgccatcaacgccctcctccccctccgctcagctcccctcccaggatctcggcgcgctttcatcgccgccttgatggtccacggctgcacccacatacgacatcgcctgtccgcacgcaagcttctgcctgcgcccacctgtgtgcatagatgtgtgcccccgcccacctcttctgcgcccaatctttacccgtcgtccgcgccgctgttccatcctcgcacccacgcccgagatccacatgtgccgcaccccagccgtgctccggatgctgcaccgcccttccatcctccgcatgcagcaccatgttggccgccgccctgaaacctcgctaccacggagctgcaagcccccgcttccaaaccagcaccatgcagacttccaatttgttttttgtttggagcactgttgattttttctcgtttttttgagaacattacattgcccgtctttcactgttcaacttttcttaattaaccatttacatttaccaaaaacttattcaacttttcactgttcaagttcaatttgttttgtgcagtattgatctgttgtgcagtgtatactttgaggttcggttggccgatcttgcgatcgaataccaaaaacttgtgcggtactctgttgctgaataaaacttggatcaggttaccccaaccccaatggcatttaccgagccgatggaggcgaacctgctacgccaagtgctggactatccccccagtgctctgtccatgtccatccctccttcagcttcattgatggttgcactgctctactatactataagtgaattgagttaaagcattttttgttcgactactgtttggtgcatgcaacttaatatggctgatttttagtctttctattttagtttataaattgtcaatcacagggattaaaagagactaaaagtaaggtttcaggttctatttctatccatctttaattaagggctgaaacgatactgtcttgattcctaattcacctaatattcctagaccaagaacgactcgggttaatggtcagggatgccaaattgtttcagtaaaactaagcaagctcgtatgatgattatgtacctacttgagaacaaattgtctaaaacatatctgctactacacttcagtaaaacaattgatcacacacaagaagttcagatcagaaagcaggctgtcgctactcccgtcaggttctcggatggttcccgtcaagggctgaccatggagaagagcacagtggtggtcagtgtccctgttgttgtcatggccgagactgctgagaccgactacagctcgagcttctctattcatggttacgaaatgtattggggttctatatttttggtgctagacttcttgtcgtggattcacatttgctacctggggcacctttgcaggatgcagagtcccagaaagatgttgggaagggtgataaatcaagggataagggaactgctgagaagtttgcaatatatcagaagcatcgttcttcgttggcagacactgttcaattcaggaggccagctgctccaacttccagtgtgaatgctgatattgtgggaacatccactctgcagtctgcatctctaccgaaacaagaaccctcaacagctacatccaagagctatactttcagagaaggtgatagggtgcgttatatgggtccagctcagttatcctcattgtcacaaaggctcctctccttttgctggcttcgctgttggaagcgagacatcatgtggtgtggataacgtccttgcagagcacgtgaactcaaatttcactctaatgccagctagctgctacatagtgcacttctgtatattatgagaagagagtggctcttcactcccatcggattgacaaaaaacacagcagaactgcatgccagcagaggaatgcatatctagtggagataaactgtaatcggccgcctggatgacacgataggaccacgcgtaagaacaaactgggaccaaataataaaagacgaacggagaaaacgtgtcgttgcagatgcccaggttgtcgcactggctccgtcactgtctgatcgagtatctgcaaagtagggattaggtttgtcaccgttgactttacatgcgcctgcacattattctcaagtagtagtacttgtaatcacccctaggccctagtcaatgtgcacgagggaggccaacgtggcttcgcccttgctttaaaatctgactgttttttttcttcactttctcataagaacgtacttttcctgtatcagtcgcctagatagttattttaaacttttacaagaattacagcgggaggtggtgataacgattacagttaaaagagaa

SEQ ID NO: 221393 - DNA, 2079 bp, Zea Mays
ccagatcccgtgatccgctgccgtgatccgatgccgcacccgccatcaacgccctcctccccctctgctcccctcccagatctcgtgatccgctgcgaggccgccatcaacgccctcctccccctccgctcagctcccctcccaggatctcggcgcgctttcatcgccgccttgatggtccacggctgcacccacatacgacatcgcctgtccgcacgcaagcttctgcctgcgcccacctgtgtgcatagatgtgtgcccccgcccacctcttctgcgcccaatctttacccgtcgtccgcgccgctgttccatcctcgcacccacgcccgagatccacatgtgccgcaccccagccgtgctccggatgctgcaccgcccttccatcctccgcatgcagcaccatgttggccgccgccctgaaacctcgctaccacggagctgcaagcccccgcttccaaaccagcaccatgcagacttccaatttgttttttgtttggagcactgttgattttttctcgtttttttgagaacattacattgcccgtctttcactgttcaacttttcttaattaaccatttacatttaccaaaaacttattcaacttttcactgttcaagttcaatttgttttgtgcagtattgatctgttgtgcagtgtatactttgaggttcggttggccgatcttgcgatcgaataccaaaaacttgtgcggtactctgttgctgaataaaacttggatcaggttaccccaaccccaatggcatttaccgagccgatggaggcgaacctgctacgccaagtgctggactatccccccagtgctctgtccatgtccatccctccttcagcttcattgatggttgcactgctctactatactataagtgaattgagttaaagcattttttgttcgactactgtttggtgcatgcaacttaatatggctgatttttagtctttctattttagtttataaattgtcaatcacagggattaaaagagactaaaagtaaggtttcaggttctatttctatccatctttaattaagggctgaaacgatactgtcttgattcctaattcacctaatattcctagaccaagaacgactcgggttaatggtcagggatgccaaattgtttcagtaaaactaagcaagctcgtatgatgattatgtacctacttgagaacaaattgtctaaaacatatctgctactacacttcagtaaaacaattgatcacacacaagaagttcagatcagaaagcaggctgtcgctactcccgtcaggttctcggatggttcccgtcaagggctgaccatggagaagagcacagtggtggtcagtgtccctgttgttgtcatggccgagactgctgagaccgactacagctcgagcttctcgcacctttgcaggatgcagagtcccagaaagatgttgggaagggtgataaatcaagggataagggaactgctgagaagtttgcaatatatcagaagcatcgttcttcgttggcagacactgttcaattcaggaggccagctgctccaacttccagtgtgaatgctgatattgtgggaacatccactctgcagtctgcatctctaccgaaacaagaaccctcaacagctacatccaagagctatactttcagagaaggctcctctccttttgctggcttcgctgttggaagcgagacatcatgtggtgtggataacgtccttgcagagcacgtgaactcaaatttcactctaatgccagctagctgctacatagtgcacttctgtatattatgagtatgtatacagaattttaaagtatgaatacatgtgttttaaagcttggacaaccaatcatttattatccgagaatttaatttggttttattaataaatttaaacctttctataggaagagagtggctcttcactcccatcggattgacaaaaacacactcggacaaccagtgctggtattaatcgagatgtcgcatcaacaaacgctcatgcagagccagattctactcctacagtcctacgtctacacgagacgacacaagtgcatctataattgatct

SEQ ID NO: 221394 - DNA, 2053 bp, Zea Mays
ctcccagatcccgtgatccgctgccgtgatccgatgccgcacccgccatcaacgccctcctccccctctgctcccctcccagatctcgtgatccgctgcgaggccgccatcaacgccctcctccccctccgctcagctcccctcccaggatctcggcgcgctttcatcgccgccttgatggtccacggctgcacccacatacgacatcgcctgtccgcacgcaagcttctgcctgcgcccacctgtgtgcatagatgtgtgcccccgcccacctcttctgcgcccaatctttacccgtcgtccgcgccgctgttccatcctcgcacccacgcccgagatccacatgtgccgcaccccagccgtgctccggatgctgcaccgcccttccatcctccgcatgcagcaccatgttggccgccgccctgaaacctcgctaccacggagctgcaagcccccgcttccaaaccagcaccatgcagacttccaatttgttttttgtttggagcactgttgattttttctcgtttttttgagaacattacattgcccgtctttcactgttcaacttttcttaattaaccatttacatttaccaaaaacttattcaacttttcactgttcaagttcaatttgttttgtgcagtattgatctgttgtgcagtgtatactttgaggttcggttggccgatcttgcgatcgaataccaaaaacttgtgcggtactctgttgctgaataaaacttggatcaggttaccccaaccccaatggcatttaccgagccgatggaggcgaacctgctacgccaagtgctggactatccccccagtgctctgtccatgtccatccctccttcagcttcattgatggttgcactgctctactatactataagtgaattgagttaaagcattttttgttcgactactgtttggtgcatgcaacttaatatggctgatttttagtctttctattttagtttataaattgtcaatcacagggattaaaagagactaaaagtaaggtttcaggttctatttctatccatctttaattaagggctgaaacgatactgtcttgattcctaattcacctaatattcctagaccaagaacgactcgggttaatggtcagggatgccaaattgtttcagtaaaactaagcaagctcgtatgatgattatgtacctacttgagaacaaattgtctaaaacatatctgctactacacttcagtaaaacaattgatcacacacaagaagttcagatcagaaagcaggctgtcgctactcccgtcaggttctcggatggttcccgtcaagggctgaccatggagaagagcacagtggtggtcagtgtccctgttgttgtcatggccgagactgctgagaccgactacagctcgagcttctcacttcttgtcgtggattcacatttgctacctggggcacctttgcaggatgcagagtcccagaaagatgttgggaagggtgataaatcaagggataagggaactgctgagaagtttgcaatatatcagaagcatcgttcttcgttggcagacactgttcaattcaggaggccagctgctccaacttccagtgtgaatgctgatattgtgggaacatccactctgcagtctgcatctctaccgaaacaagaaccctcaacagctacatccaagagctatactttcagagaaggtgatagggtgcgttatatgggtccagctcagttatcctcattgtcacaaaggctcctctccttttgctggcttcgctgttggaagcgagacatcatgtggtgtggataacgtccttgcagagcacgtgaactcaaatttcactctaatgccagctagctgctacatagtgcacttctgtatattatgagaagagagtggctcttcactcccatcggattgacaaaaacacactcggacaaccagtgctggtattaatcgagatgtcgcatcaacaaacgctcatgcagagccagattctactcctacagtcctacgtctacacgagacgacacaagtgcatctataattgatct

SEQ ID NO: 221395 - DNA, 1788 bp, Zea Mays
gtcgcacacgccctcctgcccctctgctcccctcccagatcccgtgatccgctgccgtgatccgatgccgcacccgccatcaacgccctcctccccctctgctcccctcccagatctcgtgatccgctgcgaggccgccatcaacgccctcctccccctccgctcagctcccctcccaggatctcggcgcgctttcatcgccgccttgatggtccacggctgcacccacatacgacatcgcctgtccgcacgcaagcttctgcctgcgcccacctgtgtgcatagatgtgtgcccccgcccacctcttctgcgcccaatctttacccgtcgtccgcgccgctgttccatcctcgcacccacgcccgagatccacatgtgccgcaccccagccgtgctccggatgctgcaccgcccttccatcctccgcatgcagcaccatgttggccgccgccctgaaacctcgctaccacggagctgcaagcccccgcttccaaaccagcaccatgcagacttccaatttgttttttgtttggagcactgttgattttttctcgtttttttgagaacattacattgcccgtctttcactgttcaacttttcttaattaaccatttacatttaccaaaaacttattcaacttttcactgttcaagttcaatttgttttgtgcagtattgatctgttgtgcagtgtatactttgaggttcggttggccgatcttgcgatcgaataccaaaaacttgtgcggtactctgttgctgaataaaacttggatcaggttaccccaaccccaatggcatttaccgagccgatggaggcgaacctgctacgccaagtgctggactatccccccagtgctctgtccatgtccatccctccttcagcttcattgatgtaaaacaattgatcacacacaagaagttcagatcagaaagcaggctgtcgctactcccgtcaggttctcggatggttcccgtcaagggctgaccatggagaagagcacagtggtggtcagtgtccctgttgttgtcatggccgagactgctgagaccgactacagctcgagcttctcgatgcagagtcccagaaagatgttgggaagggtgataaatcaagggataagggaactgctgagaagtttgcaatatatcagaagcatcgttcttcgttggcagacactgttcaattcaggaggccagctgctccaacttccagtgtgaatgctgatattgtgggaacatccactctgcagtctgcatctctaccgaaacaagaaccctcaacagctacatccaagagctatactttcagagaaggtgatagggtgcgttatatgggtccagctcagttatcctcattgtcacaaaggctcctctccttttgctggcttcgctgttggaagcgagacatcatgtggtgtggataacgtccttgcagagcacgtgaactcaaatttcactctaatgccagctagctgctacatagtgcacttctgtatattatgagtatgtatacagaattttaaagtatgaatacatgtgttttaaagcttggacaaccaatcatttattatccgagaatttaatttggttttattaataaatttaaacctttctataggaagagagtggctcttcactcccatcggattgacaaaaacacactcggacaaccagtgctggtattaatcgagatgtcgcatcaacaaacgctcatgcagagccagattctactcctacagtcctacgtctacacgagacgacacaagtgcatctataattgatct

SEQ ID NO: 221396 - DNA, 1916 bp, Zea Mays
ccgccgtggtccgctgtcgcacacgccctcctgcccctctgctcccctcccagatcccgtgatccgctgccgtgatccgatgccgcacccgccatcaacgccctcctccccctctgctcccctcccagatctcgtgatccgctgcgaggccgccatcaacgccctcctccccctccgctcagctcccctcccaggatctcggcgcgctttcatcgccgccttgatggtccacggctgcacccacatacgacatcgcctgtccgcacgcaagcttctgcctgcgcccacctgtgtgcatagatgtgtgcccccgcccacctcttctgcgcccaatctttacccgtcgtccgcgccgctgttccatcctcgcacccacgcccgagatccacatgtgccgcaccccagccgtgctccggatgctgcaccgcccttccatcctccgcatgcagcaccatgttggccgccgccctgaaacctcgctaccacggagctgcaagcccccgcttccaaaccagcaccatgcagacttccaatttgttttttgtttggagcactgttgattttttctcgtttttttgagaacattacattgcccgtctttcactgttcaacttttcttaattaaccatttacatttaccaaaaacttattcaacttttcactgttcaagttcaatttgttttgtgcagtattgatctgttgtgcagtgtatactttgaggttcggttggccgatcttgcgatcgaataccaaaaacttgtgcggtactctgttgctgaataaaacttggatcaggttaccccaaccccaatggcatttaccgagccgatggaggcgaacctgctacgccaagtgctggactatccccccagtgctctgtccatgtccatccctccttcagcttcattgatggttgcactgctctactatactataagtgaattgagttaaagcattttttgttcgactactgtttggtgcatgcaacttaatatggctgatttttagtctttctattttagtttataaattgtcaatcacagggattaaaagagactaaaagtaaggtttcaggttctatttctatccatctttaattaagggctgaaacgatactgtcttgattcctaattcacctaatattcctagaccaagaacgactcgggttaatggtcagggatgccaaattgtttcagtaaaactaagcaagctcgtatgatgattatgtacctacttgagaacaaattgtctaaaacatatctgctactacacttcagtaaaacaattgatcacacacaagaagttcagatcagaaagcaggctgtcgctactcccgtcaggttctcggatggttcccgtcaagggctgaccatggagaagagcacagtggtggtcagtgtccctgttgttgtcatggccgagactgctgagaccgactacagctcgagcttctcgatgcagagtcccagaaagatgttgggaagggtgataaatcaagggataagggaactgctgagaagtttgcaatatatcagaagcatcgttcttcgttggcagacactgttcaattcaggaggccagctgctccaacttccagtgtgaatgctgatattgtgggaacatccactctgcagtctgcatctctaccgaaacaagaaccctcaacagctacatccaagagctatactttcagagaaggtgatagggtgcgttatatgggtccagctcagttatcctcattgtcacaaaggaagagagtggctcttcactcccatcggattgacaaaaacacactcggacaaccagtgctggtattaatcgagatgtcgcatcaacaaacgctcatgcagagccagattctactcctacagtcctacgtctacacgagacgacacaagtgcatctataattgatct

SEQ ID NO: 221397 - DNA, 2057 bp, Zea Mays
gtcgccgccgtggtccgctgtcgcacacgccctcctgcccctctgctcccctcccagatcccgtgatccgctgccgtgatccgatgccgcacccgccatcaacgccctcctccccctctgctcccctcccagatctcgtgatccgctgcgaggccgccatcaacgccctcctccccctccgctcagctcccctcccaggatctcggcgcgctttcatcgccgccttgatggtccacggctgcacccacatacgacatcgcctgtccgcacgcaagcttctgcctgcgcccacctgtgtgcatagatgtgtgcccccgcccacctcttctgcgcccaatctttacccgtcgtccgcgccgctgttccatcctcgcacccacgcccgagatccacatgtgccgcaccccagccgtgctccggatgctgcaccgcccttccatcctccgcatgcagcaccatgttggccgccgccctgaaacctcgctaccacggagctgcaagcccccgcttccaaaccagcaccatgcagacttccaatttgttttttgtttggagcactgttgattttttctcgtttttttgagaacattacattgcccgtctttcactgttcaacttttcttaattaaccatttacatttaccaaaaacttattcaacttttcactgttcaagttcaatttgttttgtgcagtattgatctgttgtgcagtgtatactttgaggttcggttggccgatcttgcgatcgaataccaaaaacttgtgcggtactctgttgctgaataaaacttggatcaggttaccccaaccccaatggcatttaccgagccgatggaggcgaacctgctacgccaagtgctggactatccccccagtgctctgtccatgtccatccctccttcagcttcattgatggttgcactgctctactatactataagtgaattgagttaaagcattttttgttcgactactgtttggtgcatgcaacttaatatggctgatttttagtctttctattttagtttataaattgtcaatcacagggattaaaagagactaaaagtaaggtttcaggttctatttctatccatctttaattaagggctgaaacgatactgtcttgattcctaattcacctaatattcctagaccaagaacgactcgggttaatggtcagggatgccaaattgtttcagtaaaactaagcaagctcgtatgatgattatgtacctacttgagaacaaattgtctaaaacatatctgctactacacttcagtaaaacaattgatcacacacaagaagttcagatcagaaagcaggctgtcgctactcccgtcaggttctcggatggttcccgtcaagggctgaccatggagaagagcacagtggtggtcagtgtccctgttgttgtcatggccgagactgctgagaccgactacagctcgagcttctcgatgcagagtcccagaaagatgttgggaagggtgataaatcaagggataagggaactgctgagaagtttgcaatatatcagaagcatcgttcttcgttggcagacactgttcaattcaggaggccagctgctccaacttccagtgtgaatgctgatattgtgggaacatccactctgcagtctgcatctctaccgaaacaagaaccctcaacagctacatccaagagctatactttcagagaaggtgatagggtgcgttatatgggtccagctcagttatcctcattgtcacaaaggctcctctccttttgctggcttcgctgttggaagcgagacatcatgtggtgtggataacgtccttgcagagcacgtgaactcaaatttcactctaatgccagctagctgctacatagtgcacttctgtatattatgagaagagagtggctcttcactcccatcggattgacaaaaacacactcggacaaccagtgctggtattaatcgagatgtcgcatcaacaaacgctcatgcagagccagattctactcctacagtcctacgtctacacgagacgacacaagtgcatctataattgatct

SEQ ID NO: 221398 - DNA, 1533 bp, Zea Mays
cccagatcccgtgatccgctgccgtgatccgatgccgcacccgccatcaacgccctcctccccctctgctcccctcccagatctcgtgatccgctgcgaggccgccatcaacgccctcctccccctccgctcagctcccctcccaggatctcggcgcgctttcatcgccgccttgatggtccacggctgcacccacatacgacatcgcctgtccgcacgcaagcttctgcctgcgcccacctgtgtgcatagatgtgtgcccccgcccacctcttctgcgcccaatctttacccgtcgtccgcgccgctgttccatcctcgcacccacgcccgagatccacatgtgccgcaccccagccgtgctccggatgctgcaccgcccttccatcctccgcatgcagcaccatgttggccgccgccctgaaacctcgctaccacggagctgcaagcccccgcttccaaaccagcaccatgcagacttccaatttgttttttgtttggagcactgttgattttttctcgtttttttgagaacattacattgcccgtctttcactgttcaacttttcttaattaaccatttacatttaccaaaaacttattcaacttttcactgttcaagttcaatttgttttgtgcagtattgatctgttgtgcagtgtatactttgaggttcggttggccgatcttgcgatcgaataccaaaaacttgtgcggtactctgttgctgaataaaacttggatcaggttaccccaaccccaatggcatttaccgagccgatggaggcgaacctgctacgccaagtgctggactatccccccagtgctctgtccatgtccatccctccttcagcttcattgatggttctcggatggttcccgtcaagggctgaccatggagaagagcacagtggtggtcagtgtccctgttgttgtcatggccgagactgctgagaccgactacagctcgagcttctcgcacctttgcaggatgcagagtcccagaaagatgttgggaagggtgataaatcaagggataagggaactgctgagaagtttgcaatatatcagaagcatcgttcttcgttggcagacactgttcaattcaggaggccagctgctccaacttccagtgtgaatgctgatattgtgggaacatccactctgcagtctgcatctctaccgaaacaagaaccctcaacagctacatccaagagctatactttcagagaaggtgatagggtgcgttatatgggtccagctcagttatcctcattgtcacaaaggctcctctccttttgctggcttcgctgttggaagcgagacatcatgtggtgtggataacgtccttgcagagcacgtgaactcaaatttcactctaatgccagctagctgctacatagtgcacttctgtatattatgagtatgtatacagaattttaaagtatgaatacatgtgttttaaagcttggacaaccaatcatttattatccgagaatttaatttggttttattaataaatttaaacctttc

SEQ ID NO: 221399 - DNA, 1677 bp, Zea Mays
cccagatcccgtgatccgctgccgtgatccgatgccgcacccgccatcaacgccctcctccccctctgctcccctcccagatctcgtgatccgctgcgaggccgccatcaacgccctcctccccctccgctcagctcccctcccaggatctcggcgcgctttcatcgccgccttgatggtccacggctgcacccacatacgacatcgcctgtccgcacgcaagcttctgcctgcgcccacctgtgtgcatagatgtgtgcccccgcccacctcttctgcgcccaatctttacccgtcgtccgcgccgctgttccatcctcgcacccacgcccgagatccacatgtgccgcaccccagccgtgctccggatgctgcaccgcccttccatcctccgcatgcagcaccatgttggccgccgccctgaaacctcgctaccacggagctgcaagcccccgcttccaaaccagcaccatgcagacttccaatttgttttttgtttggagcactgttgattttttctcgtttttttgagaacattacattgcccgtctttcactgttcaacttttcttaattaaccatttacatttaccaaaaacttattcaacttttcactgttcaagttcaatttgttttgtgcagtattgatctgttgtgcagtgtatactttgaggttcggttggccgatcttgcgatcgaataccaaaaacttgtgcggtactctgttgctgaataaaacttggatcaggttaccccaaccccaatggcatttaccgagccgatggaggcgaacctgctacgccaagtgctggactatccccccagtgctctgtccatgtccatccctccttcagcttcattgatgtaaaacaattgatcacacacaagaagttcagatcagaaagcaggctgtcgctactcccgtcaggttctcggatggttcccgtcaagggctgaccatggagaagagcacagtggtggtcagtgtccctgttgttgtcatggccgagactgctgagaccgactacagctcgagcttctctattcatggttacgaaatgtattggggttctatatttttggtgctagacttcttgtcgtggattcacatttgctacctggggcacctttgcaggatgcagagtcccagaaagatgttgggaagggtgataaatcaagggataagggaactgctgagaagtttgcaatatatcagaagcatcgttcttcgttggcagacactgttcaattcaggaggccagctgctccaacttccagtgtgaatgctgatattgtgggaacatccactctgcagtctgcatctctaccgaaacaagaaccctcaacagctacatccaagagctatactttcagagaaggtgatagggtgcgttatatgggtccagctcagttatcctcattgtcacaaaggctcctctccttttgctggcttcgctgttggaagcgagacatcatgtggtgtggataacgtccttgcagagcacgtgaactcaaatttcactctaatgccagctagctgctacatagtgcacttctgtatattatgagtatgtatacagaattttaaagtatgaatacatgtgttttaaagcttggacaaccaatcatttattatccgagaatttaatttggttttattaataaatttaaacctttc

SEQ ID NO: 221400 - DNA, 2032 bp, Zea Mays
ctcccagatcccgtgatccgctgccgtgatccgatgccgcacccgccatcaacgccctcctccccctctgctcccctcccagatctcgtgatccgctgcgaggccgccatcaacgccctcctccccctccgctcagctcccctcccaggatctcggcgcgctttcatcgccgccttgatggtccacggctgcacccacatacgacatcgcctgtccgcacgcaagcttctgcctgcgcccacctgtgtgcatagatgtgtgcccccgcccacctcttctgcgcccaatctttacccgtcgtccgcgccgctgttccatcctcgcacccacgcccgagatccacatgtgccgcaccccagccgtgctccggatgctgcaccgcccttccatcctccgcatgcagcaccatgttggccgccgccctgaaacctcgctaccacggagctgcaagcccccgcttccaaaccagcaccatgcagacttccaatttgttttttgtttggagcactgttgattttttctcgtttttttgagaacattacattgcccgtctttcactgttcaacttttcttaattaaccatttacatttaccaaaaacttattcaacttttcactgttcaagttcaatttgttttgtgcagtattgatctgttgtgcagtgtatactttgaggttcggttggccgatcttgcgatcgaataccaaaaacttgtgcggtactctgttgctgaataaaacttggatcaggttaccccaaccccaatggcatttaccgagccgatggaggcgaacctgctacgccaagtgctggactatccccccagtgctctgtccatgtccatccctccttcagcttcattgatggttgcactgctctactatactataagtgaattgagttaaagcattttttgttcgactactgtttggtgcatgcaacttaatatggctgatttttagtctttctattttagtttataaattgtcaatcacagggattaaaagagactaaaagtaaggtttcaggttctatttctatccatctttaattaagggctgaaacgatactgtcttgattcctaattcacctaatattcctagaccaagaacgactcgggttaatggtcagggatgccaaattgtttcagtaaaactaagcaagctcgtatgatgattatgtacctacttgagaacaaattgtctaaaacatatctgctactacacttcagtaaaacaattgatcacacacaagaagttcagatcagaaagcaggctgtcgctactcccgtcaggttctcggatggttcccgtcaagggctgaccatggagaagagcacagtggtggtcagtgtccctgttgttgtcatggccgagactgctgagaccgactacagctcgagcttctctattcatggttacgaaatgtattggggttctatatttttggtgctagacttcttgtcgtggattcacatttgctacctggggatgcagagtcccagaaagatgttgggaagggtgataaatcaagggataagggaactgctgagaagtttgcaatatatcagaagcatcgttcttcgttggcagacactgttcaattcaggaggccagctgctccaacttccagtgtgaatgctgatattgtgggaacatccactctgcagtctgcatctctaccgaaacaagaaccctcaacagctacatccaagagctatactttcagagaaggtgatagggtgcgttatatgggtccagctcagttatcctcattgtcacaaaggctcctctccttttgctggcttcgctgttggaagcgagacatcatgtggtgtggataacgtccttgcagagcacgtgaactcaaatttcactctaatgccagctagctgctacatagtgcacttctgtatattatgagtatgtatacagaattttaaagtatgaatacatgtgttttaaagcttggacaaccaatcatttattatccgagaatttaatttggttttattaataaatttaaacctttc

SEQ ID NO: 221401 - DNA, 897 bp, Zea Mays
cagccagccatcgtcacactggtgagctctgcactctgcttagctccgagcttcagtgccttcgttgtttgctccacagtccacacacacacacgtccagctagctgcactgcaccaatggccgccgtcgaggtccaggtcccgactgccgctcccgtcgaggaggctgcccagctggccgccgcctccgccgtcgagaccccgaacgaggagaccgctgctccggcggtggagaccgaggtcgtcgtcgctaaggagccggagccggtggaggccgagactgagactgagaccaaggaggccgaggccgttgctgagccgaccgaggcagagcccaaggaagcagagccggaggccgccgtcgagaagtccgtcgagtgagtccagcccagcgccggacggcggccgatctagctcgctgcgtcagcctgtcacctggcgactggcgtgcgccgcgctggtgccactgccacggcaacagcacggcatggcgccggcataggtcgctaggaaaaacctgcttttgtgttcgggttcacgtcgtgtcctacgtggcgcggcgggccccgcctagtaaaggagcgtcgttttgtgttgtggtcgaataaataatgtgtctgtgtgctgattccgtgtcgggttagtgggcccagtgtcggtgctgatgtggcctacctttacagcacatcggtgggactgggccgttgagctcctgtgtcgtttaatatgtgtacggtgtacccatctagtatgtgtttcgagtgtgtagtaagtatatttgtgtcccatccatctttcgaaactttctttttgttaagctcttgaagcgtgaactctgttacgagctgctcgccctattctaaattataaaatattttagtattttcggcatataat

SEQ ID NO: 221402 - DNA, 937 bp, Zea Mays
cacacgccagccagccatcgtcacactggtgagctctgcactctgcttagctccgagcttcagtgccttcgttgtttgctccacagtccacacacacacacgtccagctagctgcactgcaccaatggccgccgtcgaggtccaggtcccgactgccgctcccgtcgaggaggctgcccagctggccgagactgagactgagaccaaggaggccgaggccgttgctgagccgaccgaggcagagcccaaggaagcagagccggagatagccgccgagaccaaagaggtggcggctgtggaggctaacgaggaggaggaggaggcagcgcctgctgttgctgccactcctgaggtcgcagcgaccgaggaggaagcggcggcccctgctcccgaggccgccgtcgagaagtccgtcgagtgagtccagcccagcgccggacggcggccgatctagctcgctgcgtcagcctgtcacctggcgactggcgtgcgccgcgctggtgccactgccacggcaacagcacggcatggcgccggcataggtcgctaggaaaaacctgcttttgtgttcgggttcacgtcgtgtcctacgtggcgcggcgggccccgcctagtaaaggagcgtcgttttgtgttgtggtcgaataaataatgtgtctgtgtgctgattccgtgtcgggttagtgggcccagtgtcggtgctgatgtggcctacctttacagcacatcggtgggactgggccgttgagctcctgtgtcgtttaatatgtgtacggtgtacccatctagtatgtgtttcgagtgtgtagtaagtatatttgtgtcccatccatctttcgaaactttctttttgttaagctcttgaagcgtgaactctgttacgagctgctcgccctattctaaattataaaatattttagtattttcggcatataat

SEQ ID NO: 221403 - DNA, 925 bp, Zea Mays
cacacgccagccagccatcgtcacactggtgagctctgcactctgcttagctccgagcttcagtgccttcgttgtttgctccacagtccacacacacacacgtccagctagctgcactgcaccaatggccgccgtcgaggtccaggtcccgactgccgctcccgtcgaggaggctgcccagctggccgccgcctccgccgccgagactgagactgagaccaaggaggccgaggccgttgctgagccgaccgagatagccgccgagaccaaagaggtggcggctgtggaggctaacgaggaggaggaggaggcagcgcctgctgttgctgccactcctgaggtcgcagcgaccgaggaggaagcggcggcccctgctcccgaggccgccgtcgagaagtccgtcgagtgagtccagcccagcgccggacggcggccgatctagctcgctgcgtcagcctgtcacctggcgactggcgtgcgccgcgctggtgccactgccacggcaacagcacggcatggcgccggcataggtcgctaggaaaaacctgcttttgtgttcgggttcacgtcgtgtcctacgtggcgcggcgggccccgcctagtaaaggagcgtcgttttgtgttgtggtcgaataaataatgtgtctgtgtgctgattccgtgtcgggttagtgggcccagtgtcggtgctgatgtggcctacctttacagcacatcggtgggactgggccgttgagctcctgtgtcgtttaatatgtgtacggtgtacccatctagtatgtgtttcgagtgtgtagtaagtatatttgtgtcccatccatctttcgaaactttctttttgttaagctcttgaagcgtgaactctgttacgagctgctcgccctattctaaattataaaatattttagtattttcggcatataat

SEQ ID NO: 221404 - DNA, 791 bp, Zea Mays
acaacacacgccagccagccatcgtcacactggtgagctctgcactctgcttagctccgagcttcagtgccttcgttgtttgctccacagtccacacacacacacgtccagctagctgcactgcaccaatggccgccgtcgaggtccaggtcccgactgccgctcccgtcgaggaggctgcccagctggccgagactgagactgagaccaaggaggccgaggccgttgctgagccgaccgagacggaggccgccgtcgagaagtccgtcgagtgagtccagcccagcgccggacggcggccgatctagctcgctgcgtcagcctgtcacctggcgactggcgtgcgccgcgctggtgccactgccacggcaacagcacggcatggcgccggcataggtcgctaggaaaaacctgcttttgtgttcgggttcacgtcgtgtcctacgtggcgcggcgggccccgcctagtaaaggagcgtcgttttgtgttgtggtcgaataaataatgtgtctgtgtgctgattccgtgtcgggttagtgggcccagtgtcggtgctgatgtggcctacctttacagcacatcggtgggactgggccgttgagctcctgtgtcgtttaatatgtgtacggtgtacccatctagtatgtgtttcgagtgtgtagtaagtatatttgtgtcccatccatctttcgaaactttctttttgttaagctcttgaagcgtgaactctgttacgagctgctcgccctattctaaattataaaatattttagtattttcggcatataat

SEQ ID NO: 221405 - DNA, 1102 bp, Zea Mays
tcacaacacacgccagccagccatcgtcacactggtgagctctgcactctgcttagctccgagcttcagtgccttcgttgtttgctccacagtccacacacacacacgtccagctagctgcactgcaccaatggccgccgtcgaggtccaggtcccgactgccgctcccgtcgaggaggctgcccagctggccgccgcctccgccgtcgagaccccgaacgaggagaccgctgctccggcggtggagaccgaggtcgtcgtcgctaaggagccggagccggtggaggccgagactgagactgagaccaaggaggccgaggccgttgctgagccgaccgaggcagagcccaaggaagcagagccggaggccgccgcgccggcagcagagacggaggctgctgctgccccggtcgaggctgctgagccggagatagccgccgagaccaaagaggtggcggctgtggaggctaacgaggaggaggaggaggcagcgcctgctgttgctgccactcctgaggtcgcagcgaccgaggaggaagcggcggcccctgctcccgaggccgccgtcgagaagtccgtcgagtgagtccagcccagcgccggacggcggccgatctagctcgctgcgtcagcctgtcacctggcgactggcgtgcgccgcgctggtgccactgccacggcaacagcacggcatggcgccggcataggtcgctaggaaaaacctgcttttgtgttcgggttcacgtcgtgtcctacgtggcgcggcgggccccgcctagtaaaggagcgtcgttttgtgttgtggtcgaataaataatgtgtctgtgtgctgattccgtgtcgggttagtgggcccagtgtcggtgctgatgtggcctacctttacagcacatcggtgggactgggccgttgagctcctgtgtcgtttaatatgtgtacggtgtacccatctagtatgtgtttcgagtgtgtagtaagtatatttgtgtcccatccatctttcgaaactttctttttgttaagctcttgaagcgtgaactctgttacgagctgctcgccctattctaaattataaaatattttagtattttcggcatataat

SEQ ID NO: 221406 - DNA, 1043 bp, Zea Mays
tgcatcacaacacacgccagccagccatcgtcacactggtccaggtcccgactgccgctcccgtcgaggaggctgcccagctggccgccgcctccgccgtcgagaccccgaacgaggagaccgctgctccggcggtggagaccgaggtcgtcgtcgctaaggagccggagccggtggaggccgagactgagactgagaccaaggaggccgaggccgttgctgagccgaccgaggcagagcccaaggaagcagagccggaggccgccgcgccggcagcagagacggaggtcaaggaagcagagacggaggccgccgcgccggcagcagagacggaggctgctgctgccccggtcgaggctgctgagccggagatagccgccgagaccaaagaggtggcggctgtggaggctaacgaggaggaggaggaggcagcgcctgctgttgctgccactcctgaggtcgcagcgaccgaggaggaagcggcggcccctgctcccgaggccgccgtcgagaagtccgtcgagtgagtccagcccagcgccggacggcggccgatctagctcgctgcgtcagcctgtcacctggcgactggcgtgcgccgcgctggtgccactgccacggcaacagcacggcatggcgccggcataggtcgctaggaaaaacctgcttttgtgttcgggttcacgtcgtgtcctacgtggcgcggcgggccccgcctagtaaaggagcgtcgttttgtgttgtggtcgaataaataatgtgtctgtgtgctgattccgtgtcgggttagtgggcccagtgtcggtgctgatgtggcctacctttacagcacatcggtgggactgggccgttgagctcctgtgtcgtttaatatgtgtacggtgtacccatctagtatgtgtttcgagtgtgtagtaagtatatttgtgtcccatccatctttcgaaactttctttttgttaagctcttgaagcgtgaactctgttacgagctgctcgccctattctaaattataaaatattttagtattttcggcatataat

SEQ ID NO: 221407 - DNA, 1116 bp, Zea Mays
acactgcatcacaacacacgccagccagccatcgtcacactggtgagctctgcactctgcttagctccgagcttcagtgccttcgttgtttgctccacagtccacacacacacacgtccagctagctgcactgcaccaatggccgccgtcgaggtccaggtcccgactgccgctcccgtcgaggaggctgcccagctggccgccgcctccgccgtcgagaccccgaacgaggagaccgctgctccggcggtggagaccgaggtcgtcgtcgctaaggagccggagccggtggaggccgagactgagactgagaccaaggaggccgaggcagagcccaaggaagcagagccggaggccgccgcgccggaagcagagacggaggccgccgcgccggcagcagagacggaggctgctgctgccccggtcgaggctgctgagccggagatagccgccgagaccaaagaggtggcggctgtggaggctaacgaggaggaggaggaggcagcgcctgctgttgctgccactcctgaggtcgcagcgaccgaggaggaagcggcggcccctgctcccgaggccgccgtcgagaagtccgtcgagtgagtccagcccagcgccggacggcggccgatctagctcgctgcgtcagcctgtcacctggcgactggcgtgcgccgcgctggtgccactgccacggcaacagcacggcatggcgccggcataggtcgctaggaaaaacctgcttttgtgttcgggttcacgtcgtgtcctacgtggcgcggcgggccccgcctagtaaaggagcgtcgttttgtgttgtggtcgaataaataatgtgtctgtgtgctgattccgtgtcgggttagtgggcccagtgtcggtgctgatgtggcctacctttacagcacatcggtgggactgggccgttgagctcctgtgtcgtttaatatgtgtacggtgtacccatctagtatgtgtttcgagtgtgtagtaagtatatttgtgtcccatccatctttcgaaactttctttttgttaagctcttgaagcgtgaactctgttacgagctgctcgccctattctaaattataaaatattttagtattttcggcatataat

SEQ ID NO: 221408 - DNA, 526 bp, Zea Mays
aaaggagaggaagtaaggagcagcagcaatcgtctatgtccatggccctctcaagctcgctccgtggcctggtggccctgaccccgctggccctcccttccgctcgcccgagcggggccgcggcggcggccccggcaccacgcgcgcggggtcggacggggagaggggcgggggtcgtggcgctggcggcggctctgccgtcggacgcgcagtggctggagcggctgccggagaagaagaagccgctgtacacgcacagcctgccgtgcatcgaggcgtggctgcgcagcctcgggttcacgcagtcccgcgaggaccccgccgtctgggtcgccgagaagccgctctggcacgcgcgtctcagcctcgatgtcaccgacctccacatcaggtacttgaaaagcggccctggaaatcttgacaaggatatggagagaaggtttagctacgccctaagcagagaagacatcgagaacgccatactcggaggaccttaagctgaacacatcgagaacgccatactcgg

SEQ ID NO: 221409 - DNA, 658 bp, Zea Mays
aaaggagaggaagtaaggagcagcagcaatcgtctatgtccatggccctctcaagctcgctccgtggcctggtggccctgaccccgctggccctcccttccgctcgcccgagcggggccgcggcggcggccccggcaccacgcgcgcggggtcggacggggagaggggcgggggtcgtggcgctggcggcggctctgccgtcggacgcgcagtggctggagcggctgccggagaagaagaagccgctgtacacgcacagcctgccgtgcatcgaggcgtggctgcgcagcctcgggttcacgcagtcccgcgaggaccccgccgtctgggtcgccgagaagccgctctggcacgcgcgtctcagcctcgatgtcaccgacctccacatcaggtacttgaaaagcggccctggaaatcttgacaaggatatggagagaaggtttagctacgccctaagcagagaagacatcgagaacgccatactcggaggaccttaagctgaacacatggccaaggggctcagagctaggaattgcttagtcgaggttggcactgaagaaataatcgctccagtgatctgcgtgctaccattacgccattgtaagagcaaatggatcatgtgtcgagaaataatattcatcgagaacgccatactcgg

SEQ ID NO: 221410 - DNA, 381 bp, Zea Mays
gcagttaacacttaatgatatatcaaacaccttaatttaattagaaatggattacacgttcagtagtgaacaacgcgtgcgtttggggtggggagccgaagccgcttctagcggccacaatcggtataaaggcgaaacaaacgcagccgaagttgttcctcccgcaagctcccatccgcccgctaccccacgctctgcgcctctgcctagggttacgagcgacgctgcgccgtcggctggtgcattgacgagcgacgccgcgcggggttacgagcgacgccgtcggctggtgcgttactctcgtgtgcacagcaatggcgaatctccagagaggagaggaacccaagccgtggcaacatggaaggatggtgtcgtgatccc

SEQ ID NO: 221411 - DNA, 2190 bp, Zea Mays
gcagttaacacttaatgatatatcaaacaccttaatttaattagaaatggattacacgttcagtagtgaacaacgcgtgcgtttggggtggggagccgaagccgcttctagcggccacaatcggtataaaggcgaaacaaacgcagccgaagttgttcctcccgcaagctcccatccgcccgctaccccacgctctgcgcctctgcctagggttacgagcgacgctgcgccgtcggctggtgcattgacgagcgacgccgcgcggggttacgagcgacgccgtcggctggtgcgttactctcgtgtgcacagcaatggcgaatctccagagaggagaggaacccaaggaagtgtggatatggcttagttccgcagagttcttggttgatgcctatttagtgctactgaggaagttagctcatggtcaaatggtgattcaggagaaaaaagtccacaagcttgctccccttcacaaacacaaaaggaaaaacgtttttcccctgaatggtgctctagcgctagaaaaaggaatagaaaaactgtcttccacgaaaacatttaccagtctctctattcattggattttaaggctacgcaaagtgattataatcatgaggtttgaagcaaactcttaagcccgtttacgtacaactcactcattctattttataacagttgcatcaaactcccactgataaagatgtgagtttccttagatcaatacgtgtagccaaagcacattaaagtcaacatccatgttgtttgttcatacgcaaaggtaagtcttttttacagcctaaggtcaaacacgctttaggaatatattgtattactattgttttgtaaaagggttaatattatgttttttatgtttcctgtccgcatatttttgtggcagaatttcatctaggcacgaggactaatatttgtgatccttcgagctttcatggccgagattagaatttcatctaagcatgaggaccaatacctttgatcctaagagcttccactgctgtggttctgtttatttctgcttttttgttgaaatatgtggaccagaacctccgatccttacatgcttcctcgatgaggtaattgacacttactttaacatgtcatcttcaccaagttcatgtgttccatgcgctttagttaccctttactttaagaagtaccacatttataattgtcctttcaaattagctttattagtaatgaaatgaattgtgctctgtttggtcctaacattttttcgatatgtttatgtgttgcatgtgcttcacgatgtgcttgtataactatgtgtgtatacccaaagatcactatataactgatctaggtaaacacttatacatatctaggtaaacttatgcaggagacctctcgatataatacaagactcctatacatattacatatgccataagtacaatcgatcttgtataactatgtatatatatcgaaagatcactatataactgatctaggtaaacatttatacatgagaccttttgacataagagaaaccattctatacatttttttgtttgccatacgtccaatccacatgaatcctgtgtagaaaactatcctatgtttgatctacgagattcttgtagagatatttgattatatgtctaaaccatacaattaatttacataatcttagtaaaatgcagcgtatgctgctaccataattttttggcagccacatttacaacgttgtatctaaaatgaagcatgttaattcaaatagcataaaaaagaagtgccttaatactcttatgagacacaccagttaaatgcagacactttttcccttccacaacacagattgtgatatgctcatgacaaattcgttgtgacagatcatagcaatccgttttgcgccccatcaactatacctcctagcaaacctcattgtacacgtagggagttattgaatgaatgaagattatcatcggcaggtagcacgatcagcacataattttctaagggtttctataaactgtattaggtgttggcacatctgctcaacaggctccaacattgcagtgtggtcgccttgacccagagtttgttaaaacctttgcttgtatttggtcccatagttatgtactcatgtcctgaataacgattattttgcatgtgcaaatgttcatgacacagtatcaagtcttagatatttat

SEQ ID NO: 221412 - DNA, 2569 bp, Zea Mays
aaaagactgtctcccgcagcggctgttcagcttgctttcctcacgcggccggagacttctaggctgcttccatatgcgtgcgagtgccagccgttatggagcaaaaaagctctgccagccttaccgtccctacggcacgacgcctctaacgtcggcgaccgcgacgacgatgaccccgcgtatcccctcctcgtgtgctccgttcgcaatcgctgcctccatctcctacaggcctccacacccgtgcgccggttctgcctctcgatgcccgtctgcccgcgcgccccactccctcttccctggcgcgagatggatccgccgcgaatcgcccacaaatcatggcagtacttctctggttcacgcatctgtcggtccacaaatcacgcatccgtcatggcagcgacagacagacaagatttaacttgcatccatggcagccgccgcgcatctgtcggtccacaaatcacgcatccgtcggtcccaaatcacgcgccagggaaggtgctttccaaatcatgcgccagagaaggcgccttcccaaaacacacatccatggcagccgtcgcgcccgcgccagggaaggtgcttcccaaatcacgcgtcagggaaggtccttcccagatcacgcattcatggcagccgcgcccgtaaaccgcgcctcccccacgacgctcttccatccacagcgtcgcccccttccatccatggcagtcgcgctccctctgcgagcctatacgtgcggggatgttgggaggcgctaccaccaatcgagcggcattagccccgacctgaagcacacatggccggaatccagaggatatcgtgcccccgcccccatccggagtctgccccgcatcgtgcgatgctcgttgctgagctcccgatgaccgcccgatggtgtcgaaccccgcaccgtcgtcggcaccgcgctactcggcgtactcgctaccgtcgacccacctccccggagaggacatcctcttctgcatcgacgccgacctcgaggtccacgccaagatgaagtccgctgccgtagcatcctcgggatccacgtccactgcgtcgccgcagtccgtaggagctgatggtgccccggcggtggggacccggactgtggtcgcccgagaaccacccacgttgagactgacgcatcccaagccagataaggatggataccctcacatcttcgattatttcgccgtccaaacacatgatttcctggttcccctttggcttcctccagatcttgccttcgcccgcatcgaccatcgcgccgctgccgtgacctaccatggagctctgcctcgccgcgcgcgccgggacgatggcggccgcgtgccggaggatggcaccgacgataggcgtgccgaagaagaggcacgacggtggcactgtgcgcgtacgttgcgtggtgacgacgcccatgggggagaagacggagtaccgggacggcccgctggagcgtgcgttcatggggctgttcgcgcgaagatggagaagtacgcggcgaagaagtcggcggcgcaggcgaaggagaagagggcggtgtgggagtgggactacgagagcttcgtggacgtgtcgtggcggttccggcggctgttcccgccgacgcggtgggcctgcgagttcaacacggcgctgaccgtgcccttcttccgatggctcgtgggcccctcggaggtggaggtcggcggcctccggcagcgcagcgaggtgcgcatcgagaagtgccggtacctggagagcagcggctgcgtggggatgtgcgtcaacatgtgcaaggtccccacacaggacttcttcaccaacgagttcgggctccccctcaccatggacccaatgcatatttcgaagacatgagttgcgagatgatatacggctaggtgcctcctccgttggaagaggacccggcgtcgaagcaagcttgctacccgagcctctgttccatgttgacgctgtgtgccccggcctgtcccaagcttcaataggtccatacatgcatgcgcagagtttgccggccggacttgggatggaagaattatcatttgtgttttttatacagaaatgtagcttgtaaactattagtaaagttatatacaagttttattctgaaccaggacagagcactctgtaacaaattcggtgcatttccgttcctttcgctgatcaaatgcctttgttccctatggttcttgtagagcggttgtgtcgtccgagcattgatctgaaccagcacagtttatcagggacgtagcagtgagttggttatagagaactcagatttgatggctaaacataaaagcgacttagaaggattcaagttatatgtatactaaagtggtgaggactcgcaagaagttcaatccactgccagaaggttagatttgagtctcaattattttcaagggaagagatcatgctgataattcactccatgggtacgaggttttcaaaaatccgagcattagtgatgtcctgtgcacaacaacagcagaggctcttgcaatggggaaattcgtgatttgcgcagaacatccatcaaatgagttttttcatgtcatttccg

SEQ ID NO: 221413 - DNA, 801 bp, Zea Mays
cttctaggctgcttccatatgcgtgcgagtgccagccgttatggagcaaaaaagctctgccagccttaccgtccctacggcacgacgcctctaacgtcggcgaccgcgacgacgatgaccccgcgtatcccctcctcgtgtgctccgttcgcaatcgctgcctccatctcctacaggttccatgttgacgctgtgtgccccggcctgtcccaagcttcaataggtccatacatgcatgcgcagagtttgccggccggacttgggatggaagaattatcatttgtgttttttatacagaaatgtagcttgtaaactattagtaaagttatatacaagttttattctgaaccaggacagagcactctgtaacaaattcggtgcatttccgttcctttcgctgatcaaatgcctttgttccctatggttcttgtagagcggttgtgtcgtccgagcattgatctgaaccagcacagtttatcagggacgtagcagtgagttggttatagagaactcagatttgatggctaaacataaaagcgacttagaaggattcaagttatatgtatactaaagtggtgaggactcgcaagaagttcaatccactgccagaaggttagatttgagtctcaattattttcaagggaagagatcatgctgataattcactccatgggtacgaggttttcaaaaatccgagcattagtgatgtcctgtgcacaacaacagcagaggctcttgcaatggggaaattcgtgatttgcgcagaacatccatcaaatgagttttttcatgtcatttccg

SEQ ID NO: 221414 - DNA, 1964 bp, Zea Mays
gattttgctacctactcactaaaagtacctgatcattgcaacttatatttatatattttggatgacgaacaacttagaaatgatatcaaggttatatataatatcatatcttgtgtttgttcccgtaaaaaataaccaccaatatctttactactctataagcctttattgtaggcctccacacccgtgcgccggttctgcctctcgatgcccgtctgcccgcgcgccccactccctcttccctggcgcgagatggatccgccgcgaatcgcccacaaatcatggcagtacttctctggttcacgcatctgtcggtccacaaatcacgcatccgtcatggcagcgacagacagacaagatttaacttgcatccatggcagccgccgcgcatctgtcggtccacaaatcacgcatccgtcggtcccaaatcacgcgccagggaaggtgctttccaaatcatgcgccagagaaggcgccttcccaaaacacacatccatggcagccgtcgcgcccgcgccagggaaggtgcttcccaaatcacgcgtcagggaaggtccttcccagatcacgcattcatggcagccgcgcccgtaaaccgcgcctcccccacgacgctcttccatccacagcgtcgcccccttccatccatggcagtcgcgctccctctgcgagcctatacgtgcggggatgttgggaggcgctaccaccaatcgagcggcattagccccgacctgaagcacacatggccggaatccagaggatatcgtgcccccgcccccatccggagtctgccccgcatcgtgcgatgctcgttgctgagctcccgatgaccgcccgatggtgtcgaaccccgcaccgtcgtcggcaccgcgctactcggcgtactcgctaccgtcgacccacctccccggagaggacatcctcttctgcatcgacgccgacctcgaggtccacgccaagatgaagtccgctgccgtagcatcctcgggatccacgtccactgcgtcgccgcagtccgtaggagctgatggtgccccggcggtggggacccggactgtggtcgcccgagaaccacccacgttgagactgacgcatcccaagccagataaggatggataccctcacatcttcgattatttcgccgtccaaacacatgatttcctggttcccctttggcttcctccagatcttgccttcgcccgcatcgaccatcgcgccgctgccgtgacctaccatggagctctgcctcgccgcgcgcgccgggacgatggcggccgcgtgccggaggatggcaccgacgataggcgtgccgaagaagaggcacgacggtggcactgtgcgcgtacgttgcgtggtgacgacgcccatgggggagaagacggagtaccgggacggcccgctggagcgtgcgttcatggggctgttcgcgcgaagatggagaagtacgcggcgaagaagtcggcggcgcaggcgaaggagaagagggcggtgtgggagtgggactacgagagcttcgtggacgtgtcgtggcggttccggcggctgttcccgccgacgcggtgggcctgcgagttcaacacggcgctgaccgtgcccttcttccgatggctcgtgggcccctcggaggtggaggtcggcggcctccggcagcgcagcgaggtgcgcatcgagaagtgccggtacctggagagcagcggctgcgtggggatgtgcgtcaacatgtgcaaggtccccacacaggacttcttcaccaacgagttcgggctccccctcaccatggacccaaagcggttgtgtcgtccgagcattgatctgaaccagcacagtttatcagggacgtagcagtgagttggttatagagaactcagatttgatggctaaacataaaagcgacttagaaggattcaagttatatgtatactaaagtggtgaggactcgcaagaagttcaatccactgccagaa

SEQ ID NO: 221415 - DNA, 2284 bp, Zea Mays
cccgaaacgagccaaaaagaaccacaccgcacaagtgccaagtgccaacaccgccggaaaccacctcgtgctggcccatcccgacatcccgtcccgtgctcccctcccctcctctcgaccacctcctcgtcgtcttcctcgccccctccgccacctccgccccggcctctccgctcccacccccgcggaaaccctaactccctcttggcacaggaggcctatgacggagattcgccgcgcgcaaggagggagtggattcgcgactgcgcagccgctgccgtcgtcctagggcgcgtcgagcactgccaccccattgacgggcccatccccacgacatccgccatgttcgagggccacgtgctgtatctgctacgcaaatatttgggtgaatatgttgaagggctttctgttgaagctctcagaataagtgtatggaaaggtgacgttgttctaaaagacttaaaacttaaggctgaagccctgaattctctcgggtttccagtgacagtgaaagctgggtttgttggcaccataacattaaaggtcccatggaagtgccttggtaaagaaccagttattgtcctcattgatcgtctatttgttcttgctcatcctgctcctgatggacagactctcaaggaagaagatagacaaaaactttttgaagccaagcttcagcagattgaggctgcggaggcagctactcttgaagcaacaaataggaactcaagaggagggcctgcaccaggtggaaattcatggttatacaatttaatatctacaattattggtaatcttaaagtcaccatcagtaatgtacacataagatatgaagattctgtcagcaattctgggcacccatttgcgtctggtttcacgttatcaaaacttgcagccgttacagtggatgaggatggtaatgaaacatttgatgcaggtgtagccctagataagctacgaaagtctgttgaactgcataggctgggcatctaccatgactcagacagtaatccttggaagcttaataaaaattgggaagctctaaatcgtaccgaatggagtgagatatttcaagatggcattgaagatggctctcaaagttccatctgggcagtaaatcggaactacttggtctcgcctataaatggaacccttaaatataaacgacttgggaagaatgaaagaggggatccagataccccattggagaaagcctcacttgtcctcagtgatgtttctttaactgtaactgaggcacagtattatgatggcattaaactgttggaagcattttcgaggtttagaacacgtgttgatgtgtctcatttacggcctgttgtgcctgtaaaggaggatcgtcgtgcttggtggcgttatgctgtgctggctggtctgcgacaaaggaaactatgctattggttttcatgggagagaactagacgcctctgccagcttcgacgccgttatgttcaattgtatgccacccttttgcaacaagcagcaaaagttgacatttctgaaattcgagagatagagaaaattctagacatgaaggtcataatactttggaggttgctgggtcatgctaaggttgaaacagtgaaatcaaaggggacactatatagaaaaggggcctcaaagaaaagatggtggccttttgcatggaacacgactggtttaccttctgaggaagctacacacccagaatcacagttagatgaagaggaacaactgactaaagaagagtggcaggctattaataagctgttgagttaccaaccagatgaagatatgtcttttccccttgagaaggtttccccaaatgtgattcaatttatgatggatgtatccattggccaggctggtgcaaggatcatcaatattgatggaactgaggttttatgtggtagatttcatcagcttcaggttgtcactaagttgtatccgaagagcacatgttgtgatgtgacattgaaatattgtggtctatcatctccagaaggttctcttgctcagagtgtcgttagcgagggaaagagtcatgctcttgatgttagttttgtacgagcaccaattggtatggaccttgattggcagctcattgcgaagatatcaccatgccatgttacgctactagcaaaattcaacttgatgactacctgccaggttcagacagctgccttgacttaccaaggaaataagacagctgatgttgcctacttactagaaagggaaactgacctatatgtcacccattagcttactagaaagggaatagaattct

SEQ ID NO: 221416 - DNA, 2003 bp, Zea Mays
gaaaaaacgcaggtgtcgaaacacattttcttgctccagagaatttaaaccgctgcgaattcaattcgaaagccccaagagagcatccatggcttccgctaccacctccatctcgtcgcaccccgccgccctccgcgacgtcaaagctgcgaggattggcgggctgaggcagcagcaggcgagcgtggccccgtcggcggcggcagcgcgtggccagcgcgctcgggcggtgcgatcgctgcgcgcggcggagcctgcgaggcagccggtggcggcttccgcggccgcggcggcgccggccgcgcccgtggccgacgaggcggcggcccttgcggccgtggactacgaggccctggcgcgtgagctggagggcgcgtcgccgctggagatcatggatcgggcgctggccatgttcggctccgaaatcgccatcgccttcagcggcgcggaggacgtggcgctgatcgagtacgccaagctgacggggcgtccgttccgggtgttcagcctggacacggggcgtctgaacccggagacgtaccagctattcgacaaggtggagaagcactacggcatccgcatcgagtacatgttcccggacgcgagcgaggtgcaggagctggtgcgcaccaagggcctcttctccttctacgaggacggccaccaggagtgctgccgggtgcgcaaggtgcggcccctgcgcagggcgctcaaggggctcagggcgtggatcaccggccagaggaaggaccagtcccccggcaccagggccagcatcccccttgtccaggttgatccttccttcgaaggcctggatggcggggctggtagcttggtcaagtggaaccccgtggccaacgtcgacggcaaggacatctggactttcctgcggaccatggacgtacctgtcaacaccctgcatgctcagggctacgtgtccatcgggtgcgagccgtgcaccaggcccgtcctgccggggcagcacgagcgtgaaggccggtggtggtgggaggacgccaaggccaaggagtgcggcctccacaagggcaacatcgacaaggacgcccaggcggcggcccccaggtccgccaacggcaacggctcggcgggcgccccggacatcttcgagagccccgccgtggtgtccctcacccgcaccgggatcgagaacctgctgcgcctggagaaccgcgccgagccgtggctcgtggtgctgtacgcgccctggtgcccgttctgccaggccatggaggcctcctacgtggagctggccgagaagctggcggggtccggggtgaaggtggccaagttccgcgcggacggcgagcagaagccgttcgcgcaggccgagctgcagctgcagagctttcccaccgtgctcctgttcccgggccgcaccgccaggcccatcaagtacccgtcggagaagagggacgtcgactcgctcctcgccttcgtcaacagcctccggtgagagacgacctccagtgagcgagaaccatcgttctctgtcagtctgtatgatcttatgttggtctttatgagtttatctaggttcgtagagaagggaggtggaggggactgggtttggtagtgacacaggaaggaacgagggttcaggggggaaaaatcaggtgtagcttttgtaactgcaaaatgattgcagcatgtatacctgaagtctgagcttctgaggccctgtgcttggtagctgagggagaggttacttgtgtgtgcttatagtcagtggcgagtgcctactataaggttcaccggtcatctaaagcactgttgtaaactgtattatttggagagtggagttttaatataggcataagaatgggtaagtcgctggagatagtctaagaaaaatcaaataagagaccaagatttgagagttttcgtttgtttataggttggttgtcaactatatagactgtagaaatcggagggtttgcatattgttagaccccgtttatttagtgctaaagtttagcataaca

SEQ ID NO: 221417 - DNA, 3271 bp, Zea Mays
gctgctgctgctgctgccgccgccgccgccttgtcgggtaacgagcgacctcgacgtcggacgtctcaagtggtcacatgctcgaggtcctggacatggcgccgccgccaccaccgccgccgccgccgccgcatgcgcggcaccatcagggggcagccaagggcggccacgcggagcggaggaagcaaccgctgcagagcagcgtgacgcagcccaaggcggaaccggcggcggcggcggcggcggccgtgctgccggagggaggcaagaggtgcggaggaggcggcgggaggcgccgcggcgggcgcggccgggccaaggcaccacctggtgagcctcgcgtcgcgctagcgctggcgcctccgccgcgcacggtcattggcccgcccgtgccgagcaaggggctgtcgttctgccgccgccccggattcgggaccgtgggcgcgcgctgcgtcgtcaaggccaaccacttcctcgccgagctcccggacaaggacctcatccagtatgatgtgaagatcacgccggaggtgagctcgcggaccgtgaaccgggccataatggctgagctggtccgcctctaccgctcgtccgacctggggatgcggctcccggcctacgacggccgcaagaatctctacaccgccgggaccctcccgttcgacgctcgcgagttcgtcgtgcggctcaccgatgaggacgacggcaccggcgtcccgcctcgggagagggagtacagggtcgccatcaagttcgccgcgcgcgccgacctccaccacctcaggcagttcatcgccggacggcaggcggacgcgccgcaggaagccctacaggtactcgacatcgtgctccgcgagctcgccaaccagaggtacgtgtccatagggcggtccttctactcgccggacatcaggaagccgcagcggctcggcgacggcctgcagtcatggtgtgggttctaccagagcatccggccgacccagatgggattgtcactcaacatcgacatgtcgtccacggcgtttattgaacccctgccggtgatcgagttcgtggcccagatattaggaaaggatgtcatatcaaggccattggccgatgctaaccgaatcaagatcaagaaggcattacggggcgtaaaagttgaggtcacgcaccgggggaatgtaaggcgcaagtatcgcatatctgggctcacaacacagccaactcatgaactgattttcccaattgatgaacaaatgaatatgaaatctgtcgtggagtacttcaaggaaatgtatggtttcaccattcagcatcctcatcttccttgccttcaggttggaaaccaaaagaaggcgaactatttaccaatggaggcctgcaagatcgttgaaggccagagatacacgaagaggttgaatgaaaaacagatcacatcgttgctaaaggttacatgccaaaggcctcgagaacaagagatggatattttacagacagttcatcaaaatggatatgagcaagatccatatgcgaaggaatttgggatcaacattagtgagaagctaacctatgttgaagcccgagtccttcctgcaccttggctgaagtatcatgacactggaaaagagaaagagtgcttaccacaggttggtcagtggaacatggtaaacaagaaagtgataaacggatgcaaggtgagccactgggcatgtataaacttctcaaggagtgttccagaagccacagctcggggattttgccaggaattggcacaaatgtgtcaaatttcgggcatggaatttaacagtgagcccgtgatgccaatatattcagctagaccagatcaagtagtgaaggcacttaaaagtgtgtataatattgcactgaacaaactcaagggtaaagaacttgaacttcttctggctatactccccgacaacaatggtccgttatatggtgacatcaaacgtatttgtgaaactgatttgggattgatatcacaatgttgcttaaccaagcatgtttttaagatcagcaaacagtacttggcaaatgtctcactgaaaattaatgttaagatgggaggaagaaacactgtgctcctggacgcaataagttggagcattcctttggtcagtgacatcccaactattatatttggtgcagatgtaacacaccctgaaaccggggaggactcaagtccatcaatcgctgccgttgttgcttctcaagattggccagaagttacaaagtatgctggattggtttgtgctcaggcacaccggcaagagctcattcaggacctttacaaaacatggcacgatcctcagagaggcactgtaacaggcggcatgatcagggagctgttaatatccttcaggaaggccactgggcagaagccattgagaataatattctacagggacggtgttagtgaaggccagttctatcaagttctcctttacgagttagatgccatccgtaaggcatgcgcatccctagaaccaaattaccagcctcctgtaacatttgtggtggttcaaaaacgtcatcatacgagactatttacaaacaatcacaaagacagaagtagcatggacaagagtggaaatattttgccaggaactgttgttgattctaagatatgccacccaacagagtttgatttctacctctgtagtcatgctggaatccagggaacaagtaggcccgctcactaccatgtcctctgggatgagaacaatttcacagcagacgaaatgcaaacactgacaaacaacctttgctacacttatgcccggtgcacacgctcggtttctgttgtccctcctgcatactacgcacacctggcagcattccgggcgcggttctacatggaaccagagatgtcggagaaccagacgtcgaagagctccaatggcacgaacggaggcttggtgaagcccctgcctgctgtgaaggagaaggtgaaaagggtgatgttctactgctgacgaggtgaccgctttaacaaccattcacatgctgtagctaacttggtagggttcagtaggggattagattagctttctccaggaacgaagaggaaacgggatgcgtatttggatcatgaacaatcaatctgttagcgatcgctgtaaaatactcggaaatgcctgtataatagttcttgttggttcagatgcatgcatccaatgttccagtgtactatgaaaagggggtgtagaagaaaccttctggtgttttctaggttgaattcaatcaattcattaacatcacgctggag

SEQ ID NO: 221418 - DNA, 1499 bp, Zea Mays
gaagtggcacccaacaagaaccctggcaacgtcaaggatgaagttgaggccaaattcaagatctccaaggcctaaggggttttgagtgatccccagaagagggcggcatacgatcagtatggcaagaaagggctgaaggcctttgcagatatccaggagcgttgtgaggctgaatggatgaaggaaatacttggtgattatgatgctattcatgtgagagtggtgatctattgaaaaatacttggtgttgaacagagccttcatcctcatctagacagagacaccacacctgagtataacagaaaaagaattgcacaatggattccaccgggtcaaacttcattcattgcattaaatgaaagaactccatgcttcttttccactctgtcagacaggcaacaattcaggtacaagttagcgtactcgtgcaacttgagtagcatgttggagccaattattaaggaaaactatcagttattgacagtaagaggctcgtgatgcaaggagcaaagacatttatcaagacaatgagagaatttgacagtgatttaaccctttgtgatgatccaaaaagaacaccaatgattattataggtattaaatattgtctaattataaaacaaattacagatggagactaaaatacgagataaatttattaaacctaattaagtctatatttaatactcctaattgatatttaaatatttgatatgacccgaactaaactttagtcagggaacaaaacacttagacttggagagctgaatctttcagcaacttgacatcctgacatggacaactgattaaacctgaagctagcatggtagtgtttgctgttattgcagaagccagctaaaatcaacctgcaatggtggacaccacctatgtttcacttcagcgcatctgttcatactaccacgcgtacttataatctagaaaaagccaaaagtcttgacatgttttgtttgcaacacaaaagagaatttggttacaacacaaaagagaagatttatttgcagatttagaatgtatatacatgtcacatccttttgtacaacatgtgtaagaatgaagcagcaccatgaggcttatgcgtggagaatatcattaattggttattatcttttaatttgtataggtctgtaagaacgaacctgcacattgaggcttatacgtggagagtgccataaattggttgttatattcttttctctattcctttaaaatataagttttgtgtgtcgcacaaagcacatagatctgttcttcccctcgcttctcacctaccagtaggtttttacatgagaaaccactcaagcctaacatgatagtaagtcacacgtagtgcagcgttcttacctaatactatcctgctagctgaagaaatatgagtattaggtaatcgtgctgaagaaagatgagaatatccttgatgttaactatatcttaactaggtatgatggcattaaggttcaattcagcataatcgttgaaac

SEQ ID NO: 221419 - DNA, 985 bp, Zea Mays
ttttgaaaccctcgcctccctcttcctttccggccgccgcctgccgccggaaggagaaaaaatgggtgccggtggggaggaagcgccgcggataatcgtgcctatggcggtggagggtaccccgaatcagctggcgtttgtagaggagtcgaagctgcagaagcgcaaggagaacgtggactgggccgtgaggaaccgggagcgcagggcggccaagcgccagcgcatccgcgacgagcacaaggtcgccgtcaggcggcccgaggagttcgtcaccgcgttccgcaacaaggagcgcgacttcctgcggatgaggacccgcatcaagctccgtggacttgcacccgcacatcaggaaggttttgaggaaactacgactgacgaaggtcctcactggggtgttcctcagggccaccgagttgacgctgaagaggctgcttgtggtcgaaccctttgtcacatacgggtttccgaacttaaagagtgtgaaagagcttatctacaagaagggccgcgggttctttgacatggaacctttccctcttaccagcaacgatctaattgagaaggctcttggagatcatggcatcatatgcttggaagaccttgtgtacgagatcgccactgtaggcccgcacttccgagaagcatcgaggttcctcatgcccttccagctcaagtgtccggagaggaggctgcagatgaagaggaaaccgtacagggatggtggcgactcaggcaaccggggcgacaaagtcaacgaactaattgaaaaattgaattaaagcagagttgttcgcttcggactggtacggattaaaaccaaacgaacaggcctgtctctctctagttgtgattttgtggtggagtgatggatctgttactttgtcagttttgtaatagtatagctggatgtaatctagaggtgctgtttggtttacgaaatataatggtaacgataatgattcacactcgaatgatgttg

SEQ ID NO: 221420 - DNA, 449 bp, Zea Mays
gcatcatattcaaagatcggatcatagccaccggctcttggagatcatggcatcatatgcttggaagaccttgtgtacgagatcgccactgtaggcccgcacttccgagaagcatcgaggttcctcatgcccttccagctcaagtgtccggagaggaggctgcagatgaagaggaaaccgtacagggatggtggcgactcaggcaaccggggcgacaaagtcaacgaactaattgaaaaattgaattaaagcagagttgttcgcttcggactggtacggattaaaaccaaacgaacaggcctgtctctctctagttgtgattttgtggtggagtgatggatctgttactttgtcagttttgtaatagtatagctggatgtaatctagaggtgctgtttggtttacgaaatataatggtaacgataatgattcacactcgaatgatgttg

SEQ ID NO: 221421 - DNA, 2020 bp, Zea Mays
ggaataaggaggagccatgattggaagtccccccaataggccaaaacaagcatgacgcgattggccgtccccaacggccaacgagttgtccgccccgcccctcgctttcgtccccgttttccggtgccttgcttccccctcctcactcaaatgcctcacaggccgaggctccgaggccgcggggaggaggaggagcggcagccagcaggggaggaggacacgaatcgtagtcggcctcccgcccgccccggcaattgttgttgctgctgcgcgcagggcggttctggattgcggtctgccccacccacgaacaatccatggctccatctccgcctcggcgtgctgcgctcctcctcgccacggtgcttctgctggcggcggccgggtccacccccggcgccacggctgctggcatcttccaggtgcgccgcaagttcaccgccggggtgggagggggtgctggcgccaacatcagcgcccttcgcgcccacgatggcacccgtcacggccgcctcctcgcagccgccgacctccctcttggcggcctcggcctccccactgacactggcctctattacacggagatcaagctcgggacgccacccaagcactactacgtccaggtcgacaccggcagcgacatcctctgggtcaactgcatcacctgcgagcaatgcccccacaagagcgggctcgggttagacttgacgctttacgaccccaaggcatcctcgaccgggagcatggtgatgtgcgatcaggcattctgtgcagccacctttggcggaaagctgccgaagtgcggcgccaatgtgccctgcgaatatagtgtcacctacggtgatggtagctcgacgataggttcctttgtcaccgatgcgctgcagtttgatcaggtgactagggatgggcagacacagccggctaatgccagcgtcattttcgggtgcggtgctcaacaaggtggggatttgggaagttcaaaccaagcccttgacggaattcttggttttggtgaggcaaatacatcaatgctatcacaactaactaccgctggtaaagtgaagaagatatttgcccattgtttggataccataaaaggaggtggaattttttctattggggatgtggtgcagccaaaagtaaaaacaacgccattggtagccgacaagccacactacaatgtgaaccttaagacaatcgatgttggtggcactactctacaactcccagctcatatttttgaaccaggagaaaaaaagggtaccataatcgacagtggtaccaccttgacataccttccagaattggttttcaaagaagtaatgctcgcgtgtagatgatggattcccaaccatcacattccattttgaggatgatcttgcactacatgtgtatccccatgagtactttttcgcaaatgggaatgacgtatactgcgtgggattccaaaatggtgcatcacagtcaaaggatggaaaggacattgtgcttatgggagatcttgtcctttccaacaagttggttatctatgacttggaaaatcgagtcattgggtggactgactacaactgttcgtcgagcattaaaattaaggacgacaaaacgggcgcaacatctactgttaattcacatgacttgtcctcaggatggaagttccactggcacatgtccccggttctattgttggtaacaacggtgtgcagttatttaatatgctaactccactgtacaggaaatccatctggttcgtatatcctttccacgaaaaggatcggagagatgtagggctatctttaggttgtgttctccgaccacggaaaacaatggaaatagaaaaatactgtaatgctatactgagccattgtttgactagggtaatgccgaggtgaccgcacgtgagttcagtttcccgtttaaaaaatatgcatgtacagcagcaatgtatatggccaaataagaatttcttttgtttgcagtacagcaatgttctgtcatttctttgggaaaacaattgttg

SEQ ID NO: 221422 - DNA, 2410 bp, Zea Mays
tgagcttccacctacatagtatggagattagttgtggataacctagaaaatggaataaggaggagccatgattggaagtccccccaataggccaaaacaagcatgacgcgattggccgtccccaacggccaacgagttgtccgccccgcccctcgctttcgtccccgttttccggtgccttgcttccccctcctcactcaaatgcctcacaggccgaggctccgaggccgcggggaggaggaggagcggcagccagcaggggaggaggacacgaatcgtagtcggcctcccgcccgccccggcaattgttgttgctgctgcgcgcagggcggttctggattgcggtctgccccacccacgaacaatccatggctccatctccgcctcggcgtgctgcgctcctcctcgccacggtgcttctgctggcggcggccgggtccacccccggcgccacggctgctggcatcttccaggtgcgccgcaagttcaccgccggggtgggagggggtgctggcgccaacatcagcgcccttcgcgcccacgatggcacccgtcacggccgcctcctcgcagccgccgacctccctcttggcggcctcggcctccccactgacactggcctctattacacggagatcaagctcgggacgccacccaagcactactacgtccaggtcgacaccggcagcgacatcctctgggtcaactgcatcacctgcgagcaatgcccccacaagagcgggctcgggttagacttgacgctttacgaccccaaggcatcctcgaccgggagcatggtgatgtgcgatcaggcattctgtgcagccacctttggcggaaagctgccgaagtgcggcgccaatgtgccctgcgaatatagtgtcacctacggtgatggtagctcgacgataggttcctttgtcaccgatgcgctgcagtttgatcaggtgactagggatgggcagacacagccggctaatgccagcgtcattttcgggtgcggtgctcaacaaggtggggatttgggaagttcaaaccaagcccttgacggaattcttggttttggtgaggcaaatacatcaatgctatcacaactaactaccgctggtaaagtgaagaagatatttgcccattgtttggataccataaaaggaggtggaattttttctattggggatgtggtgcagccaaaagtaaaaacaacgccattggtagccgacaagccacactacaatgtgaaccttaagacaatcgatgttggtggcactactctacaactcccagctcatatttttgaaccaggagaaaaaaagggtaccataatcgacagtggtaccaccttgacataccttccagaattggttttcaaagaagtaatgctcgcggtatttaacaagcatcaggatataaccttccatgatgttcaaggttttttgtgtttccaatatcctggaaggtatggtttagtagtttacacagttgtaaaagtactaattattacctgcaattccttccatgctgtgtttcactgaaatatatttattgaattattcgatggataatgtcctctaatacttctttcatgaattgacatcctcgtctgtttgcagttgctctgttttcatttgaattggcacaaagacgaatcaccggctgaccggcccatatattagattctcttgctatgattatgattctaactgttgtgttcatttctcttgcagtgtagatgatggattcccaaccatcacattccattttgaggatgatcttgcactacatgtgtatccccatgagtactttttcgcaaatgggaatgacgtatactgcgtgggattccaaaatggtgcatcacagtcaaaggatggaaaggacattgtgcttatgggagatcttgtcctttccaacaagttggttatctatgacttggaaaatcgagtcattgggtggactgactacaactgttcgtcgagcattaaaattaaggacgacaaaacgggcgcaacatctactgttaattcacatgacttgtcctcaggatggaagttccactggcacatgtccccggttctattgttggtaacaacggtgtgcagttatttaatatgctaactccactgtacaggaaatccatctggttcgtatatcctttccacgaaaaggatcggagagatgtagggctatctttaggttgtgttctccgaccacggaaaacaatggaaatagaaaaatactgtaatgctatactgagccattgtttgactagggtaatgccgaggtgaccgcacgtgagttcagtttcccgtttaaaaaatatgcatgtacagcagcaatgtatatggccaaataagaatttcttttgtttgcagtacagcaatgttctgtcatttctttgggaaaacaattgttg

SEQ ID NO: 221423 - DNA, 2714 bp, Zea Mays
caaaagtttagacgatcttatgttatagaattgctggtgctgaagaaagtacggcgtcagaatcttctgaaactcctgagtcaccagaagaagagaaaaggcctttccaaaggggagatagggtgaagtatgttggaacctctgcagtcgttgaagcagatcagaggaaggtgaagcacaaagtcaagatgaaccattggatgaggatcattttggggaaaatacctactcaagatggctcaaggagtgcctatacttttattagtggaaggtggattacgaagaggaacatttctaactcgaataatcacaggggtctatcaaatggacagcgtggggaggtatatgaggttaatggggatcaggttgctgtcatatttgatccttctatagagaaatcacacaatgcccatgaagatgtaactaacaaggaggaaaatggatcagcaactgtttactgggttgattctcaggatattgcacatgatcatgataccgaatcagacgattggcatattgcacttgaagcactttgtgaggttttgccatctctacagccaataattgtctactttccagacagttctcaatggttatctagagcagtttcaaaatcagatcgcagagagtttgtgcaaagagttgagaaaatgtttgaccggcttaccggaccggtagtattgatatgtggccagaacttactggcagcagcacccaaggataaggaacaacctgcactgatgttccacaatctctctcgcctgtcttcactgccatccccactgaagcggttggtagggggcctgaagggagaaagatattcaaggtccagtgacatatcaaagctcttcaccaatagtctaactgttcctcttccagaggaagatgaacaactacaactttttaataatcagattgaagaggatagaaaaattatgatttcgaggcataaccttgttaaattgcacaaggtgcttgaggagcatgatctttcttgtgtggagcttttggatgtgaagttggatggtattgttttaacaaaacaaaaagcggagaaggccgttggttgggctagaaaccactatctgtcatcaacaactcttccttctatcaaaggtgacaggttaatcattccccgtgagagtctggatatatcaatcgagaggctgaaggaacagggtataacagctaagaaatcctctcaaaatctgaaggttttggctaaagatgagtatgagcgcaatttcatttctgctgttgtgcctccgaatgaaattggagtgaaatttgacgacatcggtgcacttgaggacgtgaagagaacattggatgagcttgttacacttccaatgaggagacctgaacttttttcgcgtggaaatttgttaaggccctgtaaaggtgttttgctttttgggcctcctgggacaggaaaaacactcttggcaaaagcccttgcaacagaagctggagcaaattttatcagtataactggttctacactcacatcaaagtggtttggagacgcagagaagctcacaaaggcccttttctcctttgcgactcgactagctcctgttatcatatttgtggacgaggttgacagcttacttggtgcaagaggtggtgcatttgagcatgaagcaacaagaaggatgcgcaatgaattcatggcagcttgggatggtctcaggtccaaagagaaccaacggatccttattcttggtgcaacaaatcgtccatttgatctggatgatgctgtgatacggcgtttacctagacggatatatgttgaccttccggatgcgcagaaccgaatgaaaattctaaagattttacttgcgaaggaaaaactagaatctgattttaagttcgatgagcttgcaaatgccacagaaggctattcagggagcgacctaaagaacctatgtgtagctgcagcatataggccagtccatgaactactagaagaagagaaaaagggacgtgtgagtaacgaaaacagttatctgagacccctttgcttggatgattttatccaagcaaaagctaaggttagctcgtctgtttcttatgatgcaacaagtatgaatgaattgagaaaatggaacgagcagtatggggaaggtggcagcaggactaaatcaccatttgggtttggcaactgacactacagtagagatttaccaatactgtatctttgtaacatttaggctgcctcttgttggtagattagggagtcagttccatttttttaccatgagcttatttgaacaacctcgtaatcacctcgtgcaaacaaaaaagaatctagttaaacgccaattttgcctactagttaatggtcggaaataccagtgtagaatcagaaatcggctacacactacaaaataatgtatctgagctactctgggtaagcattaagctttaacaagatgtaaacggcttaagaattttcagttaattcatactagttctcagcatggaattcagtagaactaatttagtattgatagctagtcgatggctggaatcttcaggatgtctcctattgcccagaaactttgttcgtatcaaaagaatggaagagaatagcttgctagtagtattgtatttttggtccttacatgtataaaatgtgtcggttacttttccttcacacatgcgaatcatgtgtagaaatcaactggcataaaactgaactattatctgag

SEQ ID NO: 221424 - DNA, 3625 bp, Zea Mays
aagaggattacccgaaacctggagcggagcggtggtgccttggcgtctccctcctctccgtcgcccgcaggcgtgcgccaccatctacgccgcgccgcccgccatcctgccgcccgagatgtaccacgcgatgcggctgcgctgcctcctcctgcaccctccgatgtggagtaattcgagctccctcggcatctctgccagcggcgtcagtagaggttccttcgtcaggaggttcagcgcgctcggggcgccgcggccgcctggtcctgcccgacggctgtgtcggttttacggctccaagggcggcgtcgggagcgctgaggcgaggggcgccgctgcgtccccggcggcggcggggagcagcggcaggtgcttcgagcaggagcacgcgcggctcggggaaagggaccagcaggagtggctgagcggcgagaggtttctcaccggctgcaagcgacgggagtcgacgttcctcaccaggcgggagaggttccgcagagagttcctgcgccgcgtcgtgccgtgggagaaggggtcgctctcgtggcagaatttcccctactacgtcaatgacaatgcgaggcagctgctgagtgagtgtgtggcgtcccacctgcgtcacaagagtgtcacatcagaatatggctcacgtttggaatcctctggagggcggatattgctccaaagttctccaggaactgagctttacagggagagatttgttagagctcttgcacatgagttgcaagtgccgctattggttctggacagcagtgttcttgcaccatatgattatggggaggattactcagaaagtgaggaggaggatgagcatgctgagtcagaggatgaaggttcagaatctgaaatggaagacgatggtgatgaagattggacaagcaacaatggaaaatctggtgaaagtgacgatgaggatgctctcaaatctgtggaagatctgaagaaatctgtggatgacctaaaaaagttggttccttgtactatcgaggaatttgccaagagaattgctggtgctgaagaaagtacggcgtcagaatcttctgaaactcctgagtcaccagaagaagagaaaaggcctttccaaaggggagatagggtgaagtatgttggaacctctgcagtcgttgaagcagatcagaggaaggtgaagcacaaagtcaagatgaaccattggatgaggatcattttggggaaaatacctactcaagatggctcaaggagtgcctatacttttattagtggaaggggtctatcaaatggacagcgtggggaggtatatgaggttaatggggatcaggttgctgtcatatttgatccttctatagagaaatcacacaatgcccatgaagatgtaactaacaaggaggaaaatggatcagcaactgtttactgggttgattctcaggatattgcacatgatcatgataccgaatcagacgattggcatattgcacttgaagcactttgtgaggttttgccatctctacagccaataattgtctactttccagacagttctcaatggttatctagagcagtttcaaaatcagatcgcagagagtttgtgcaaagagttgagaaaatgtttgaccggcttaccggaccggtagtattgatatgtggccagaacttactggcagcagcacccaaggataaggaacaaccatccccactgaagcggttggtagggggcctgaagggagaaagatattcaaggtccagtgacatatcaaagctcttcaccaatagtctaactgttcctcttccagaggaagatgaacaactacaactttttaataatcagattgaagaggatagaaaaattatgatttcgaggcataaccttgttaaattgcacaaggtgcttgaggagcatgatctttcttgtgtggagcttttggatgtgaagttggatggtattgttttaacaaaacaaaaagcggagaaggccgttggttgggctagaaaccactatctgtcatcaacaactcttccttctatcaaaggtgacaggttaatcattccccgtgagagtctggatatatcaatcgagaggctgaaggaacagggtataacagctaagaaatcctctcaaaatctgaaggttttggctaaagatgagtatgagcgcaatttcatttctgctgttgtgcctccgaatgaaattggagtgaaatttgacgacatcggtgcacttgaggacgtgaagagaacattggatgagcttgttacacttccaatgaggagacctgaacttttttcgcgtggaaatttgttaaggccctgtaaaggtgttttgctttttgggcctcctgggacaggaaaaacactcttggcaaaagcccttgcaacagaagctggagcaaattttatcagtataactggttctacactcacatcaaagtggtttggagacgcagagaagctcacaaaggcccttttctcctttgcgactcgactagctcctgttatcatatttgtggacgaggttgacagcttacttggtgcaagaggtggtgcatttgagcatgaagcaacaagaaggatgcgcaatgaattcatggcagcttgggatggtctcaggtccaaagagaaccaacggatccttattcttggtgcaacaaatcgtccatttgatctggatgatgctgtgatacggcgtttacctagacggatatatgttgaccttccggatgcgcagaaccgaatgaaaattctaaagattttacttgcgaaggaaaaactagaatctgattttaagttcgatgagcttgcaaatgccacagaaggctattcagggagcgacctaaagaacctatgtgtagctgcagcatataggccagtccatgaactactagaagaagagaaaaagggacgtgtgagtaacgaaaacagttatctgagacccctttgcttggatgattttatccaagcaaaagctaaggttagctcgtctgtttcttatgatgcaacaagtatgaatgaattgagaaaatggaacgagcagtatggggaaggtggcagcaggactaaatcaccatttgggtttggcaactgacactacagtagagatttaccaatactgtatctttgtaacatttaggctgcctcttgttggtagattagggagtcagttccatttttttaccatgagcttatttgaacaacctcgtaatcacctcgtgcaaacaaaaaagaatctagttaaacgccaattttgcctactagttaatggtcggaaataccagtgtagaatcagaaatcggctacacactacaaaataatgtatctgagctactctgggtaagcattaagctttaacaagatgtaaacggcttaagaattttcagttaattcatactagttctcagcatggaattcagtagaactaatttagtattgatagctagtcgatggctggaatcttcaggatgtctcctattgcccagaaactttgttcgtatcaaaagaatggaagagaatagcttgctagtagtattgtatttttggtccttacatgtataaaatgtgtcggttacttttccttcacacatgcgaatcatgtgtagaaatcaactggcataaaactgaactattatctgag

SEQ ID NO: 221425 - DNA, 3681 bp, Zea Mays
cacggcgtgagaagaggattacccgaaacctggagcggagcggtggtgccttggcgtctccctcctctccgtcgcccgcaggcgtgcgccaccatctacgccgcgccgcccgccatcctgccgcccgagatgtaccacgcgatgcggctgcgctgcctcctcctgcaccctccgatgtggagtaattcgagctccctcggcatctctgccagcggcgtcagtagaggttccttcgtcaggaggttcagcgcgctcggggcgccgcggccgcctggtcctgcccgacggctgtgtcggttttacggctccaagggcggcgtcgggagcgctgaggcgaggggcgccgctgcgtccccggcggcggcggggagcagcggcaggtgcttcgagcaggagcacgcgcggctcggggaaagggaccagcaggagtggctgagcggcgagaggtttctcaccggctgcaagcgacgggagtcgacgttcctcaccaggcgggagaggttccgcagagagttcctgcgccgcgtcgtgccgtgggagaaggggtcgctctcgtggcagaatttcccctactacgtcaatgacaatgcgaggcagctgctgagtgagtgtgtggcgtcccacctgcgtcacaagagtgtcacatcagaatatggctcacgtttggaatcctctggagggcggatattgctccaaagttctccaggaactgagctttacagggagagatttgttagagctcttgcacatgagttgcaagtgccgctattggttctggacagcagtgttcttgcaccatatgattatggggaggattactcagaaagtgaggaggaggatgagcatgctgagtcagaggatgaaggttcagaatctgaaatggaagacgatggtgatgaagattggacaagcaacaatggaaaatctggtgaaagtgacgatgaggatgctctcaaatctgtggaagatctgaagaaatctgtggatgacctaaaaaagttggttccttgtactatcgaggaatttgccaagagaattgctggtgctgaagaaagtacggcgtcagaatcttctgaaactcctgagtcaccagaagaagagaaaaggcctttccaaaggggagatagggtgaagtatgttggaacctctgcagtcgttgaagcagatcagaggatcattttggggaaaatacctactcaagatggctcaaggagtgcctatacttttattagtggaaggtggattacgaagaggaacatttctaactcgaataatcacaggggtctatcaaatggacagcgtggggaggtatatgaggttaatggggatcaggttgctgtcatatttgatccttctatagagaaatcacacaatgcccatgaagatgtaactaacaaggaggaaaatggatcagcaactgtttactgggttgattctcaggatattgcacatgatcatgataccgaatcagacgattggcatattgcacttgaagcactttgtgaggttttgccatctctacagccaataattgtctactttccagacagttctcaatggttatctagagcagtttcaaaatcagatcgcagagagtttgtgcaaagagttgagaaaatgtttgaccggcttaccggaccggtagtattgatatgtggccagaacttactggcagcagcacccaaggataaggaacaacctgcactgatgttccacaatctctctcgcctgtcttcactgccatccccactgaagcggttggtagggggcctgaagggagaaagatattcaaggtccagtgacatatcaaagctcttcaccaatagtctaactgttcctcttccagaggaagatgaacaactacaactttttaataatcagattgaagaggatagaaaaattatgatttcgaggcataaccttgttaaattgcacaaggtgcttgaggagcatgatctttcttgtgtggagcttttggatgtgaagttggatggtattgttttaacaaaacaaaaagcggagaaggccgttggttgggctagaaaccactatctgtcatcaacaactcttccttctatcaaaggtgacaggttaatcattccccgtgagagtctggatatatcaatcgagaggctgaaggaacagggtataacagctaagaaatcctctcaaaatctgaaggttttggctaaagatgagtatgagcgcaatttcatttctgctgttgtgcctccgaatgaaattggagtgaaatttgacgacatcggtgcacttgaggacgtgaagagaacattggatgagcttgttacacttccaatgaggagacctgaacttttttcgcgtggaaatttgttaaggccctgtaaaggtgttttgctttttgggcctcctgggacaggaaaaacactcttggcaaaagcccttgcaacagaagctggagcaaattttatcagtataactggttctacactcacatcaaagtggtttggagacgcagagaagctcacaaaggcccttttctcctttgcgactcgactagctcctgttatcatatttgtggacgaggttgacagcttacttggtgcaagaggtggtgcatttgagcatgaagcaacaagaaggatgcgcaatgaattcatggcagcttgggatggtctcaggtccaaagagaaccaacggatccttattcttggtgcaacaaatcgtccatttgatctggatgatgctgtgatacggcgtttacctagacggatatatgttgaccttccggatgcgcagaaccgaatgaaaattctaaagattttacttgcgaaggaaaaactagaatctgattttaagttcgatgagcttgcaaatgccacagaaggctattcagggagcgacctaaagaacctatgtgtagctgcagcatataggccagtccatgaactactagaagaagagaaaaagggacgtgtgagtaacgaaaacagttatctgagacccctttgcttggatgattttatccaagcaaaagctaaggttagctcgtctgtttcttatgatgcaacaagtatgaatgaattgagaaaatggaacgagcagtatggggaaggtggcagcaggactaaatcaccatttgggtttggcaactgacactacagtagagatttaccaatactgtatctttgtaacatttaggctgcctcttgttggtagattagggagtcagttccatttttttaccatgagcttatttgaacaacctcgtaatcacctcgtgcaaacaaaaaagaatctagttaaacgccaattttgcctactagttaatggtcggaaataccagtgtagaatcagaaatcggctacacactacaaaataatgtatctgagctactctgggtaagcattaagctttaacaagatgtaaacggcttaagaattttcagttaattcatactagttctcagcatggaattcagtagaactaatttagtattgatagctagtcgatggctggaatcttcaggatgtctcctattgcccagaaactttgttcgtatcaaaagaatggaagagaatagcttgctagtagtattgtatttttggtccttacatgtataaaatgtgtcggttacttttccttcacacatgcgaatcatgtgtagaaatcaactggcataaaactgaactattatctgag

SEQ ID NO: 221426 - DNA, 3652 bp, Zea Mays
cagcgcaggagtggcacggcgtgagaagaggattacccgaaacctggagcggagcggtggtgccttggcgtctccctcctctccgtcgcccgcaggcgtgcgccaccatctacgccgcgccgcccgccatcctgagccgcccgagatgtaccacgcgatgcggctgcgctgcctcctcctgcaccctccgatgtggagtaattcgagctccctcggcatctctgccagcggcgtcagtagaggttccttcgtcaggaggttcagcgcgctcggggcgccgcggccgcctggtcctgcccgacggctgtgtcggttttacggctccaagggcggcgtcgggagcgctgaggcgaggggcgccgctgcgtccccggcggcggcggggagcagcggcaggtgcttcgagcaggagcacgcgcggctcggggaaagggaccagcaggagtggctgagcggcgagaggtttctcaccggctgcaagcgacgggagtcgacgttcctcaccaggcgggagaggttccgcagagagttcctgcgccgcgtcgtgccgtgggagaaggggtcgctctcgtggcagaatttcccctactacgtcaatgacaatgcgaggcagctgctgagtgagtgtgtggcgtcccacctgcgtcacaagagtgtcacatcagaatatggctcacgtttggaatcctctggagggcggatattgctccaaagttctccaggaactgagctttacagggagagatttgttagagctcttgcacatgagttgcaagtgccgctattggttctggacagcagtgttcttgcaccatatgattatggggaggattactcagaaagtgaggaggaggatgagcatgctgagtcagaggatgaaggttcagaatctgaaatggaagacgatggtgatgaagattggacaagcaacaatggaaaatctggtgaaagtgacgatgaggatgctctcaaatctgtggaagatctgaagaaatctgtggatgacctaaaaaagttggttccttgtactatcgaggaatttgccaagagaattgctggtgctgaagaaagtacggcgtcagaatcttctgaaactcctgagtcaccagaagaagagaaaaggcctttccaaaggggagatagggtgaagtatgttggaacctctgcagtcgttgaagcagatcagaggaaggtgaagcacaaagtcaagatgaaccattggatgaggatcattttggggaaaatacctactcaagatggctcaaggagtgcctatacttttattagtggaaggggtctatcaaatggacagcgtggggaggtatatgaggttaatggggatcaggttgctgtcatatttgatccttctatagagaaatcacacaatgcccatgaagatgtaactaacaaggaggaaaatggatcagcaactgtttactgggttgattctcaggatattgcacatgatcatgataccgaatcagacgattggcatattgcacttgaagcactttgtgaggttttgccatctctacagccaataattgtctactttccagacagttctcaatggttatctagagcagtttcaaaatcagatcgcagagagtttgtgcaaagagttgagaaaatgtttgaccggcttaccggaccggtagtattgatatgtggccagaacttactggcagcagcacccaaggataaggaacaaccatccccactgaagcggttggtagggggcctgaagggagaaagatattcaaggtccagtgacatatcaaagctcttcaccaatagtctaactgttcctcttccagaggaagatgaacaactacaactttttaataatcagattgaagaggatagaaaaattatgatttcgaggcataaccttgttaaattgcacaaggtgcttgaggagcatgatctttcttgtgtggagcttttggatgtgaagttggatggtattgttttaacaaaacaaaaagcggagaaggccgttggttgggctagaaaccactatctgtcatcaacaactcttccttctatcaaaggtgacaggttaatcattccccgtgagagtctggatatatcaatcgagaggctgaaggaacagggtataacagctaagaaatcctctcaaaatctgaaggttttggctaaagatgagtatgagcgcaatttcatttctgctgttgtgcctccgaatgaaattggagtgaaatttgacgacatcggtgcacttgaggacgtgaagagaacattggatgagcttgttacacttccaatgaggagacctgaacttttttcgcgtggaaatttgttaaggccctgtaaaggtgttttgctttttgggcctcctgggacaggaaaaacactcttggcaaaagcccttgcaacagaagctggagcaaattttatcagtataactggttctacactcacatcaaagtggtttggagacgcagagaagctcacaaaggcccttttctcctttgcgactcgactagctcctgttatcatatttgtggacgaggttgacagcttacttggtgcaagaggtggtgcatttgagcatgaagcaacaagaaggatgcgcaatgaattcatggcagcttgggatggtctcaggtccaaagagaaccaacggatccttattcttggtgcaacaaatcgtccatttgatctggatgatgctgtgatacggcgtttacctagacggatatatgttgaccttccggatgcgcagaaccgaatgaaaattctaaagattttacttgcgaaggaaaaactagaatctgattttaagttcgatgagcttgcaaatgccacagaaggctattcagggagcgacctaaagaacctatgtgtagctgcagcatataggccagtccatgaactactagaagaagagaaaaagggacgtgtgagtaacgaaaacagttatctgagacccctttgcttggatgattttatccaagcaaaagctaaggttagctcgtctgtttcttatgatgcaacaagtatgaatgaattgagaaaatggaacgagcagtatggggaaggtggcagcaggactaaatcaccatttgggtttggcaactgacactacagtagagatttaccaatactgtatctttgtaacatttaggctgcctcttgttggtagattagggagtcagttccatttttttaccatgagcttatttgaacaacctcgtaatcacctcgtgcaaacaaaaaagaatctagttaaacgccaattttgcctactagttaatggtcggaaataccagtgtagaatcagaaatcggctacacactacaaaataatgtatctgagctactctgggtaagcattaagctttaacaagatgtaaacggcttaagaattttcagttaattcatactagttctcagcatggaattcagtagaactaatttagtattgatagctagtcgatggctggaatcttcaggatgtctcctattgcccagaaactttgttcgtatcaaaagaatggaagagaatagcttgctagtagtattgtatttttggtccttacatgtataaaatgtgtcggttacttttccttcacacatgcgaatcatgtgtagaaatcaactggcataaaactgaactattatctgag

SEQ ID NO: 221427 - DNA, 3704 bp, Zea Mays
cccaacccagcgcaggagtggcacggcgtgagaagaggattacccgaaacctggagcggagcggtggtgccttggcgtctccctcctctccgtcgcccgcaggcgtgcgccaccatctacgccgcgccgcccgccatcctgagccgcccgagatgtaccacgcgatgcggctgcgctgcctcctcctgcaccctccgatgtggagtaattcgagctccctcggcatctctgccagcggcgtcagtagaggttccttcgtcaggaggttcagcgcgctcggggcgccgcggccgcctggtcctgcccgacggctgtgtcggttttacggctccaagggcggcgtcgggagcgctgaggcgaggggcgccgctgcgtccccggcggcggcggggagcagcggcaggtgcttcgagcaggagcacgcgcggctcggggaaagggaccagcaggagtggctgagcggcgagaggtttctcaccggctgcaagcgacgggagtcgacgttcctcaccaggcgggagaggttccgcagagagttcctgcgccgcgtcgtgccgtgggagaaggggtcgctctcgtggcagaatttcccctactacgtcaatgacaatgcgaggcagctgctgagtgagtgtgtggcgtcccacctgcgtcacaagagtgtcacatcagaatatggctcacgtttggaatcctctggagggcggatattgctccaaagttctccaggaactgagctttacagggagagatttgttagagctcttgcacatgagttgcaagtgccgctattggttctggacagcagtgttcttgcaccatatgattatggggaggattactcagaaagtgaggaggaggatgagcatgctgagtcagaggatgaaggttcagaatctgaaatggaagacgatggtgatgaagattggacaagcaacaatggaaaatctggtgaaagtgacgatgaggatgctctcaaatctgtggaagatctgaagaaatctgtggatgacctaaaaaagttggttccttgtactatcgaggaatttgccaagagaattgctggtgctgaagaaagtacggcgtcagaatcttctgaaactcctgagtcaccagaagaagagaaaaggcctttccaaaggggagatagggtgaagtatgttggaacctctgcagtcgttgaagcagatcagaggatcattttggggaaaatacctactcaagatggctcaaggagtgcctatacttttattagtggaaggtggattacgaagaggaacatttctaactcgaataatcacaggggtctatcaaatggacagcgtggggaggtatatgaggttaatggggatcaggttgctgtcatatttgatccttctatagagaaatcacacaatgcccatgaagatgtaactaacaaggaggaaaatggatcagcaactgtttactgggttgattctcaggatattgcacatgatcatgataccgaatcagacgattggcatattgcacttgaagcactttgtgaggttttgccatctctacagccaataattgtctactttccagacagttctcaatggttatctagagcagtttcaaaatcagatcgcagagagtttgtgcaaagagttgagaaaatgtttgaccggcttaccggaccggtagtattgatatgtggccagaacttactggcagcagcacccaaggataaggaacaacctgcactgatgttccacaatctctctcgcctgtcttcactgccatccccactgaagcggttggtagggggcctgaagggagaaagatattcaaggtccagtgacatatcaaagctcttcaccaatagtctaactgttcctcttccagaggaagatgaacaactacaactttttaataatcagattgaagaggatagaaaaattatgatttcgaggcataaccttgttaaattgcacaaggtgcttgaggagcatgatctttcttgtgtggagcttttggatgtgaagttggatggtattgttttaacaaaacaaaaagcggagaaggccgttggttgggctagaaaccactatctgtcatcaacaactcttccttctatcaaaggtgacaggttaatcattccccgtgagagtctggatatatcaatcgagaggctgaaggaacagggtataacagctaagaaatcctctcaaaatctgaaggttttggctaaagatgagtatgagcgcaatttcatttctgctgttgtgcctccgaatgaaattggagtgaaatttgacgacatcggtgcacttgaggacgtgaagagaacattggatgagcttgttacacttccaatgaggagacctgaacttttttcgcgtggaaatttgttaaggccctgtaaaggtgttttgctttttgggcctcctgggacaggaaaaacactcttggcaaaagcccttgcaacagaagctggagcaaattttatcagtataactggttctacactcacatcaaagtggtttggagacgcagagaagctcacaaaggcccttttctcctttgcgactcgactagctcctgttatcatatttgtggacgaggttgacagcttacttggtgcaagaggtggtgcatttgagcatgaagcaacaagaaggatgcgcaatgaattcatggcagcttgggatggtctcaggtccaaagagaaccaacggatccttattcttggtgcaacaaatcgtccatttgatctggatgatgctgtgatacggcgtttacctagacggatatatgttgaccttccggatgcgcagaaccgaatgaaaattctaaagattttacttgcgaaggaaaaactagaatctgattttaagttcgatgagcttgcaaatgccacagaaggctattcagggagcgacctaaagaacctatgtgtagctgcagcatataggccagtccatgaactactagaagaagagaaaaagggacgtgtgagtaacgaaaacagttatctgagacccctttgcttggatgattttatccaagcaaaagctaaggttagctcgtctgtttcttatgatgcaacaagtatgaatgaattgagaaaatggaacgagcagtatggggaaggtggcagcaggactaaatcaccatttgggtttggcaactgacactacagtagagatttaccaatactgtatctttgtaacatttaggctgcctcttgttggtagattagggagtcagttccatttttttaccatgagcttatttgaacaacctcgtaatcacctcgtgcaaacaaaaaagaatctagttaaacgccaattttgcctactagttaatggtcggaaataccagtgtagaatcagaaatcggctacacactacaaaataatgtatctgagctactctgggtaagcattaagctttaacaagatgtaaacggcttaagaattttcagttaattcatactagttctcagcatggaattcagtagaactaatttagtattgatagctagtcgatggctggaatcttcaggatgtctcctattgcccagaaactttgttcgtatcaaaagaatggaagagaatagcttgctagtagtattgtatttttggtccttacatgtataaaatgtgtcggttacttttccttcacacatgcgaatcatgtgtagaaatcaactggcataaaactgaactattatctgag

SEQ ID NO: 221428 - DNA, 4119 bp, Zea Mays
atggactatgtcgcgtacacctatacgtcgagctgctcggccaagatcgatgccagagatgcttcctccgcgccgtccaagccagaggggattcccagaaggggggatttgttgcgtgatctcggggtgggagggcaggggcagttgggtgggaaatgggctagtttgggaaccacaatttttcttgggaaaatagaaatcccttgggaaattggggttcccaaactagccctaaaggagcctaaagagatacacacatccagacgtttgaaatggtcgtgggccgttatgcaaatcccggatcctattcacgggctaggaatgagtaaacaatttttctctggtgatgccagaaaaaagcggccccttataatgactgcaaattctatcaaggccgacagcccactaggtattcgccatggcttgttggtgttggtatccaactggggcccaacgccccaacccagcgcaggagtggcacggcgtgagaagaggattacccgaaacctggagcggagcggtggtgccttggcgtctccctcctctccgtcgcccgcaggcgtgcgccaccatctacgccgcgccgcccgccatcctgagccgcccgagatgtaccacgcgatgcggctgcgctgcctcctcctgcaccctccgatgtggagtaattcgagctccctcggcatctctgccagcggcgtcagtagaggttccttcgtcaggaggttcagcgcgctcggggcgccgcggccgcctggtcctgcccgacggctgtgtcggttttacggctccaagggcggcgtcgggagcgctgaggcgaggggcgccgctgcgtccccggcggcggcggggagcagcggcaggtgcttcgagcaggagcacgcgcggctcggggaaagggaccagcaggagtggctgagcggcgagaggtttctcaccggctgcaagcgacgggagtcgacgttcctcaccaggcgggagaggttccgcagagagttcctgcgccgcgtcgtgccgtgggagaaggggtcgctctcgtggcagaatttcccctactacgtcaatgacaatgcgaggcagctgctgagtgagtgtgtggcgtcccacctgcgtcacaagagtgtcacatcagaatatggctcacgtttggaatcctctggagggcggatattgctccaaagttctccaggaactgagctttacagggagagatttgttagagctcttgcacatgagttgcaagtgccgctattggttctggacagcagtgttcttgcaccatatgattatggggaggattactcagaaagtgaggaggaggatgagcatgctgagtcagaggatgaaggttcagaatctgaaatggaagacgatggtgatgaagattggacaagcaacaatggaaaatctggtgaaagtgacgatgaggatgctctcaaatctgtggaagatctgaagaaatctgtggatgacctaaaaaagttggttccttgtactatcgaggaatttgccaagagaattgctggtgctgaagaaagtacggcgtcagaatcttctgaaactcctgagtcaccagaagaagagaaaaggcctttccaaaggggagatagggtgaagtatgttggaacctctgcagtcgttgaagcagatcagaggatcattttggggaaaatacctactcaagatggctcaaggagtgcctatacttttattagtggaaggggtctatcaaatggacagcgtggggaggtatatgaggttaatggggatcaggttgctgtcatatttgatccttctatagagaaatcacacaatgcccatgaagatgtaactaacaaggaggaaaatggatcagcaactgtttactgggttgattctcaggatattgcacatgatcatgataccgaatcagacgattggcatattgcacttgaagcactttgtgaggttttgccatctctacagccaataattgtctactttccagacagttctcaatggttatctagagcagtttcaaaatcagatcgcagagagtttgtgcaaagagttgagaaaatgtttgaccggcttaccggaccggtagtattgatatgtggccagaacttactggcagcagcacccaaggataaggaacaacctgcactgatgttccacaatctctctcgcctgtcttcactgccatccccactgaagcggttggtagggggcctgaagggagaaagatattcaaggtccagtgacatatcaaagctcttcaccaatagtctaactgttcctcttccagaggaagatgaacaactacaactttttaataatcagattgaagaggatagaaaaattatgatttcgaggcataaccttgttaaattgcacaaggtgcttgaggagcatgatctttcttgtgtggagcttttggatgtgaagttggatggtattgttttaacaaaacaaaaagcggagaaggccgttggttgggctagaaaccactatctgtcatcaacaactcttccttctatcaaaggtgacaggttaatcattccccgtgagagtctggatatatcaatcgagaggctgaaggaacagggtataacagctaagaaatcctctcaaaatctgaaggttttggctaaagatgagtatgagcgcaatttcatttctgctgttgtgcctccgaatgaaattggagtgaaatttgacgacatcggtgcacttgaggacgtgaagagaacattggatgagcttgttacacttccaatgaggagacctgaacttttttcgcgtggaaatttgttaaggccctgtaaaggtgttttgctttttgggcctcctgggacaggaaaaacactcttggcaaaagcccttgcaacagaagctggagcaaattttatcagtataactggttctacactcacatcaaagtggtttggagacgcagagaagctcacaaaggcccttttctcctttgcgactcgactagctcctgttatcatatttgtggacgaggttgacagcttacttggtgcaagaggtggtgcatttgagcatgaagcaacaagaaggatgcgcaatgaattcatggcagcttgggatggtctcaggtccaaagagaaccaacggatccttattcttggtgcaacaaatcgtccatttgatctggatgatgctgtgatacggcgtttacctagacggatatatgttgaccttccggatgcgcagaaccgaatgaaaattctaaagattttacttgcgaaggaaaaactagaatctgattttaagttcgatgagcttgcaaatgccacagaaggctattcagggagcgacctaaagaacctatgtgtagctgcagcatataggccagtccatgaactactagaagaagagaaaaagggacgtgtgagtaacgaaaacagttatctgagacccctttgcttggatgattttatccaagcaaaagctaaggttagctcgtctgtttcttatgatgcaacaagtatgaatgaattgagaaaatggaacgagcagtatggggaaggtggcagcaggactaaatcaccatttgggtttggcaactgacactacagtagagatttaccaatactgtatctttgtaacatttaggctgcctcttgttggtagattagggagtcagttccatttttttaccatgagcttatttgaacaacctcgtaatcacctcgtgcaaacaaaaaagaatctagttaaacgccaattttgcctactagttaatggtcggaaataccagtgtagaatcagaaatcggctacacactacaaaataatgtatctgagctactctgggtaagcattaagctttaacaagatgtaaacggcttaagaattttcagttaattcatactagttctcagcatggaattcagtagaactaatttagtattgatagctagtcgatggctggaatcttcaggatgtctcctattgcccagaaactttgttcgtatcaaaagaatggaagagaatagcttgctagtagtattgtatttttggtccttacatgtataaaatgtgtcggttacttttccttcacacatgcgaatcatgtgtagaaatcaactggcataaaactgaactattatctgag

SEQ ID NO: 221429 - DNA, 3930 bp, Zea Mays
atggactatgtcgcgtacacctatacgtcgagctgctcggccaagatcgatgccagagatgcttcctccgcgccgtccaagccagaggggattcccagaaggggggatttgttgcgtgatctcggggtgggagggcaggggcagttgggtgggaaatgggctagtttgggaaccacaatttttcttgggaaaatagaaatcccttgggaaattggggttcccaaactagccctaaaggagcctaaagagatacacacatccagacgtttgaaatggtcgtgggccgttatgcaaatcccggatcctattcacgggctaggaatgagtaaacaatttttctctggtgatgccagaaaaaagcggccccttataatgactgcaaattctatcaaggccgacagcccactagagccgcccgagatgtaccacgcgatgcggctgcgctgcctcctcctgcaccctccgatgtggagtaattcgagctccctcggcatctctgccagcggcgtcagtagaggttccttcgtcaggaggttcagcgcgctcggggcgccgcggccgcctggtcctgcccgacggctgtgtcggttttacggctccaagggcggcgtcgggagcgctgaggcgaggggcgccgctgcgtccccggcggcggcggggagcagcggcaggtgcttcgagcaggagcacgcgcggctcggggaaagggaccagcaggagtggctgagcggcgagaggtttctcaccggctgcaagcgacgggagtcgacgttcctcaccaggcgggagaggttccgcagagagttcctgcgccgcgtcgtgccgtgggagaaggggtcgctctcgtggcagaatttcccctactacgtcaatgacaatgcgaggcagctgctgagtgagtgtgtggcgtcccacctgcgtcacaagagtgtcacatcagaatatggctcacgtttggaatcctctggagggcggatattgctccaaagttctccaggaactgagctttacagggagagatttgttagagctcttgcacatgagttgcaagtgccgctattggttctggacagcagtgttcttgcaccatatgattatggggaggattactcagaaagtgaggaggaggatgagcatgctgagtcagaggatgaaggttcagaatctgaaatggaagacgatggtgatgaagattggacaagcaacaatggaaaatctggtgaaagtgacgatgaggatgctctcaaatctgtggaagatctgaagaaatctgtggatgacctaaaaaagttggttccttgtactatcgaggaatttgccaagagaattgctggtgctgaagaaagtacggcgtcagaatcttctgaaactcctgagtcaccagaagaagagaaaaggcctttccaaaggggagatagggtgaagtatgttggaacctctgcagtcgttgaagcagatcagaggatcattttggggaaaatacctactcaagatggctcaaggagtgcctatacttttattagtggaaggggtctatcaaatggacagcgtggggaggtatatgaggttaatggggatcaggttgctgtcatatttgatccttctatagagaaatcacacaatgcccatgaagatgtaactaacaaggaggaaaatggatcagcaactgtttactgggttgattctcaggatattgcacatgatcatgataccgaatcagacgattggcatattgcacttgaagcactttgtgaggttttgccatctctacagccaataattgtctactttccagacagttctcaatggttatctagagcagtttcaaaatcagatcgcagagagtttgtgcaaagagttgagaaaatgtttgaccggcttaccggaccggtagtattgatatgtggccagaacttactggcagcagcacccaaggataaggaacaacctgcactgatgttccacaatctctctcgcctgtcttcactgccatccccactgaagcggttggtagggggcctgaagggagaaagatattcaaggtccagtgacatatcaaagctcttcaccaatagtctaactgttcctcttccagaggaagatgaacaactacaactttttaataatcagattgaagaggatagaaaaattatgatttcgaggcataaccttgttaaattgcacaaggtgcttgaggagcatgatctttcttgtgtggagcttttggatgtgaagttggatggtattgttttaacaaaacaaaaagcggagaaggccgttggttgggctagaaaccactatctgtcatcaacaactcttccttctatcaaaggtgacaggttaatcattccccgtgagagtctggatatatcaatcgagaggctgaaggaacagggtataacagctaagaaatcctctcaaaatctgaaggttttggctaaagatgagtatgagcgcaatttcatttctgctgttgtgcctccgaatgaaattggagtgaaatttgacgacatcggtgcacttgaggacgtgaagagaacattggatgagcttgttacacttccaatgaggagacctgaacttttttcgcgtggaaatttgttaaggccctgtaaaggtgttttgctttttgggcctcctgggacaggaaaaacactcttggcaaaagcccttgcaacagaagctggagcaaattttatcagtataactggttctacactcacatcaaagtggtttggagacgcagagaagctcacaaaggcccttttctcctttgcgactcgactagctcctgttatcatatttgtggacgaggttgacagcttacttggtgcaagaggtggtgcatttgagcatgaagcaacaagaaggatgcgcaatgaattcatggcagcttgggatggtctcaggtccaaagagaaccaacggatccttattcttggtgcaacaaatcgtccatttgatctggatgatgctgtgatacggcgtttacctagacggatatatgttgaccttccggatgcgcagaaccgaatgaaaattctaaagattttacttgcgaaggaaaaactagaatctgattttaagttcgatgagcttgcaaatgccacagaaggctattcagggagcgacctaaagaacctatgtgtagctgcagcatataggccagtccatgaactactagaagaagagaaaaagggacgtgtgagtaacgaaaacagttatctgagacccctttgcttggatgattttatccaagcaaaagctaaggttagctcgtctgtttcttatgatgcaacaagtatgaatgaattgagaaaatggaacgagcagtatggggaaggtggcagcaggactaaatcaccatttgggtttggcaactgacactacagtagagatttaccaatactgtatctttgtaacatttaggctgcctcttgttggtagattagggagtcagttccatttttttaccatgagcttatttgaacaacctcgtaatcacctcgtgcaaacaaaaaagaatctagttaaacgccaattttgcctactagttaatggtcggaaataccagtgtagaatcagaaatcggctacacactacaaaataatgtatctgagctactctgggtaagcattaagctttaacaagatgtaaacggcttaagaattttcagttaattcatactagttctcagcatggaattcagtagaactaatttagtattgatagctagtcgatggctggaatcttcaggatgtctcctattgcccagaaactttgttcgtatcaaaagaatggaagagaatagcttgctagtagtattgtatttttggtccttacatgtataaaatgtgtcggttacttttccttcacacatgcgaatcatgtgtagaaatcaactggcataaaactgaactattatctgag

SEQ ID NO: 221430 - DNA, 1159 bp, Zea Mays
tttttttttccatagcaggtgaggcctacctagtacgcgtcaccggccaccggcgtgtgtcaggaacgcgatctccagcccgatctcgtcgcatgcaggccgggctcgcgagcgcccccggccccgcggcaaggcaacggaagcaaagctactgacgcgacgcctggaggctggaggagcggccggctggccggccattctcatctcgtcgcgaggctagcctctggccagttggctaaccggcgcggcgcggcggggcgctctgttaggagcgcaccggcctgacggccggccggcgcacgcgggatgacacacaactgtggctggagacgtgttgtacggagctctggttgtgcggcggatcggatggctccctatgcacagtccgtctgattggattgctgctccattggtacagttgcacccgcggagatttaaagcaacgtttgtttggttgttcggtacataaatgcagactcgtctcgtgcaaaatatcacccccagccaggcccgtccgagacggccgccaagcacgtagtgcaacggcacgtaaaaggaggagagttgtagcttgtttattttttgctatatctcttaattagaatatttaatcacagtactgattttatatttgtgtttctgttattttttaaacaaaactagaccacatatattgtataatatttaaagattttttgtacaatcttatctaatacacgttctgatacagacaaccaaacacgagctatatttgatctgaatgtactaatacaaacaatcaaacgcaaacatgtgcatggatctaggctgtatacaaagaacatggctcctcacatacggaccaggatatcaccgtgcagcaaccaaacagaccgagtatgcaggcagccagagacagccatcgcgattgcaaaagcttctcgcgaaagcgtgcggtggctttgccaaccctgcagtgtccattggacgcgatttggccctatgggtgttggtggtcataagagttgttgagcttccagaccagagttccatgttaacctgttctctttacaccggatacgttgttcaaccgtggaaagatcagaaggatgatgccctacaggcggagtcacactccagcccatactcggtagtcggtaccatgcgcatacgtgcctag

SEQ ID NO: 221431 - DNA, 447 bp, Zea Mays
ttcttgcccaaaaaaattattggggttcacatgtatcccaagcattctaattttcgttctagacgattaagtgccagggagttaaatatgctgaagcgtaaagcaaagagtaatgccaaagatcatacaaaggctgtatctgaggatgatgaggttacactgaaaggatctgtgccctccaatggagcttcttctgaacaagttggtccacaaaatggtgtatttgatacagctgtcgaagaagacaatctggagtacaatgagaacggaagatggccttttcaacaatttgtggatcaacttattcatgatatgtttgatcctactcacccctctaaaggcgtttcgacatgtaaatcacagaaaaaactcaactccatatcacatctgagttctcatattcttgctccagaatgccgacgcatgaacaagaagaggacgggttag
